United States Patent Application Publication US 2008/0274467 A1 - sequence listing, part 9

SEQ ID NO: 1195 - DNA, 339926 bp, Homo sapiens
gaaatcagacaacgcctttcaaactcttataccaacctccggagttgggcaacatggcttctcccctttctaggtcccgtggcagccatcttgctgttactcgcctttgggccctgtatttttaaccttcttgtcaaatttgtttcctctaaaatcaaggcaatcaagctacagatggtcttacaaatggaactccgaatgagttcaactaacaacttctactgaggacccctggaccgacccgctggcccttccactggcctaaagagtttccctctggaggacaccacaactgcagggcccctgcttcacccctatccagcaggaagtagctagagcagtcattggccaaattccaaacagcagttggggtgtcctgtttagaggggaaattgagaggtgaagccagctgggcttctgggttgggtggggacttggagaacttttctgtctagctaaaggattgtaaatgcaccagtcagtgctctgtgtctagctaaaggtttgtaaatgcaccaatcagcactctataaaaatggaccaatcagcactctgtaaaatggaccaatcagctctctgcaaaatggatcactcagtaggatgcaggtggggccaaataagggaataaaagcaggccacctgcaccaccagcagcaacccacttgggtcccctccacacagtggaagctttgttcttttgctcttcacaataaatcttgctgctgctcactctttgggtccgcactgcctttatcagctgtaacactcaccacgaaggtctgcagcttcactcgtgaagccaatgagaccacaaactcaccgggaggaatgaacaactctggatgcgctgcctttatgaggtgtaacactcaccacgaagatctgcagcttcactcctgaagccagcgagaccatgaacccaccgggaggaatgaacaactccggacgcgccgcctttatgaactgtaacactcactgcgaaggtctgtggcttcactcctgaaatcagcgagaccacgaacccaccagaaggaagaaattctggacacatctgaacatctgaaggaacaaactccggacacaccatctttaagaactttaacactcaccgcgagggtccacagcttcattcttgaagtcagtgagaccaagaacccactggaaggaaccaattccggatacaaaatgtctccatgcatgcctcacctgcagtgccatacgctggttgatattaataataagacagattttgcagagcattgttggtgcgtatgctacccatactcctatcgaccaggcttgcaccttccagggccatgctttccagcctaaacaatcacagatcaggcccagactgcactccctgggagctttggaaaaagctgcatcaaaccagagcttctccccaagcccagcaaaccactcatggctcaggtagtccttcctggaagaccaaagtgttggaagtaaatgcttattccccgatgttacagagaagaatccgcaattagacaaaatgtttcctcaacaggaaactctttttactctttgcagaaagggtggtgcctgtcagcaatcctgccaggagtacccacaaagtaaaaaagatactagaatagttttgccttacacatgaggtccctattgctgtgtcctgactccattggctggagccagacctcacaatctaaactaaaacccgattggctaacagttcaaaactttttaaaataggtaaaggcagtgaggaacaaaggaaaaaaaggaagttgcttatgaaaggacttagaaaagtaataatattcccaaataagggaggagggtaggctgcaagctgggacatgcctgggcatgtccagcacgaatattctgactaaggtacaaggacatagaatgtactacatgcctgtgagcatgtttaacagatactgaagtcagagtatgcttattctgttacctttgctacataaggcttaacagagagttattactataaaataagaaacttaaagttagttttgagaaaagatatcaataacatttatgatttaaagggatttgaagaggaacttttgctttctacacaaagcctcctcattcattgaagaggaaaactcttggtggggacaagagtgaatttactttaaataccaatccactgactaatcccaagtctgggaatgcctccaaaatgttgagttgatgtattattatttatgtagaaacacccatttactgtaagtttccttcaaaacaaccctcgttgctgttgcagaaatcataggctgtgacgctggtagccacctacacattccttctagaacacgtatatttttccccaagatataagccctgggtctagggggttgtggtgcagagatctacctatcttgtagccgcccaagaccacgtttctgtttgtaaatttccctaataaatcacccagaaccacacattggatttctctgcctcctttggtttccaggctccttctgcatttgggggttgctgtgtaaatacagccctttcatggaacaaactcccatagaagtgcaaactgtgttgacccttgttttatccaagtgtcctgtctacatttgtagccttccagtatttgctgggtctgtctctttggcattttgggagccacataaaccaccaggcttcaagctgttaccccgggttgctgctcctctgaccatccttcctggttagtctccctcctgacccaccttctcactgctgctgttcttcccacatcttctgtctgcgtgctctgggtcactttaagttccatgttgaactcctctacattccctatattttaatggaagcagttccctccattctttttttttttttttttgagatggagtttcgctgtcgccaggctggaattcagtggtgtgatcttggctgactgcaacctccaactccctggttcaagcaattctcctgcctcagcctcccgagtagctgggattacaggctcgtgccaccacgcccagctaatttttgtatttttagtagagacgaggtttcaccacgttggccaggatgatctcagtctgaccttgtgatccgcccacctcggcctcccaaagtactggggttacaggcgtgagccaccgcgcccggccaattcatttcttttttaaactaacacttagctcttccttaaggatgtttctcctggggatctcttaaaggaaggctattcattctcccacaatccaacacctcaagttcgagaggtggagtcagtgcttcatggatccatgctgtggctggagaccattccttctctgccctcatgaatgaatgaactattgcatggtggctatttggaatgcaattttttttttttttttttagatggagtttcgctcttgttgtccaggctggagtgcaatggcgcaatctcgactcactgcaacctctgtctcccaggttcaagtgaatctcctgcctcagtctccccagtagctgggattacaggcagatgccacgatgcccagctaatttttgaattgttagtagagacggtgttccaccatgttggtcaggctggtttctaacttctgacctcaggtgattcgccctcctcagcctcccaaagtgctgggattacaggcatgagccactgtgcccagcctggaatgcaaatctttgtgtcacctgactcctatcatccattgaccttcttaccaattggcctcattcagtgaaggtgagcccacacctcagaatcagtctccttatcatcctatactctccacccctatatactaccaccaccttgaaaatatctagaaaatccctatttgatggatatttcgatggatgaccttctcaacatccagccctttattttcttgacttgctcatggccagtgaccttcacctgcattcactttaaccactgtacacaacagagtgctttgttgtaaatgatagtaattgactctagcaaacttagatcaccaatttgagctgtttcttcacctccttcttgacttttaagatggtggtaaaatgcacataaaatttaccatcttaaccatttttaaatatacagttcagtggcattaagtacattcacaaaggtgacacaaactccagagaatatgctgcttgcagctttgatgattgtatcaacggtgataagtcttcccatgtctgcaggagcagctgcagctaattatgcttactgggcctatgtgcctttcctgcccttaattcgggcagttacatgggtggataattctattgaagtatatgttaataatagtgcatgggtacctggccccacggatgatcgttgccctgcccaacccaaggaagaaggaatgatgatgattatttccactgggtattgttatcctcctatttgcctggggagggcaccaggatgcttaatgcctacaacccaaaattggttggtagaagtacctactgtcagtgccaccagtggatttacttatcacagggtaagtggaatgtcactcaggccacaggtaaattatttgcaggacccttcttatcaaagatgattaaaatctaggcctaaggggaagccttgccccaaagaaattcccaaaggatcaaaaggcccagaagttttagtttgagaagaatgtgtggctgataggacggtgatattacaaaacaatgaattcggaaccattatagattgggcacctcgaggtcaattctactgcaattgcacaggacaaactcaatcgtgtcccagtgcacatgtgagtccaactgtggacagtgacttaacagaaggtttagataaaaataagtataaaaggttagagtctctatacccttgggaatggggtgaaaagggaatctcatcacctcgaccaaagttagttagtcctgttactggtcctaagcgtccggaactttggaagcttactgtggcctcgcaccacattagaatttggtctggaaattaagctataaaaacaagagatggtaagccatcttatactatcgacctaaattccagtctgacaattcctttgcaaatttgtgtaaagcccccttatatgctagttgtaggaaaaatagttattaacccagattcccaaactataacctgtgaaaattgtagattgtttacttgcattgattcaacttttaattggcagcactgtattctaccagtgagagcaagagaggccatgtggatccctgtgtccatggaccaactgtaggaggcttcgccatccatccatattttaactgaagtattaaaaggagttctaaatagatccaaaagattcatttttactttgattgcggtgactacgggattaagtgcagtcacagttatggccgctgtggcaggagttgcattgcactcttctgttcagacggtacactttgttaacaattggcaaaaaaaattctacaagattgtggaattcacaatctggtattgatcaaaaattggcaaattagattaatgatcttagacaaaatgtcatttggatgggagataagctcgtgagcttggaacatcattttcagttacagtgtgactggaatacgtcagatttttgtattacaccccaagcctgtaatgagtctgagcctcactgggacatggttagatgccatctacaaggaagagaagataatcttacttcagacatttcaaaattaaaagaacaaatttttgaggcatcaaaagcccatttaaatttggtgccaggaactgaagcaattacggaagctactgatggcctcgcaaatcttaacccagtcacttgggttaaaaccatcagaagttccattattataaatttcatattaatccttgtgtgcctgttctgtctgttgttagtctgcaggtgtacccagcagctccgaagagacagcgaccatcaagaacgggccatgatgacgatggcagttttgtcaaaaacaaaagggagaatgtggggaaaagaaagagagatcagattgttactgtgtctatgcagaaaaggaagacataagaaattccattttgatctgtactaagaaatattgttctgctttgagatgctgttaatctgtaactttagccccaaccatgtgctcgcagaaacgtgctgtatcaaatcaaggtttaatggatttagggctgtgcaggctgtgccttgttaacaatgtgtttgcaggcagtatgcctggtaaaagtcatcgccattctccattctctattaaccagggacacaatgcactgcggaaaggcgcagggacctctgcccaagaaagcttgggtattgtccaaggtttcccccactgagacagcctgagatatggcctcatgggaaaggaaagaccttacatcccccagcccgacacccatgaagggtctgtgctgaggagtagtgaaagagggaggcctctttgcggttgagataaggggaagttttctgtctcctgcacgtccctgggaatgaaatgtctcagggtaaagctgatcatgagataggagaaaaccaccctgtggctggaggcaagatatgctggcagcaatactgctctgttactctttgctacactgagatgtttgtgtaaagggaaacatacatctagcctacatgcacatccaggcacagtacttttccttggacttattcatgatacagattcctttgctcacatgtttcccctctgaccttctccacatcaccctgttgccctgccacactcccctcaccaagatagtaaaaatagtgatcaataaatactgagggaactcagagactagcaccggtgcaggtcctcacatgttgagcaccggtctcctgggcccactgtcctttctctgtactttgtctctgtgtcttatttcttttctcagtctctcgtctccacctgacgagaaatacccacaggtgtggaggggcaggcccccttcacatgttggtcaggctggtctcgaactcccgacctcaggtgatctccccaccttggcctcccaaagtgttgggattacaggtgtaagccatcgcacccggcccactttctaattttttctcctactgtttttccctccgtagtctcttttgtggcattgtcttcctctgcttctttcttgtttgtgttttttggtgctattgtaggtcctcctgtcttctatacactctctcggtgatcttacccataaccatggttatcaaatctgtatctccatttttgaactttctcctgagctatacatccatggatccaacatcctactccacatctccactctgatatcccataggcatgccaatcttgatagggctaagcctgttgcttctctcctctggtcttcctctaggaatagcaccacctatacttcaagccagaaagtggggcttcatccttgacaacttccttccatataccctctaaatcaatcaaatcctaaaggctaccaatggttcctcttacttatctcatgaatccatccacttttcaccaatccattggtcaaggatatactcaggaacttctcgtttcttctcctgttactgaaacagtcttcggatttgtctgctgccttcactttctattgtctacgctgtcgctgctgtgatccttctacaacacacatctgagattgccactctcctaattctaaatccttcagttgttttccactgctttcaaaatgcaatgcaatgggctgggcgcagaggctcactcctgtaatcccaacactttgggaggaggccgaggagggcaaatcacctgaggtcaggaatttgagagcagcttggccaagatggcgaaaccctgtctctgccaaaaacacaaaattagccaggcatggtggttggctgtaatccctgctacttgggaggctgaggcaggagaattgcttgaacctgggagtggaggctgcagtgagacaagattgcgccactgcactccagcctgggcaataaagctagattccatctcaaaaaaaaaaaaaaaatgcaatgcaatggtttcgtgacctgccacaacgtggccctgcccagctcttcttacttgccattgctactcattttcccctgccctccccactcgactgaacagctctcagtatctcaaattcatcatgctctcttctactccagacttttgctcatgttgttccttcatttccaacattcccacttttccaacactgaccttcccttagctcatttccttcccttagctgaccttcccttagctcaactgctaaggtcttgcctccagctgccacctctttcactttcttcaggaagcctttttttttttttttttttttttttgagacagggtctcactctgttgcccaggttggagtgcagtgacacgctcacagctcattgcagcctcaatctcccagctctgccagtaaacagatgggcctctctggaccccagtttccaaaggttgaaggtcaagacaatagctctcaattccctacttttgttaggattgtatgaagggtccttccagcactgtcccagtatggtgctcggctaatggaaaaccaatctctgtaacttggactagttttattcccaccttatctgggaattataagggtataaggttgtaaaaatataaagttaacaatctgaccctcacttgggaatcataaaattacaatctgatatccactttacttggaacttatggtcagccctctgtatcctcaatcaacctgggactgaaagtatttgaaaaaattacaataacaaaaaataataaaaaatcatagaaataaaaaagtacagtgtaatatctatttacatagcatttacattgtattaggtattataagtacagcaggtcctggaataacatcatttcatcattttgctcagtggttttcttataatgatgagaaaaaaatagatttctggctgggtccactgtcacgttttatccatgtctgtgtggattttctctgtcttctggtgtcctgtcacatcccaaagccgtgcagtgcactttaggtaaattggtgcatctacacgatccgagtgtgagtgtgggtgtgtgtgagcacaccctgtgaggtgccctgagttggaataagccggtaaaaatgatctcacttttattaatctttatttttctctaagcgagagggatagggggtgtttaaaaaaaactttttctttgagacagagctgtgctctgtcgcccaggctagagtacagtgacatgatctcggctcactgcaacctctggctcctgggttcaagcgattctcctgcctcagcctcccgagtagctgagaatacaggcacgcgccaccacacccagccaattttctgtatttttagtagagatggggtttcgccatgttggccaagctggtcttgaacttctggcctcacgtgatctgcccacctcagcctcccaaagtgttgggattataggcgtgagctaaaaatcttccttaaatatatgcatggctcacacttatttcaatgtttaatattagaagtgttttggtctttatttcgaagtttaggggcgattttgtgaccacagatatgttgtaggaacttcactcatatcaattagcctgtggtcaaactgttttccttacagtcatttggcttaaagtttcagtttccaagaacccctccacgatgttaggtgaggacttagggaatgtggagatgacctaaagtttatgatgggaagatgtgtgtaggtgatatgcaaacacttttttttttttttttttttaccaaggacttgagcatttgtggacgtgggtcccctggaggggccctggaaccaatcaggactataaaatccttttaaggttttaagaagagcattgttatctctgtggtactgacgaagaccccgcaagctcaccgagattaagtgcccctgcctaaggttacaaagcctcttatcctcaggccacctccagtacagcaaatccaagccctcccgtctaaacttggcgccctgagtaccaagggtcacctcggcctttcaggctgaagggagggaggctgagtctcagggcagagtctgagtcccactccgcaccccaccctctgtctggtacagcttaccaaaccaaagtgcccaaagccgtgacatcccggccggcggctcgcaggcccccgccctccgcacgtcacggccgccgggtgcagtgccccctaggggcccctgggacgaggaggaagcgccaggtccttcccgccgccgccgccgccgccgccgcctgctcccctggcacgcgccccgccgccctcggcagccgcagctccgtgtcccctgagaaccagccgtcccgcgccatgggcacgcgtctgccgctcgtcctgcgccagctccgccgcccgccccagcccccgggccctccgcgccgcctccgtgtgccctgtcgcgctagcagcggcggcggcggaggcggcggcggtggccgggagggcctgcttggacagcggcggccgcaggatggccaggcccggagcagctgcagccccggcggccgaacgcccgcggcgcgggactccatcgtcaggtgagtgtcgggtctggccctggcccaggtctccagcggctgtggccccgacccaggggcggagcgcccgggaccgccgtggggagcggggcgcggggctgcgagtgtttggtgccaactcattaggggggccgggcggtgtgtcgggaaacgcgggcttgggcactgcggccgggagcgctggcggagaacgggggatccagtacccgaccgggcccgcagcgcaggtgggcgtgggcatctccaatgggcgcctagcggcatggaccgcacgcccggctccacgtgcgcagccggccgccggctctgatgcaatcgcgccgggcgcgacccagacggtaaaggggcggtgcggctggggcggaaaccaggggagggggcgaggagcaggaggagggcggggctgcggctcggcgcgccggctggcccggggttcgggaagggcaagcggagctcgggagaggcgggctcgggcccagcgccgcccgcgcgaagctccctggtgttgtgcgcccttccccgcgcgcggcccctcctgctgggctggggtctgtggctgacgtccgcttttcccggaacggcaaaggtggagccgggcccccgggacagccgccggggggaatccgagaggtctcagcgctggtttccagcttcgccgcgcagcgcccacggagtccccgcgcagctgggtttgcagggttttctgcgggcccagagcgaactgggagccccgggcccggcctttcccgtcccggtccccgcccctgggctccagccttccccgccctcgcccagaggggcgcacgggtctcgggccttgcagggcgagcccttcgggacaacttgggggtggcaagaaagccccttccgcctccctcggaactgggattaggaacgagttccaggatgcggtttccccggccagcggaccacctcctccattcacatcctcttccctttccttctagccttctttcttagtcattgcctgcttgcctttctctctgcctttccttcctccctctgctctcccattttcctccccactccccttctcccgtctcagtaaaatacgtttcctaggctctttattatgtggcggatgattttaaggggccatttatttagtttttcttgttctctgtcttctttttcttttagaaatggagtctcgctttgttgctcaggctggagttcagtggtgccatctcggctcaatgcagcctccgcctcctgggctcaagcgattctcccgccttagcctccagtgtaactgggaccacaggtgtgcgctaccatgcccggattattttattttattttcatagagacagagcaccactctgttaccaggctggtctggaactcctgggcgcaagccatcatccctgcccccaaaagcgctgggattaattacacgtcaggtcattaggttttaacctgcacgttgctgagactcatcttaccggttagagtctgaagccaggataggcggcaaaaaaacttctcccgtcatgctgttttattttctaggtaaactgattattacctgaaacttccttctttgctcatttcttgtctgtctcacccacctggaatatgagcttcatgagacagccgtctcttcggtgctatatcctaggtcctggagagagtgcccagcatgtaataagcacttgtgaaatggttacagaaggaatgcttcaagatttggggtcatctgtgggttttattcatacatattctttttttttttttttttttttgagacggagtcttgctctgtcactcaggctggagtgcaatggcacgatcttggctccctgcaacctctgcctcccaggttcaggcgattcccctgcctcagcctcccgagtagctgggattacaggagcacgccaccacgcccggctaatttttgtattttgagtaaagacaggatgtctcaccatgttggccaggctggtcttgaactcctgacctcaggtgatccgactgccttggcctcccaaagtgttgggattacaggcgtgacccaccgcgcctgggctattcatgcatacttttaggtttaaagccatgactgccttagagatgagtaaagaggttagtagggggctttagggcctgcactgggttctccaaactcaattccttcaggaaaatgggaggagtaacagtacttacctcaaggggttatggaaacaattatgtgagaggacacatgcaaaatacatagcccaggactgtcacatacaagacaagtccctcaacaaatggtggctattaattttttttttttttttttgagacggaatctcactctgtcgcacaggttggagtgcagtggcgggatctcggctcactgcaacctccgcctcccgggttcaagcgattcccctgcctcagcctcctgagtagctgggattacaggctcgcactaccacgcctggcttattttgtgtttttagtagagacggggtttcaccatgttggccaggctggtctcaaactcctgacctcgtgatctgcctgcctcagcctcccaaagtgctgggattacaggtgtgagctaccatgcccagcaatatttttacaattcactaagccaggggtccacagacgttttatatataatgggccagatagtaaatattttaggtttagtgatcctagaggcaaatcaaaattattagtaggtacatttataacaagagaaaagacaaatttaggccaggcaccatggttcatgcctgtaatcccagcactttgagaggccaaagtgggatgatcacattcccaggagttcaagaccagcctgggcaacatagtgagacacccatctctgtaaaaaattttaaaaaattaactgggcgtggcgcgtgcctgtagttccagctactcagaaggctgaggcaggaggatcacttgagcccaggaggtcaaggctacagtgagcggagattgcgctactgcactgcagcctgggcaatggagtgagaccttattttttatttttgcaattaagtatttttaattaaggtatgtacattttttagacaatgcttttgcacacttaatagatggcagtatagggtaaccataacttttatttttattttctattttactttaagttctgggaaacgtgccgaacgtgcaggtttgttacataggtatacatgcgccatggtggtttgctgcacccatcaacccgtcatctaggttttaagccccacatgcattaggtatttgtcctaatgctctccctcctcttgccctcccaccccctgacagaccctggtgtgtgatgttcccctccctgggtccacgtgttcttattgttcaactcccacttatgagtgagaacatggggtgtttggtttctgttcctgtgttggtttgctgaggatgatggtttccagcttcttccatgtccctgcagaggacatgaactcatgctttcttatggctgcaattttatttttgtagagatgaagtctcactatgttggccaggctggtctcaaactcctgggttcaagtgatcctgctgcctcagcctcccaaagtgctgagattgcaggcatgagccaccacgcctggctatattgtacctttcaattgagttatgtgcatggtttactgaaactctagccctgaattgattctccgaggattggagcaaagtgggtgggggtgtgtgtcagctagaagtcacctggaatagacatccaggagcggaagtgtattagtcagaaaaattaaagaatgagctccctcaaaagcatagtgacctgttgttcctggtgatgggactagatgaccataatccctcagcctcccaagtagctgggattacaggcaggcaccaccacacccagctaatttttgtatttttagtagagacggggtttcaccatgttggccaggctagtcttgaactcctgacctcaaatgatccacccgccttggcctcccaaagtgttgggattacaggcatgagccactgcccctggccagtaataatacattctgtataatagtcacagtaatggtgaaaataacaaagctgctgctgatggcttagttctgagttttagctacacatggcaacctagctagagagctcacattccttcccactgtcctcaaccaaagtggaagctcacaaggccatttttctgccccaaggacatgaaaatctctgattagaaacatttatgctactttttggatttattgagcctaatgactcctttttctttcttgctttgtcactgtaggaatgagtaaccccaaaaaatgaaacattacacatataacaagttgtagggagcatgaacctattttgttttattagcttgggtggtagtagcgttgaactcctttacatacctgtacaggcacccctaagatattgtgggttcagttgcagaccactgcaataaggggaatatcgcagtaaaacgagtcacacaaattttgtagtttcccagtgcatataaaagttatgtttagacaatactgtagcctattaagtatgcactagcgttttgtctaaaaaaaaacccatatataaggccgggcgtggtagctcatgactgtaatcccagcactttgggaggctgaagtgggtggatcacgaggtcaggagttcgagaccagcctggccaacatagtaaaaccctgtctctactaaaaatacaaaaattagccaggcatggtggtgtgcgcctgtagtcctggccacttgggaggctgaggcaggagaatcgctttaacccgggaggtggaggttgtggggaggcggaggttgtggtaagccactacactccagcctgggaaacagagcgagactccgtctcaaaacaaaacaaaacaaaaaaacccaaaaaacatatatatatatattatatatataaaatatatataatataatataccttaattataatataatataattatatataccttaatttatatatataccttataatatatataccttaatatatataccttaattatatatatacacaccttaatatatatataatatatattaatatatatcttaatatatatatataaggtaatatatatatacaccttaataataatatatataccttaattttaaaatactttattaccaagaaatgccagtgatctggtggaggatttgcctagatgttgatggttattgactgatcagggtgattgctaaagattagggtggctgtggcagttttttaaagtaagacaatgaggtttgctgtattgatggaactcttcctttcctggaagatttctctgtagcagtgctacagagaaaatggtaacattttacccacagtagtaggacttctttcaaaatgggcgtcaatcctctcaaaccctgcaactgctttaccaagtacttgatatcaactactgtaatcttttttttttttttttttttttttgagatggaatcttgctctgtcgcccaggctggactgcagtgctgcgatctcggctcgctggaacctccgcctctcaggttcaagtgattctcctgcctcagcctcctgagtagctgagactacaggcgcctgccaccacgcctggctaatttttttgtatttttagtagaaacggggtttcaccatattggccaggctggtctcgaactcctgaccttgtgatccgcccacttcggcctcccaaactgctgggattacaggtgtgagccactgtgcctgcctaactactgtaatcttataaatcctttgttgtcattttattttattttaattttattttattttattttaatttaattttattttattttattttttgagacagtctcactctttcacccaggctggagtgcagtggcgcgatctctgctcactgcaacctctgcctcccgggttcaataaattctcctgcttcagcctcccgagtagctgggattataggcgtgcaccaccatgccctgctaatttttttatttttagtagagacggggtttcactatgttggccaggctggtctccaactcctgacctcgtgatccgcccgcctcggcctcccaaagtgctgggattacaggtgtgagccactgcgcccggcctaataaggctgttttcttatcatttgtgtatccacgggagtagcacttttaaatttcttcaatagcttttcctttgcattcacagcttggctaactgtttggctcaagaggcctagcttttgacctatcttggctttcaatacaccctcctcactaagtttaattatttctcggtttttatttaaagtgagagacctgcaactcttcacttgaacacttagaggccactgtagttactaattgtcctaatttcaatattgttgtttctcagggaatagggaagccagaggagagggagagagaagggggaacagccagtccagtgaagcagtgagaacacacaccatcatgaaccatcatggccacggtttggccaacacaattacaacagtaacatcaaagatcgtcaatcacacatcaccagaacaaacatactaaaaatgaaaaagtttgaaatattgtaagaattatcaaaatgtgacacaaattgagcagatgccattggaaaaatgactcccatagacttaaaacacaggttgccacaaactttcaatttgtagaaaaacacagtatctgtaaattgcagtaaagcaaagcacaaaaaatgatgtatgcctgtatttttttttctatccacatccaccccccaactttttttttttttttggtagagaccaggtcttgctatcttgcccaggctggccttgaactcctgagctcaagtgatcctctcacctcagcctcccaaagtgctgggattacaggcatgagccactgcgcccagcccccatccccaactattttaaaagtctaattactttttgacgattgccgacttacctatagaagtgttcctttcagcccggcgaggtggctcacccctgtaattccagcactttgggaggcctaggtgggcggatcacgaggtcaagagatcgagaccaccctggccaacttggtgaaatcctgtctctactaaaaatacaaaaattagtgggacgtggtggcatgcaccagtagtcccagctactcaggagactgaggcaggagaatcgcttgaacctgggagatggaggttgcagtgagccgagatcgtgccactgccctccagcctggaaacaaagtgagactccgtctcaaaaaaataaaaagaagtgttcctttcatcaactatgaatggatcaagactatgaatgtttctgagaaaattattgctgttagtaagaatgtttttagtgtttaagggtagctttggggcacagaaaaaaacaaacgtacatttataagaaaaaggggaaagagccactgtagtatacctgttttacagatgaggaatctgagactcttagagacttgtccacgctagtaaatgaaatgcccagtaccaatcctgggccgtatttccacttagtgtctcagaattacctggactctgttaaaaatgcacatttctgggctccactgagacacgttgaatcagactttctagggctggaactgttattttttttgagacagagtctcgctctgtcacccagctggagtgcagtggcatgattttggctcactgcagcctctgcctcctgggttcaagtgattctcctgcctcagcctcctgagtagctctgggattacaggtgtgcaccaccatgcctggctaatttttgtatttttactagagatggggtttcaccatgttggccaggatggtctcaaactcctgacctcaagtgatccatttcaccttggcctcccgaagtactgggattataggtgtgagccactgcacctggcctggaacctttacttttaccaaactctccagtgatccttataccatgaaccgcttgggtcccacactccggtgctttcctggacccagacaaaaataagaacccagcatagccaaattaacagtcacgacaggctggaaagagtgcggtatatgggcctcagtcacccattattggatggatggattttagtgcttatttataaggtgatttgtaaactttcccatatggtcacatttattcagcacaataatacaattaattccctgggaatgaagtagctttatcccaagtgtttccaaacaaaactaactgaaatgttcccaggttatagacagttgcctgcacccagtccatctgttccggcccagctggcagtagaaagactggtcctggttgtgaatctgagcagctctctcccctaaagccccgcctgggaactgcagtgcctctggttccatttgtcagctgtgtctctctgaaaactggggaaagcttcccgatgcctttctgctcttggcagtgtaccgttgatggcattggctggaacttcttcaccccgcatttttgttaggtgcagtgcaagaccctgtcggagactgaaaacaaaatgtaaaggtggtcttagcactgaagcctgggggctcctgtggctgcgcctttggtctattgtgagagggggaaaagccagctcccagtgctcatgtgctgctgagaacatatcatagggtggtggcgaaggtagcctctgcagtcactcatcccagaaggttccataaagagctgagctcctaacacttttttttttttttgagacggagtcttgctgtgttgcccaggctggagtgcggtggcacaatctcggctcactgcaacctctgcctcccaggttcaagagattctcccgagtagctcagattataggcgcctgccaccacacccagctaatttttgtatttctggtagagacggggtttcaccatattggccacggtggtcttgaactcctgaccttgtgatccacccgcctcggcttcccaaagtgctgggattacaggcgtgagccaccgctcctggactttttttttttttctttttttaaaaagaaattgagtcttgctctgccacccaggctggagtgcagtggtgcagtcatagcttactacagcctcaaactcatgggctcaagcggtcctccagcttcagcctcccaagtatctgggactacagtcacgtgccatcacgcccagctaaattgtttatagagatgggatctcgttatgttacccaggctggtctcaaactcctggtctcaagcagtcctaccgccttggcctctcaaagtgctgggactacaggtgcatgccaccatgccaggccttctaccacttttacctaggcctgctcaccccaggctggcacctccctcagaggtgggaggtgaaggtggctgctgctgggcatttaggaggtacaggtgcagactatgttgtggattctcagaggactgagaagctctctgtctctctctctaggaggctttgatagtgttatcaaagtgggtctccagtgtttctggaactttcctccccttccttccttacctaattccttctttaaattccaggacctggaatttatcctgtctcgacacttcttgtccaacagtgagccccctgtcttcacccccctaatcccctgtcttcacatccctcttcccactttatttgctttccccatggacccatactcagggttttgggaggatggcagcggagtatggtggaggagagcgattatttaaagtagaaacccaaagcttttattatagtaaacttggaaaatacaagagaaaaattcacccctagaaaattattgtaaacatctagtttgtttccctctgcatattttaaaaactggattgccgcattttaccttgtgttagtgtcttgatttcattgttacgccgcctaccccctccacagtgtacacttggagtgcgtccttctgtggtctagttattttcacttggaggaaggaactttcacagaaaatgtgttgtgtcagtcctttctactcattaaccaagaaatcacaatgttgttttctttctcaatgtagagaagtcattcagaattcaaaagaagttctaagtttattgcaagaaaaaaaccctgccttcaagccggttcttgcaattatccaggtaagccgagaacaaggttcagtcctactattttaggatgcctttcaatttagaaaatgattgtatacaaaagagcagctgcatttcttgccaaagaggagagggctcagttggcaatgctgttttctttggtcttttgcttctttggggtcacgggtgaagtactgccctgcttgagtgtgtcttcttttgtgaattttcctctctgaggtatgggtagctttcagaggtctaggaggtaagcacttacatgcattgcattacacaggatatatcgtggtccatgtgtcctcacaaatgcttaccaaatgtgatttgaaggtgctgggggaaaaagtggcactttgtttcaatggacacagatgctagatgaaacatggatatttggtaatctttttactctatcttttaaaacctgccataaacttaatgggacaaaagtcattaccctgtcaaaagggctttgcattccacatacttcttttggctgcaggctctggttctgagccacagttggccccagttgccatcctgcttggcacacttgtgtgatggcaggtgctgagaaataaggaggtgagccaagcctggaagcaaacacagcctgacagttgggctgctaccgcagggcttggcatgcccttagcgtatcaaaatagcagcctctggttccaccgtgctgcgtatttcaggattacagagctgtgctcgagttacttacattctctgggatctgtagccacatcttgttacaaagaaagacaagttagaacaatagaaagaaaattagattagggctcgggcctcctgggaatctgcttactccctggctttccatctaaaggcaaaccatttcaactcctacctttggtatccccattttttggcttctttttgtgatggggtcttgctctgttgcctgagctggagtgcagtggcatgatcttggctcaccgtagctttgaccttctgggctcaagtgatcctcccacctcagcctcctgagtagctaggactgcaggcatgcaccatcacgccgggctaatgtttgtattttttgtagagatggggtttcaccatgttgcccaggctggtctcgaactcctgggctcaagcaatccaccgcctcagccttctgcagtgctgggattacaggcatgagccactgtgcccagtcggtgtcctcatttttagagaggaaagctggctaggttactatgtcttctaataggagggatattattttccttaaaaaagtgacataatttgaaggcctgaggaattactctgttaaatactggccccaagtccctttttataagcagcaagattgtttttctgcaccttccatattatctttgtaattagatcatctgtaatcacaaaattcatctctggattatcttttgtgccttttcaagctatttttatgttgttatgttgtttttaccttcctaaggcaggtgacgacaacttgatgcaggaaatcaaccagaatttggctgaggaggtgaggactgctgcttttaaaaaattcactataacttttaacaatacattctcttatagtgacgaataaccttgtgttcctttttcaggctggtctgaacatcactcacatttgcctccctccagatagcagtgaagccgaggtaataatggcagagctctaaactcttgcttcttctttcctcttgagacttaataggcccattggcgtctcttagtggtggctgggacagatctaagatttgcttgtgactgaatgttagagggaagacttcacttcttttctctagggtaaatgcttcatgatatccttgtttcttgtcatttgtatgtttctaccgaagacttgagttgcgacttgttgagttcggttgtgtttcttcagctgcggtggcagcgtcatctagtggaaattgtcaggccgaggcgaggaaactggaccttggaccacagatccctgtgccagggcccggcccttctgtggttagcttttcttcctactggcttcatgtgacagaaaacctcaaataatggaatcttaaataatgtacaagtttatttctctctctctctctttttttttttgagatggaattttacttttgttgcccaggctggagtgcaatggtgccatctcggctcactgcaacctccgcctcccaggttcaagcaattctcctgcctcagcctcctgagtagctgagattacaggtgcgtgccaccacgcctggctaatttttgtatctttagtagagatggggtttcaccattttggccaggctggtcttgaactcctgacctcaagtgatccaccctccttggcctcccaaagtgctgggattacaagtgtgagctactgtgcccggcctagaagtgtatttttctgggacatgaataaagtttggaagtaggcagtccctggttggtgatatcaccaagtcgcaggagctcaggctcctgtccctctgctctgccgcctttgtggtttggttaacaagcactttgttctgattgatcagtgaggcccagcaggtctgctagtcatttgtgagacaaagaatgggaatttgtagagtttgtatctggccttgtgctatgtaaacaagggggcattggtgagtcttatttgagtcctatggagaagagcagttctttgcagtacacagaggctgcagggatttgttaaccttccctcttttccaggatcacagggctcaggtaaagttcgttgtcaccaagaagaaaaaggaaggacaaagacaggcccctgctgtctttaaagacatttcctgaaagtcacagttctacatccatcccgttgtcccctacttagttgcctggccaactgcaaaggaggctgggaagtgtagtttttataccaggaagccttagatcatttattagcaagctaaaaaccaagagtttattactaagaagagaaaggaaactatatactgggcgataagtgtttgccacacttgccattgtagcgtggtacaaatatgaagtgttaaatatgtaacaaatacctatgataccagcagtgacagcatgcaaaggaagttgttgttcatttgcacgatacccactgtctgcagcagaatttgcttttctttctttttttttgagatggagtctcgctctgtcaggctggagtgcggtggtgcaatcttggctcactgcaacctctacctcccgggttcaagtcattctcctgcctcagcctcccaagtagctgggattacaggcgcccgccaccatgcctggctaattttttgtgtttttagtagagacagggtttcatcatgttgaccaggctggtcttgaactcctgacctcaggtgatggcctgcctctgcctcccaaagtgctaggattacaggtgtgagccactgcgcccagctggaatttgcttttctttaggttgttttgccactggtgtttttttttttttttttttttctgagacggagtctcactctgtcacccaggctagagtccaatggcgcaatctcctctcactgcaacttccacctcccatgttcaagtgattctccctgctcagcctcccaagtaactgggtttacaggcacccgccattatgcccagctaatttttgcatttttgtagagacggggtttcaccatgttagccaggccgttctcgaactcctgacctcaggtgatctgccctccctggcctcccaaagcgctgggattacaggtatgagccacctcacctggccttgacactggtattaatagcccttgattttcgtcgttgttgtttataattgacacataataattgtgcatgtgtgtggggtacagtgtggtgtttcggtacttgcatatgttgtgtaatgatcaaatcaggttagttacattcatcacctagaacgtttatcatttctttgtggtgatagctttcaagatcttttctagctgtctggaaatatacaatacattgtcattagctttagtcactctactatgtaagagaacactggaatttattcctcctatctaagtgtaactttatacctactgatggaccaacctctccccatttcccctcccccatccctctccagcctctggtaaccaccattctattctctatttctatgagatcagctttcctagattgcacatgtaagtgacatcctatgatatttgcctttctgcacctggcttatttcacttcatgttatgtcctccaggttcatccatgttgccacaaatgacaggatttcgttcctttttatggttgaatgatactccattgtgtatacacaccacactttctttatcctccattaatgggcatttggattggttccatctcttggctactgtgaatagtgctgtaacaaacatgggaatgcagacggcttctcagcatagcggtttcagttcccatgcgtatatacctagtggtgggaatggctgggtcatatggtagttgtttttttaattttgtgagaaatcttcatactgttttctctaatggctatattaatctgcattcccaccaacagtgtacaagagctcccctttccacatatcctcgccagcatttgttattgtcatttttgataatagccattctagcttgatatctcattgtggttttgatttgcatttccctgataattaatgatgttgagtgttttgtcatatacctgcaggccatttgtatgtcctttgggagatgtctgttcacgtcttttgcacattttttatttgaattatttgtttttttgttattaagttatttgagttccttatatattctggatgttaaccccttgtcggacgcatactttgcaaatattttctcccattctgtaggttgtctctgctttgttgattgtttgctttgctatgaagaatgtttttagtttgatataatcccactgatgtatttttgctttcgttgcctattttgttgaggtcctatccaaaaaaaccttgtccagaccaatgtcatgaagcatttcccctgtgttttcttctagtagttttatggtttgagaccttatatttaagtctttaattccttttgagttgatttttatagaagtgagcgatgagggcctactttcattcttctgcatgtggatatccagttttcccagtgctatttattgaagaggctctctttccacaatgtgtgttcttagtacctttgccttgacttattttttgacaaggaatcatttattccgtatttttctttgggaaaattctcatagagtgaatttgtatggtgttatattgaaaaagagtaggtaccttaatttattagttaagatttgtgttggcatttgttgcttctaccaaatgcttggtacaggtggcaatagtttcctcgcttcattctggtctctgcttggacatcgtggcctctgaccaccctccacccatcatcactctgttagccttttaccccactgaacctttatttttctgcatgtcatttattctttccagtgattttattattattattatttggaagggaggaacttccctcctccactagagtataagatccacgaggacagttttgtttatagctgtatttcctttacttagaactgatacagagtaagtgctcaaaccatttgttgaatgaatgaaagaatgccaaatgaatgaaacaaagctttctttctgattttgtacctcaaatggtttcccctgccactgcacaggtagtgatttttgctaggcaatgaaacaaaaatggtaaaccaacccttccccagagcctctgagtgagatctatatgcaaagataagtatcttctcacttgtgagcaaatatttttgttaagtgagatgaatcaggatcttatctcctggcataaaatagacagagaggacaaagcattgcttatttagagacacacccagacatttattagcttcccaaaatgtagcttggtctttttcctaaatagtgaattattttagtgtttcccataaaaggagctgtgcatgctaagaatttttctagcataagcctttggaaaggcttcttgtgtgtcattgaggtccagataacccgagggcctctgtgactgcttggacgtcatgattagtgagctgtgttgaacacattgtgtttgaaacgcacaggcttagctgggccagattggaatgcttcagattcatgcttcctgtccttcctgaaaactggcagtgtgtttggcttaaagtatgcttgttgacagagaagtgtcctttgtctatctaaaccttaatagctgttgagctttggttttgttctgttttgtctttttctggcacagagtagagccatagaaaggcagagaagtcactaaaaaattcagccaagccttttaattttttttttgagccttgtacacatgatgaaaagaaaaaaataggctttttattatgctttacaccaagtttccaacaaggagcaaaacaacaacaaactataacagatgcattttcatgaatccactttttatataaagcttcctttgttgggtctcattttcacaaaactaatttttattttgtttttttgttttctctttagattatagatgaaatcttaaagatcaatgaagataccagagtacatggccttgcccttcagatctctgagaacttgtttagcaacaaagtcctcaatgccttgaaaccagaaaaagatgtggatgggtaagaaaataaaatcaaataatcaacctttatggctaaatcactttttctattgtgcctgcttttatttttctaaatttcttctatttatttcaactgtgtcagtaattggataaaaaaatcattttaaatatttcaggagtctataggatttttttttttttgagatggagtctcgctctgttgcccaggctagagtgcagtggcgtgatcttggctcaccacaacctccatctcctgggttcaagcgattttcctgcctcagcctcctgagtagctgggattacaggcatgcgctaccatgcctggctaatttttgtatttttagtagagacggggttttaccatgttggccaggatggtgtctatctcctgaccttgtgatccactcacctcagcctcccaaaatgttgggattacaggcgtgagccaccgtgtctggccatctgtagccttttaaaattctgcatgcaaaagttacatattttggaaaatacattagcccttttatagtgcttcagtgccatatgatcttacaccatcagattcatttaataaattccggtctgacttatacaatctttagccagctctattcttctaatagttttttccttggtaattctaccagaccagagaagaaaacttagaaacctgattccccagcagtaccatattctgtcttagtcccaggccagttgagaaaagcaaaataaatacttttcttaatgacacaaggttttatttgaaatttggaggggaacatcataactattgggtgctgtaatgttggcctgtgattcatgtcatggagtgacataagcttcatagaacaaaggataccggccgtctccagtgggggataagcatgcttcctggggattaaaaccccattttcctccatggaaatataggaagtgttttgtactgtggccaaaaagaacacaatgtgttaatggttataggttgtaagcagatttataaagttagattccagatccggtagaccctgcaggggctggatggggaggctaccaccttcctgagacacccagcaatcttccattctagccttttattgtgacttgagtagacccaaacacaggctgaaaaggtgtcatgaacacctccagtcctggctgggcacagtggctcacacctgtaatcctagcactttgggaggccaaggcaggaggatctcttgatctcaggaggtcaagaccagcctggacaacatagtgagacctcatctctattttttttttttttttttgagacagagtctcactctgttgcccaggctggagtgcagtgacacgatctcggctcactgcaagctctgcctcctgggttcacaccattctcctgcctcagcctcccgagtagctgggactacaggtgcccaccaccacacctggctaatttttgtacttttagtagagacgaggtttcaccgtgttagccaggatggtctcgatctcctgacctcgtgacccgcctgcctcggcctcccaaagtgctgggattacaggagtgagccaccgcgcctggccccttgtctctatttttaagtaaataattaaacatttttttaaaaaacgacaatctccagtcctgtcgtagactaactgtaaaaggagaagaagcactaatccatgagaaaactttcagaacttgaaggtcctagggcatagtttcaagtctttcataaaaggaggggaattcatgctgaggcccagccaggaaaaaccaaccaaacaaaaacaacagagagtaaaaggagaaattacgaaaatggttctaaatgtctccattctgttactgagattgacgtgctcagtttaggctagatagctgtggaatgttttgtcctagatttgaacagggaaaggcacagaacccttcagaagtgtgtggtcactcattttttccactgccccccaccccgacttctcaaggagataaatatcgaggtcaagttgaaatcagacctgtgacctgtgcctcaatcccaggtcttactgggtcactccagatttataggattggttctgggttttgagtggactgcaggaccatgcttctgtgtaactctagggatgctagtccattggggtccattgaaaggagctccctggagttgcgaagtgaagccctgtatggctttaggctgtgtcctggtatattggcagaaccggaacacccaatgtcagggccagggtgaagtttcctaaggtactgccttagaattttctaagacctttattgaatggcctttattgcctgctttctctttaattcattttttatgggtttttttttttttttgagatggagtctcgctctgttgcccaggctggagtgcagtggcatgatctcaactcactgcaacctctgcctcccaggttcaagcgatcctcctgcctcagccccctagtagctgggattacaggcacgtgccatcacgcccagctaccttttgtatttttagtggagttgaggtttcgccatgttggccaggctagtctcgagctcctgacctcatgtgatccacccgcctcagcctcccaaaatgctgggattacaggcgtgagccaccatgcctggtcctctttaattcatttttatgtattctgtctatcaaacattgacttggatgttatttggggttaatatatgtacattacacgtgagtgatttttttggctgggctttgacttaacctacttctttattttctgattcagagtaacagacataaacctggggaagctggtgcgaggggatgcccatgaatgttttgtttcacctgttgccaaagctgtaattgaacttcttgaaaaatcaggtaggatgctccttgagaaatgccgctgatttctatttattggtatttacattatttttaataaggatttgtttggggaagaattaaaaatttttttaaattattattctgatatccttttaggatgtttctagaagattctaattgaacatagaagtgatatttcacgttgactttttttatttttctcatcttttgggagatacagatgaatacctagaaactttttctagtaagaccatcttataaattaaaagagaaattagtagagataaacgattagccctgttttaaacatgctcaatttctctcatgaaacagtcaaaataaccacagtaaaatatgcttccagtttcagcttactaaatctatcaatatgtagccttagataagacttacgttgaagacttaaatgaggccaggcacagcggctcatgcctataatctcagtgctaggcgaggccaaggccagaggatcacttcaggccaggagttcgagaccagcctgggcaaacatactgagaccttgtctctacaaaaaaaatttaaaaattagctgggtatggtggtgtgcacgtgtagtcccagctatgctggaggctcaggcgggaagatcgcttgagcccaggagtttgaggttacagtgagctgtgattgcaccactgcactctagcctgggcaatatagcaagaccctgcctcaaaaaaaaaaaaaaaaaaaaaaagagaagaagaagaagccggtagatgtagtttagggcacaggagcctaggttgggatttattggtgagcagcttgcttttcagtagtcaggacttaatttccattgttgtccccttgacttggcgtttttatgtcagtgaaatagaaatgaatattttctctttcttcattattaagtttaatgagtaaattactaccaagtatttatatatttaagggctttctgagaacataaagattcaactaattgggccggcacagtagctcacacctgtaatcccagcactttgtggagccaagatgggaggattgcttgagcccaggagtttgagaccagcttggggaacatagggagactccatctctaccaaaaaaaattttttttttaattagccaggtgtggtgacttgtgcctgtagtcccggctacttgggaggctgaggtaggagaatggctggagcctgggaggtcaaggcttcagtgagctgtgatcacaccgcagcattccatcctgggcaacaagcaagatcctatctgaaaaaaaaaaaaaaagaaaagaaaaaattcaacgaactaaatctttttctctactccagtttgaatagaaatgaagcaaatgcccctccctacccctgaacatccaacaatcaaagaaaaatttcaaaaatatatggcaaagttttattaaaaggttaacattcaggatatatatgctttttggacagtaatattaagctcaaatctatgaaataatccatatatacagtgctttttcattacgtggattatcaagatgaagattctgagccacttcattagaaagtactcaaagaaaagagtaaattaggctggtgagttatagttacatattgtggaaagaaattcagcaacaggaattggaaccaaaagggtttgaatagagaatttttgttgattacaacaccccactcctagttcctagtcattgtaggttggtgctgagaaagttcaagttttaaaagggttttttgttgttgttgagacattcttgctctgttgcccaggctggagtgcagtggcgtgatcttggctcactgcaacctctgcctcccaggttcaagtgattttcctgcctcagccttctaagtagctgggattataggcatgtgccatgacgcctggctaattttctatatttttagtggaggcggggttttaccatgttggccaggctgatcttgaactcgtgacctgaagtgatccgcctgcctcagcctcccaaagtgctggaattataggcatgagccaccacacccagcctaaaagggtctttttttcttaagataaagttcttaaaggaaggatctgaagttttgagtataatattgaattttcatttggttagtaggtgtcaacctagatggaaagaagattttggtagtgggggcccatgggtctttggaagctgctctacaatgcctgttccagagaaaagggtccatgacaatgagcatccagtggaaaacacgccagcttcaaagcaaggtaaatttcatgttagaaacatacatcttgaaggcttctgttagaacagaagaaagtctagaaatgtataagctaagtgcttaattcaagaaattagaggaagaaaattgaatagacccatatccattaaagacattgaatgagtctactcaccagacaaacaaacaagaaaaggcaacaggtggttttacaaatgagctctatcaaacaaagaacagatcattctaatacaatccttttctccagcaaatggaaaaagaaggaacgtggcctaacagactttatgagtgccaaaaccaaagaagggtaacatgctaaaggaaaattaacaggccagtttcagctatgaatataaatgaaataatcgtgagcgaaatctgagaacaccaaatacagcaggaagtagggtttattttaggatttccaggtgattgaacatgagaaagtctgtcactgtaattcaccacattgtgattaaaaactaaattctcaccatagtaagtacagaacagtcatttggtaaatctaatatgcattatgaccttttgaaagtaattataattttgatgaaaattattaagaagacccatataaaagcagaggtatcatcttcatggagaagatgcaatatcttaaagatactaattgtctgcaaattttgtagaatttgacagtctgattctgaaatccaaatggaagcataaaggacaaagagagtcaagacaattttgtggaaaaactaggtgggagacattcccagccacacagtgtgaattattatgcacttacagtaattaggataatatggtagacaaacagacgatcggaacagaagaaagtggaaatttatgcatatatggaagcttgagagcaggtaccgcagatcagtggggaaaagattaactattaaaggccgggcgtggtggctcatgcctgtaatcccagcactctgggaggctgaggcgggcaaatcacttgagctcaggagtttcagaccagcctggccaatatggtgaaacaccgtctctactaaaaatacaaaaaaattagccgggcgtgtcggcgcaagcctgtaatcccagctactcgggaagctgaggcaggagaatcgcttgaacccgggaggcaggggttgcagtgagccgcgatcgtgccactgcactccagcctgcgcgacagagtgagactccgtctcaaaaaaaaaaaaagctaaaacattaactattaaaaatggtgctgacttaactagttatgtatatgagtctagcataggattactaacctgccactacatataaaaatcacttctatattaaaatacctaaatgtggaaagcaaaactgtaaaacttatagaaaaaaatataggcgtatgcatttaagaggttggcgttggaaggatagcttaagagaccccaaaagcacagattgctaaagaaaaggtatataaatctgactgcatccaaatttttaaaaaccccaaagtttttctttctgaaaagaagttcttaaaaaagtgaaaagacagctatagtgtagaagatatttacaacaaacatttagccaataattagtgtcttataaaagattcctacaaatcagtgagacaaagacaatctgttagaaaaatggacacatgacagaccactaacaggtgaggaacccgaggtttaaaagacacgtgaaaagctgtctggtttcctgctgtttttgctcaccagtcatattggcagtaggtaaaaagtgccagttagccatattgacaaatgtctggagctatgggaattcatatattgctggcgggagtttaaatttgaaataggcatttcggaaagcagtttaatggagtttgagctactctttgacccaggaatttcactctaaatatatatgatatggccaggcatgatagctcacccctgtaattccagcactttgggaggctgaggcaggcagaccacctgaggttggggtttcaagaccagcccgaccaacatggagaaaccccatctctactaaaaatataaaattagctggatgtggtggcacatgcctgtaatcccagctattcaggaggctgaggcaggagaattgcttgaacccgggaggcagaggttgcggtgagccgagatcacaccattgtactccagcctgggcaacaagaacgaaactccgtctcaaaaaaataataataaaaagtgtatatatatgtgtgtgtgtatatatatatataatagacaaaacttgcccatatatatacaaaggtgtgtttacaaatggtcagagcagcatgtttatagtgcaaaaagttttgtttgtttgtttaagacagaggggcagtggtggttctgtgggtcttggcccctttctgctgtcagggctgagttggctccatgagttggtgaaagcggtatctagccaggttcaagggagacaggggcaggatttcgccttcactgatgggcaggccagcggtcccctgtggaacggtgactattgaatattgagaggacagtatccctccctgagcatcttctggagcttgatgaccactagggaatgtatctgagtcacgcgcaccaaatatgttaccggtggcagctattcgagttatcccgagttcgtgctggtgtatccgtacagttctgcagcaacttcagctcttgcctcctcggaagaaagaattggactgagggccataaggcagaaggagagactgaggcaagtttcagagcaggacggaaagtctagcaaaaagctctagaacagtaaggaaaggaaagaaggaaagtataacttggaagagagccaagcaggcgacttgaaaaaccaagtgcactgcaacaagtatttaaacagtgatctaaatgcccatcagggtgaaaggataaatcagtatagttgcatgtagagtatgcatagtcatagttcataaaacaatgatatacaagcagtgaaaattaataaactagagctgtagatagcaacatgttttcttgttttgttttttgtttgtttgtttttttgagacgaagtctccctctatcccccaggctgcagtgcagtggcgcgaactcggctcactgcaacctctgtctcctgggttcaagtgattcttctgcctcagcctcctgagtagctgggactacaggtgtgcgccaccatgcccagctaatttttgtatttttagtagagacagggtttcaccatgttggccaggctggtctggaactcctgacctcaggtgatccgcccacctcgacctcccaaaatgctgagattacaggcatgagctaccgcgcccgggctggaagaattttttaaaacactgttcagtgaacaaaaacccaagttgcagaaggatgtatttcatacaacaccatttatatgtgtctgaaagcaacacaacatatatatatatatgtaatctaatacatacatacatataatatgtattacatataatccttatatatatatagaatcttaatatatatatttaggtcaggacatttagatcactgtttaatatatatattaggattatatataatatatattatattattatgtattaattatataatccttatatatatattaggattccatgcaaatgaagtaaaaatataaagaaataatgcaaactacgaaccaaatccgaaaagcatttattgaggcaaggatgtggatatagatggaaaggaaacctagacaccttcatgccttttttcttaaactgggcaataggtgttgtctaggtatgttaggttattgttttccatttctatgtctgaaatgattgtttttcattttaaaaaatgatggtacagctcacagatctaaagcaaagtgaagttttaaatgaatgcattaagtacaatcagtaactacagaatgtgatctaaaaatacatgttcctcatgttgcagggtgagaatggaaatgaggagtaaattgtaatcgtgccagggaagccaggtgtctcagcagatttggaatctttgcatggcaggtggatccaatttatgtaatgcttgggttaagacagctcaggaaggcagccttgcaatgaaacgtgaacctgtgtgcgtttttagcagtcaccacatggtggcagcctatccaagaaaattcaagggcaatagtttgcacttgagagcccagaaattttgatttggaagctcagtggaagaggaaaataaaccgtgccctgcactgaacagctgtggtgaagagagaaaataccttccttggcaattgaatgttttcgcagctgtcacagatacttttgctagttgtatctatatttttgaaaaacaaagacatttttcaaagtacttttttattacgggaataaatcaccttgtctctgtactttgggatgaatctcatctgaactttgagaacgattaagtggcttcactttctggagaatctggtcattgggtaacattcttgttttcatatggaccagaaggttctctttcatagttgatgttgcacacacgtttttttccctaagtccttggtatttatagtggcaccattgcgaatgttagaggctatcaactttcattcttattattgcttcatctttgtagccaaaaatatgggaagaaatgttcatagccccgccccatacttgtccccctctacctggcctacctacctacgtcaggctcctgtcccaccacaaatgacagcctgtgtctttcatgttagcagctagtctttcactagccacatacttccccgtaacccatatgcctccctgtgtctgcctgacgtttgaattgtcactattctgttgttgtatttttacaagaagaatgtatggggcagaaaacccttgccattcatttcctgagtaggaattctagccttccttggagtcgtggtaatatggagacatggtaatatgtggattgtaccactcaatggctgtctggaggccacagtggtgcaaaaagccacctaggcatgggttagtgtcctggggcacccaatcaggacaggacacctggcacacccttggaaaagcttcactgtgaaaaacactggaagtaaaaattttaacaacagatagggatttttttccccttgagacagaggctcactctgttacccaggctggagtgcagtggcgcgatctcggctcactaaagcctctgcctcatgggttcaagagattctcatgcctcagccacctgagtagctgggattacaggcgagcaccaccatgcctggctaatttttatatttttagtagagatggagtttcgccatgttggccaggctggtctcgaactcctgacctcaagtgatccacccacatggccctctcaaagtgctggaattagaggcctgagtcactgtgcctggcccacatggggatttttgttgcccagcttaatcaaccaagaataaaagtgcattttaagattataatctatttaacttctccttattggcaatggtaaaagagttaaggaaaaaagagaataagcttaggattatggctactaagtagaaggacgttatctttgacgggcatttctgttgtgcttatttgtacctgacatggaacaagacccccccatcccctcaacacatacctgctgtgggacatctggctagagatttccaaagctgagggtgaaaggtttgggcatcggtgtgactgtgtaacactagagttctatctaccatctcttaaactacaggtagtcttaccggtgtgggctgaccttccggttatcaggcagcctgctgcaaccactagaaactgcctttgaaggtttccagtccggcacaacatttgtgttctcattaaacagtagagcataggctttggggacacacagctctgggctcaagccttagctgttgctgctctgagcctgttccctcgcgtagaaaggcaatcataatactccctactttatggggcagttgtgggaatggaattaaatgctaatgtgggccgggtgcagtggttcacgcctgtaatcccagcactttgggaggctgaggagggcagattgcttgagcccaggagtttgagaccagcctggcaacatggcgaaactccatctctaaaaaagtacaaaaattagccaggcgtggtggctgtagtcccaggtactttggaggctgaggtgggatgatcacctgaatctggggaggtcgaggttgcagtgagctgagattgcaccaccgcactgcaacctggagtgcaggctggaggaagagaaatatatgggtcaattaggcaaatcactcagatcgtaagtagatatactagtaaaatagcgtgacttagggtccttcactggaagcctggtattaatgcttccattgtgtgggtgggggaaggagagagtgtctccagctctctgtctgtgaggtctcccagccgaatattggccaagggagtgaaaccagaagcaagactaccatgagacaacgttccagagagaggagggactaaccagagcaggtgcccagctttggccagtcaggctcatcttccagtcctcagtagattattatcaactttaagtgatgtcacagactcccttcctccaaagctgtggacctcttccttcccatgcctcttgttacttggaagtcactctacttccaaacatgtcggctggagatccctgatgggccagttactactttcaggctctgtaggtttaaagaatggttatatccagttagttacaaatagaaatcgatcctttctctgtccgtctgtctaaacggaaggatattctgtggacgctgattaggtataaaatctccacggagcctgagcatgaagaattgaccttcttagggttccacagaaaccagaatagacttctgtgtttggtagctttgtaacttacgcccgttgaggtgtacggttgaaaattgagaataaatttcctgttctgtttctgagcatcttttccaggcttggagatgcgttgagcatttccacggagaccctagaggtggggaggggaagaacgcctgggcatttgtccaaattagccatatgctgtggagtgtcacatgtcaggaagccaaggcactggagctagtgtttttgggcagggctagggaaccccccgcctttcctccacccaaacgcaggcccccacacccagcgtcctgggccctgcaggggaatgacactgttggtttcactctcaggaatgagcctagatttggaggtaacctcttcctgaccccgatgatttcactctgatgccaaaaccagtctgaagtgggtgtggttttgcatttggtgtttacaaggtggagtggtgccctctgcacggaagggagaggtgggcaggtacggcagggccctgctccctcgggagtctcctctgaacctgtggttagggcacagctggacaatgctgaaatggtctccagctgggagatgaggtaaacctcagctgcatgccgaagaaataacctagaaatcagagaaccgttttattttgtttttctcagaggatctcatttctccctctcctcctgagcacagagaccctcaaaactggtattcacagaaggaaaaaatataggtctttcacctttgaaggatcaaagtgtctagggttttttgtggttttttttttttttttttgaacaaagctgaactattacaaagtccttttcagtttaaatttagtgcatggcatggctcatgaaagacttttaaaagtgaattggaaaattctaaatgtacttgtattatacatgtgaaaggatgacttcttaaaaaaagaataatgtctgtcccaaacgggagaaggaaggaactctagcttttaaactgcactacattagtgagttacatgacaattctccttttaacaggatggaatgcacttaaagcagtaatgtgctatggtgacagtaatgacagacaatgttaattgacagaatggctactctgaaccaggcactgtcttgtactcctgttatctcagtggtcttcacacttattctgttaggcaggactgtcatcctccccacattacagatgaggaaactgactgaggcttagagaggagactttgcaaagatcatgtgattaaaaaatggtagaggtggcaaaacagcctgtgtttttaacactgtcccatgtcagctcttattccagatcatcacataaagtctaatctctaatcttgaaaaccaaaaagcacctgccacctcagataagagagaccaagaccctagacattcgacttgtgttgaattcactcttattttgttttgatgtttgtaatcccagagccatacttgttaatgagctgaagtagagtgaatgctgtcccctccctgaggcctggggctcatcatcagctctccaggctcccctttcagaggggatggtgagcaccttcggagagggcagggatggacacacaagacagcctcagttatgtgagttcatcccctcccctgcctgctgtgggtgagatggagaaaaaagcactggaccctcctgggcatcacagccttgtacttagcgagtggctgaggtcatcagtagcccaggtcatcagtagtgtggaattaagtgcactgaatagtgttggcccctgagctttgtttgacagatttagggggtcagctcaccactttcccctcttgcttctgtctgatcattgctctgtttgttaataccaaggaagaaagtgaatagaactttttagagagccaaaaaaactttattagactttatgccattcattatacttagcagtgttgagggaaggatttgtgagacgatatattcaaactaatgggcatgagaccaagaaggggctgtgtggcgggcgcggtggctcacacctgtaaccccagcactttgggaggccgaggcaggtggatcatgaggtcaggaatcgagaccatcctggctaacacggtgaaaccctgtctctactaaaaaaaaaaatacaaaaacaaaattagcagggtgtggtggcaggcacctgaagtctctgctactcgggaggctgaggcagaagaatagcatgaacccgggaggtggagcttgcagtgagccgagatcgcgccactgcactccagcctgggcaatagagtgagactccatctaaaaaaaagccggttggggtgggggcatgtaattaacagactgattggtcttaggtggctcagaatttaagctgagaaattaagattgagaagaaatgatgtattgtcgttatatcaaatatgtgagtaaaaacataattaaaacaccatctatctccagttttcccaacattacctcccttttatgatgcccttcctgtaccttattaggcaaaatattctaatttcagtctcattggattatgttctaaatgtttgaaggttggtctgaacatggaatgtattttctcatagatataatagtataaatggtgttagggtcatgggattgcgaagccagttccactgcagtagaatcatattgacttgctttccgatttttctgtgggaaacttcatctggagctttaatgcacttcttagctgtggggtaagtttcagcctccatgacgcttgtgttactttgtagtcacctgtggccaaccacaaataaatctttgtggtcatcaggggccagtgaagtgtatactgcacaaaagagagcctaccccaattctggaagaagggctgcaggcctgtgtcccacaaagaacaggcaggaagcatcaccttcagcccactggcagcaggtcatctcccatttgcttttctgcactatcagcagagtctggcttccttttccaccccctctccaatgtgaatgctttttaaggtcgtggaattagaatttaaaaaaaaaatttttttgagacagagttttgctcttctcgcccaggctggagtgcaatggtgcaatctcagctcaccgcagtctccgcctcccaggttcaaatgattctcctgcctcagcctcctgagtagctgggattacaagcatgcgccaccacgcccagctaattttgtatttttagtagggacagagtttctccatgttggtcaggctggtctcgaactcctgacctcaggtgatccacccacctcggcctcccaaagtgcagggattacaggcatgagccaccgcgcctggccagtattagaatcttttaatgggaacgtcttaaacataacctataacaatgaagcaccttataagtgtgtggagatttccttttcatggcttttcatatatgcctcgcactcacccagcaaccctgcaaactggatgttatactcaccagagagccttgaccctgattgtcactggcaaggagcagtgtctggacttgaacgcaggtcgcaggactccactcatggtgctctccccactgcacctcaattcctcacttttcaaaggaggcagcggaagcctggagagtttctcaaaggaaacggaatgcagaaatctgtctgtgtgcaatgtgaggctcagaactgaaaaccataaatgtcaggaaatgcaaagcagaattttcccctgcaacggcagtttgcatgaatatgaagacgctgtatggatgaaagtttgtggctgcagcatgagcataaatcctcggggctgctgttcgtctaggagcctgacttgcctggtgttgccctgagaactgcaacttgagcatttccttaattttgtactaaaggaaccaaaatgaggtattttggttctaagtctttgtcatgtgaaggaagcttcctgttaccaccccccatctacatacacattctctttcttagccccacgtttgaattttatgtttttcctaaagtatagggaagattattattattattattattttctttttcagacggagtctcgttctgtcaccaggctggagtgcaggcgcgtgatctaggctcactgcaagctctgcctcccaggttgaagtgattctcctgtgaaagggaattatttttgatgagtcattaaagtatatccattcccagaatggtgctgcatttttccttttatcatctgtcatgacttttttaagtgtgaagcttacttccagaggaattgtcttttctagcattttggacacaactaaatatctttgatattttcttctcatatgttgagcagtaaattaagttgaatggtgaagtcagaggtgaacttaggaacatttagaaaaaggaaggtcatttattatttttcaggggaaaagtttggtagaaaaatgctgtaatcctaattcccagatgtccatttggcttgtagtcattttgatttatgaaataatcataagaaatgtcttcaaattttaaaagccaataatttgttctactaatcacagatgagagtagaaataaaagaaacacacccaattcctgaaaggaaaaaaattctcccaggatgagatcactgggtggacgtgaagtgggtaaaataccttttgctgcaattgtcatccccttatcttgccaaagtacgacaacatctgaatgaagatggtttgatgttcttagtttagagtagttatactattattttaacattcctatttaatgatatgttttaatactgcaggggaaaggtagatacagattcatagctacaaagcaatactcttatgatcaatgttcatttaatttcaaatacaaagttagacattcagagttaaaaaaaattaatgcataggctgggtgcagtggctcacgcctgtaatcccagcactttgggaggccgaggcaggcggatcatgaggtcaggagtgtgagaccagcctgaccaacatggggaaactccatctctactaaaaatacaaaaattagctgggtgtggtggcatgcgcctgtaatcctagctactcaggaggctgagacaggagaatcgttgaacccaggaggcagaggttgcagcgagctgagattgcaccactgcactccagcctgggccacagagtgagattccatctcaaaaaaaaatagatatatatatattttttatattatattatatattatatatttatatttttatatatataaatgaataaacaaggcatctgcttatgaaacagtctgcctgaatgaaatctccatttgcaggcaacacagtctacagtaatggcaggactgtattaggcatggttcctaatgcccatttctgtagcaaagtcaccagtagttcctaattgccaaaagtgagtcaccggtagttcctaattgccaaaagtgtattttttgcttttatcttgcttgaccacagctgtcatataaacctgttggccacacccttttcccttagcctgaatgaaaatgccccttcctgcccttcgtagctcctgagccaccaggacatggtggtctccatcatctgttcgttatctctaaccatttaagattagtgctccccaaggatgtctgttaacctgctttccttcccattctgccagtttcccctggggaatccacacttctggttttaaccatcacctaaatgctgtgtgtcccgacccgcatccgcatgctcccaggccattctcagttccagacccgggcccccagcttcctgcagacgcctcctccaggagatctcagtatcttgcttttcctcctaccccttctaaggcattctcaatccagcttccagaggaatcttcctaaaacacatctgactgtgtgagccacatactgtagcccaacctgacagcttcttttctatattaagaaaaagtgcggccgggcgcggtggctcacgcctgtaatcccagctctttgggaggctgaggcgggcagatcacgaggtcaggagatcgagaccatcctggataacatggtgaaaccctgtctctactgaaaatacaaaaaattagccgggcatggtggcaggtgcctgtagtcccagctactcgggaggctgaggcaggagaatggcatgaacccaggaggcggagcttgcagtgagccgggatcgcgccactgcactccagcctggacgacagagtgagactcgtctcaaaaaaaaaaaagaaaagaaaagaaaaagtgcacacattttgacatctgagaaaagtgatgtttttcttagaaaagtgacatctaactctttatagaaactttgccacaaggtagtctaggagtccccttactacctaagattttcatggacatgccctgtctgatcataaagcatgtggcacagtggctcacgcctgtaatcccaacactttggaaggcccaggcgggcagatcacttgagcccaggaattcaagaccagcctgggcaacatggtgaaaccctgtctctacaaaaaatatttaaaaaacaaaatgaactgagcatggtgaagcacatctatagtcccagctacttagaggctgaggtaggaggatcgcttaagcccagaagtcagggctgcagtgagctgagactgcagtgccactgcattccagcctagaggacagagtgagaccccgtctccaaaaataaataaattaattaaataaagccttgtgaagaatctgccgtggagcataatgtaacccataaagccacttaactgggcgcacataaactacataaactacagtgtgtcccagttcattgagagtgaaaatcaagcaagggaccacctcagtgtggtagagccccctccctgccctccagaccctgctctgttctctgtgtctgaccattgactggccatcactcaggcactagttgagaatgccaatgtctttagttattgtaatttcagaagcacatccttgctggacaaagaacctacctgttaattttttaaagtaatgttcatcattttgaacattgttttctttcttttttattcagctgaccctcatgaggaatttaacttggttttctgaactgtgttggtaacatttgaaggacatagaaacagttttcataggtctcaagtgatataaaccacaattctttagaaaatatctttttttttttacccattctggattttgaaatatatacagatctcatacctcagattctcatatgatatgaactgtttcaaaacacattgatagcagaagatacatactgtcttctagtcaagagggtagcgctgtatttagtttaaaacattttaatgcattttatttgctaaatacaaaattataatattctgtataactttccaaatctcatctgtcctccctttcccccatctctttatattcagatgcttgtccctccagcttaaaaattcatgactttgagaaaattcgtcttcatgttatctaaactactgcacccccacacgctccctgttaagtgtctgcatatctgtgtcttactgttgtttaaaattcacttgtctgcctggggagtggggtggtttgctttaagctgctccactcaagtctcagcagagaaagcaataatttgttatgagatagagttttaagccaagctttggccagggtctctcccatttgggaggaggaaaataggaacaagtgagatgataattttccttgaattttagctcattaaaatcttcccttgtcctgggcaggctatttactgatttaagcatctagcacttttcctttccagaaagaattaacatctatgatgcaatcattgctaagggaggaggtttttgtgttttctctgtggaattagctgttctccagttgcagatgagcacagcccactttagagttgtgtgtaggtatggagttgaggggtcggaatgagatttccaagatttataggtaatgaaaagaacaggttgtatcaaagacaccacgtgtaggaaactaactgttcttaggggacttgtgtgaacctgtgatccttggctttctccaaaatgaacatttcagccttgttcatattaacctcctttttacagttgttttaccgtgttctggttttgctgctattctgcctgaaaatctagcaaaatggcgtttcttatctgcagaactgcgacaaagcttaaacatttgtatttctcttgaggattactgtggttgaatttttgacagtactatatataaatgaagaaataaaattttttatacagatgtttaaaatcctctttccactagaacatttctttctccctaaatatactattacctggaactctagctgtttttcagatctgtagagatcataggtggcttaagggactagattgctggtgatattggctgcaaaattcttttttttttttttttttttttttttttgagacagagtcttgctccatcgcccaggctggagtgcagtggtgcaatcttggcttcactgcaacctctgcctcccaggttcaagtgattctcatttggctgcaaagttcttagtgaggtttagtggtattttggccctgtggcacagaagaatggttatttagcaaatgtgttttgcttttgattttgttttgtttttgagacagggtcttgccctgttgcccaggctggagtgaagtggctcgatcacagctcactgcagccatgacctcctgggctcaagcgatccttccacctcaacctcccaagtagctaggaccacaggcatgcctcaccacacctggctaatttttattttattttatttttgtagagacagggccttactatgttgcccaagctgttctcaaacttttgggctcaagcagtcttcccaccctggcctcccaaagtgctgggattacccagcatggcagcatgagccaacaggtctggcctcggcaaaggttttagtagggctttctcttttcttttgaagatgattaatacagtagattcatacagccagaagctgaaaagcagggaatactgtttggcttattaatggataatcaatcagtgttaatacacttttccctatttacatggtcaaattgatcaaatatttccaaggtattagcttttaaaagttgactttgtcagctctatgaaaagacatgcatttacatttttatcgtgctcctcctctgtcaggggacttggatctgtccttgatcttggcttttctgttcataaaccaggtaggactgtcatgggtttgctcccattaccatctcttgtcccaagatttctaaaaggcatcacctgatgcacccttttgcccaaatagtgttaaaagtcctcaggctgaggagctgtcctggttcttctacaggatctttaatgatcagcctgtctaagctgagaatggataagggtgtccccaacacgtttatttggtggtttggtgggggtagtgacactggggatgcttttgtgtgttgtaatctgcccctctgtctgtttgaccccagagactctgtggttagttgcaggacatcaaaatacgcaggaaagacagtgggggaagagaccatcagtcgccctcttgctgcctaggttcactagaatctctaagactgaattcactaggagacacaggacataccgtagagctgtttatgtcttgagagccccagtttcctagtctgttaaatgagcatagtaacaccaatctcactcctttggaatattcaatggtgtaatacttacaacatctagctgacctgtacaattatagctattctcttctgcaagtctaatattcctattcacccctccctctgcatagggatccagtttgaaatcatcagttgctcagtagggcctggggagctagctggtcattctttggttaaagtcaaagccaacctctttgcctacctttttgtcttaatgtcaacttcctaccagacatgttcctcccgcactggatgatcaaaatgcaaataggatggacacgatcaatgcattttgttggagtggttgcattctttctactttcttagggcaaaaaaatgaatggttggacaagagactaaccaaggcctcaaagaaagtgaaattctttctcaagctcctgaaagtcctttcatgggtatagtaacagttctataggggtctcattgtgatggtgccattatacaggccagcaagccccctgtgtgagccagacctcatggccttagcccttgttttcctctttttttttttttttttttttgagacagggtctcgctctgttgttggagtgcagtggtgtgatctcggctcactgcaacctctgcctcctgggttcaagtgattctcgtgctgtagcctcctgagtagctgagattacaggcccccaccagcacgcctggctaatttttgtatttttagtagagacagggttttaccatgttggccagtctggtctcgaactcctgacctcgtgatccacctgcctcagcctccctaagtgctgggattacaggtgtgagccactatgcccggctgccccatcctttttcttgatattatagttagtggtgaaaacatgtaaatgataatactccatgcagtatgtatgctgaagtgactaccctgaagacattttttaagtcctattttcttttctttctaggatatgataatcattttctgtttgtattaatacatgcttgaaaggaattagtaaagcgattccatccttgtcagcagcttggaacaaagctgtggatctgggattgtgtagaactcatttgacatcagtagttacttgtgtctttatgcctcagatcaagatgtgcgtgtttttttctttctccttttagcttcacgaggctgacattgtggtcctaggctcacctaagccagaagagattccccttacttggatacaaccaggaactactgttctcaactgctcccatgacttcctgtcaggtaaatgtcttcacattggtgttgagccactgattaggtcagatagttcaaagaaatgttaaccttttcctaagaggttatgtttctgaaatgttagcagtcgtcaacattaatatatagggtaggaaacttagactgtgggctacctgatagaaccatgctgttgagcaaagagagaccaagatggcggttgaggtgtctgctcccacagtgaagtgccccctactggcctctagcagtcaggtcagttgtgacctcaagtagatgatttgtatgtgtgtgaggtaaactagaaatagcggttttcacagtttcttaaaaattagtaaaaccctttcttccaaagaaatcttcgtggaatctcactatgtaaaagcagatgagcgccggattgttgggagggatgggaataggatcagcctgtgtgtctccctgatttcctcttgcattgacccatgaagcacatccttggagccccagagtcatctcagaacagtatgaaaatcaccactagatgcagaaactgttgtaggattggtcctgctatttgatggcattttgccaaggtatccaggaatactcaagaccacaccaggcccactttgggggcagcccaagcagtgcccgcaacagggcagccagcagccccgggtccagcaggagccggcccagagtgggttcctttttccagttcgtagaaggactgaggctaagaaagccttggagcacacccaggccctcagcaagtccctgagtagcacaggtgagccagagacgatggcacagggaggcagaggagagcccctcttcctgattccttctggctttggcctccaaatgtttgtgtggaagagaggactgtgctgagctgggctggaggacaggggcagcttttatccctaaagctgggcagaacatgcaccaaggttggcagcctctgctctccttctcctccaccaggaccatacttgaggttgaaatcttgaaaccttgtaggcagctccataaaagcatgagccctagccagaggttgttactgaccctcctctctaggaaatgtagctcctgccagaattgaccgatcagattaaaaaccccttgggggctggagagggtggaatggaacagagtccaaggaaagaggcattaagagctgtggccctaatggctctttttaacaaacagaaagcatgtgctaaataacattttaaaaatatgtgtaatttattcatataactttttttcccctgaaaaaaaaaaaaaacaaagcctaacctattaatagtggacagggcttcctctgttcagcatcccagtcagattaggaaaatcagttccaacatttgtttcttgtaaatgaatgctgctttgctgtaatatttacttgctgtgttttattaaagttttcatgtaggacagttttggcagtcatggctggagataggagtctactttgatgttctggaatctctttgagctctgtggttatatgacagtgacatatattttgttagtgaaagtgctttatttttaataaggtttccttttaggacccttatttttgaaaaaaagtattccctgaaatattagatatcaatgtaatgattctctgggggaaaaaaagaccaaggcgttacagatgttcctcgactgaccatggggttatgcacagataaacccatcagaagttgaaaatatcattagtaaaaaatgggcatttgtagccaggatgggatgtgaaaacagaaaacaacgtccaaaaatgctggcagcacagtacgctgtagagtattggttgtttggcctcgtgattgcatggctgaccggaaaccacgatttgctgtcactgctgcccagcgcctcaagacagccttgttctttgtatagctggcctgggaaaagatcaaaatttaaagcacagtttctactgaatgcatgtccctttcccaccatcataaagtggaaaaatagtaagtgaaaaggttgtaaatcagggatggtctgtgtatttcaaaatgattctataagtagaatttatttgaaatttatctggcccaactgtaatagttttcttgttggtttttgaatgcccagtgtccagaatagtacctgacgcttagtaaccgctctgtgaaattttttttttttttttggagacagagtcttgctctgtcaccctggctttagtgcagtgggtgtgatcttggctcactgcaacctccaccttctgggttcaggtgattctcctacctcagcctcccaagtagctaggattacaggtccctgtcaccacgcctggccaatttttttttttttttgtatttttagtagaagtgtggatgcaccatgtttgccaggttggtttcgaactcctgacctcaagtgatccacccacctcggcctcccagagtgctaggattacgggcatgagccactgggcctggctaactctgtgaatattgagtgtttgacaagttaataagcatgaatcaaaattctactctgcttgtagttttaagttagtggcatgtttagaaacatttccttgaatttgtctcccacttaaagatggggctgatggccaggcacagtggctcacgcctgtaatcctaacactttgggaggccgaggcaggtggatcacctgaggtcgggagtttgagacctagcctggccaacatggtgaaactcttgtctctattaaaaatacaaaaaaattagctgggcttggtggcaggtgcctgtaataccagctactcgggaagctgaggcaggagaatggcttgaacccaggaggtggaggttgcagtgagccgagattgcaccattgcactccagcctggatgacaagagcttttttttttttctcaaaaaaaaagaaaagaaaaaaaaatgggctcaactaggcagtcattgagataaagatgaggaatgctatgttgatgaaacagatgaacagtttcggggtggtgctacccataatagcacatttctaaatagtctacaagttttaattttagcaactttgtttagtatgaaaatttgatctaggaataatggagaaaggttttttttcccctctttttttcataatcccactactgtaaagaaatgaataaactttttgaaatattaaaaagaaaagagctcttatttaaacttaagatgagaagaacttttaataaacttgtggctgggtgaagacagagttttataatgaaatttttattcttaccttcatggtacagagtccctcctccttacccccgtaaaaatagatgggatgttgtgatttatgatgaggcaattctgtagagacattttatggaatacgtaatcctaggagagattttcctgatggctaatatcccagacacagagctcagaaaacaattatacccagctagttggttctgttcactctactattgcatgagtccaatgtttagattttaaaacaaggaaatttcaacattctgttttctagctgtaagagtaactactttaaaaaaaaaaaaaaagacaaccaaaaaaacctatttcttagaaaaagtcttgctctgttgcccaggctagagtacagtggcacgatcacagcctcaaactcctgggctccagcaatcctccctcctcagctaattaaaacaattttttttgttgttgttgaggcagggttctcactgtgttgcccaggctggtcttgaactcccggcctcaaatagtcctcccgcctccacctccaaaaagtgctgagattactggtgtaaaccaccatgtctggcctaaaaaaattatttcaaatgaaaaaactacgcactgctcttgtagtgccctgcttgctaaacagcagatttcatcataagcaaaatcattttgtaccctaaatattaggacttatttactgatgtaacaaatgggaccaaggagaagctggtcttccgtcttaggctcagaaaacagtatcaaaacagcaactctgtggctcagagtaatttatagcatcattttaagctaatgtaattctatttagtgtggaagaggggaagagccctgggatgctgatgtgctgggggtcccgagggaccttgagactttctctcgtatggctctgaagggagacattagaacttactggaggctgggcgtggtgtggctcatgcctgtaatcccagcactttgggaggccgaggccagtggatcacttgaagtcaggagttcgagaccagcctgagcaacatagtgaaacctcatctctattaaaaatacaaaagttagccgggcatggtggcaggcacctgtaatcccagctacttgggaggctggggcaggagaatcgcttgaatccaagaggcagaggttgcagtgagccgagatcacgccattgcactccagcctgggcagcaagagcaaagctccatctcaaaaaattaaaaaaaaaatgtagtggaaagaacatggactttggagtcaggattaacctaactcaaggacaagggagctgtttttgtaaaaaaaattcttggccggatgcggtggctcacgcctgtaatcctagcactttgggaggctgaggcaggcggatcacctgcggtggggagttcgagaccagcctgaccaacgtggagaaaccccatctctactaaaaatacaaaattagccgggcatggtggcgcatgcctgtaatcccagctactcaggaggctgaggcaggagaatcgcttgaacccaggaggtggaggttacggtgagctgagatcgcgctccagcctgggcaccaagagcgaaactccatctcaaaaaaaaaaaaaaaagaaattcttaattgcattgcacttacaggctgtgtgactttgaggaaataagctctctgattaattaataagattcccaatttctttgtgggtaaattgggagcaaggctgttgggaggaatgactgagatgatacctcggggcagtgcctctttgatggtagctgccaataaatgctggtccacttcctgcattcctccctccacttccttgttgccatgtcacctgcacacaaaacagctttcagactccatcttggcacaatatacatttatatttgaaaaatcaaacccaagaaaggaagaagtccaatgaaattctgaacatgtaagaaaagtcagctttagagaaattggacatccgtgtaattttcattatgccaaagcaattgatataaaattaggatctttgcttgtgactcttgaactttagtaattccaaaatccattgtacctatcactgttttcttttatttattttttcctgtaaattctggatattctagatctatccctgaagtatattgccagttttccatttcaaattttaattagttctcaatacaatgtatttaatattttgctttttttaaaaaaagtaaaggttcatgtcatttagaatatgcagcactgtataaatttccttgttaatttggtttcagtggtccaaattaagttattactaatagcttattagtatcagtttactaatattttaatttttttaatcatgtcttacattgcattcttttaaaaactagtgatatgctgtcatttgacagtaagaattcaaataatttaaactaggattgcaactctcaagaacactgtcacaaaaattttaccaaatgatatgtattagtccattctcacactgctataaagaaatacctgagactgggtaatttataaagaaaagaagtttaattgtctcacacttccacggactgtacaggtagtatgatgctggcatttgcttggaaggccttctggaaggcctcaggaaacttacaattatagtagaaggggaaggggaatcacatatatcttacatggccagagcaggagcaagagagagggagggcgtattagtccattttcgcactgctgataaagacatacacgagacggggaagaaaaagaggtttaattggacttacagttccacatggctggggaggcctcaaaatcatggcgggaggtgaaaagcacttcttacatggcagcagcaagagaaaatcaggaagatgcaaaagcggaaacccctgataaaaccatctgatctcatgagacgtatttactaccatgagaagagtatggggaaaaccacccccatgattcaaattatctcccactgggtccctcctacaacacgtgggaattatgggagtacaattcaagatgagatttgggtggggacacagccaaaccatatcagaggaggaggtgcatactacatacttttaaaaaccagatctcaggataactcactcactatcatgagaacagcaccaatgggatggcgctaagcctttcatgaagggccacccccatgatcctgtcacctcccaccaggccccacccccaacactggggattacaattgaacatgagatttggtggagacacagaaccaaaccatatcatgatactcattttatttattgcattttactttatatcctacaaagtcaatatatttaactgaaaaactggctaccagtgtttttgtttttttttttcaagttctacctgtactgatttctaatttttagccattcctgattttaaaacctcgcatacattttggggataatttgttctcctagatggcgagaaaatatttaagtctgtgggcttggagaatgcttttttgataagaaggatgcccttggccagactgcatagaagctgagatgtttccgcagagccgagatggcatgaaggctgaagaattttcctgcatccctcccactgcagtgattgttctggcaaagttcccagggtggtctctgcactgctcatattagtgaaagggtggttctgatttctgaggaaggcatgataacactttggccttaaattttctttttgcagaaagtttgattatcattagaagaatggccatcttttaaagtgattcattgacttgtccctggagaaatcatgagttagatgagagtgtttagtgggaagtgaaaagacccgtccacggtttcggatgagatcctcgttggactgtgatcccaggatattacccaggcccagatcgtagacaacctcccaatggagtcctgcccctacacgggcagggggtgaaataatgattccctttcttaattttctttagccatgaaatttattaaaaatgtatgtctgattctgagttgccagtcttaattgcttgagattctctggattcagaacttatttttattttttttatttttattttttgagacagagtctcgctctgtcatccaggcaggaatgcagtggcgcaactgcaggcccactgcatcctgagctcaagcgatcctcctgccccagcccccaggtagctgggactacagacatatgccaccatgcccaactaatttttttttttgaggcagagtctcgctccctcccccaggctggagtgcagtggcatgagctcggctcactgcaagctccgcctcccgggttcacgccattctcctgcttcagcctcccgagtatctgggactaaaggcgcccgccaccacgcccggctagtttttttttttgtatttttagtagagacggggtttcaccgtgttagccaggatggtctcgatctcctgacctggtcatccgcccgactcggcctcccaaagtgctgggattacaggcgtgagccaccgcgcccagtcccaactgatttttgtaccttttctagagacgaggtttcaccaggttgctcaggctgctctcgaactcctggacttaagcaatcctcctgccttggcctctgaaagtgctgggattacaggtgtgagctactgcgcccagcctgaatgcagtcttaaaactgaattagaaaatctgagtgcaggctagagttatatataattaagagagtgtgggttttaagttgtgtcttaaaattgtgttgtttttggtcgagtctggtggctcacacttgtaatcccagcactttggggggcctaagtgggctgattgcttgagctcacgagttcgagaccagcctgggcaacatagtgaaactctgcctctacaaaaaatacaaaaattaagcccaggtgctgtggctcatgcctgtaatcctagcactttgggaggccaaggctggtggatcatctgaggtcaggagtttgagaccagcctggccgtggtgaaaccctgcctctactaaaaaaatacaaaaactaaccaggcgtggtggcacatgcctgtagtcccagctacatgggaggcagaggcagaagagtcccttgaacccaggaggcggaggctgcagtgagccaagatcgcaccactgcactccagcctgggcgacagagcaacagtccgtctcaaaaacaaaaaacaaaaattagccaggcattgtggcatgcgcctgtagtcccagctacttgggaggctgaggtgggaagatggcttgagcctgggaggcgggggttacagggagctgagatggtgccactgtactccagcctgggtgatcgggccagaccttatctcaaaaaaaagtgtttttaattacttgtaattttaattgcttgtaattaaaaaacagtaattaaaaggaccaaaagttaattttgcaggtagtaaaccttagcctactgtacgtaaaaatcagaaggccaaggcaggaggattgcctgagtccaggagctcaagaccagcttgggcaacatagtgagaccccgtctctataaaacaacttaacaatgtgccaggtgtggtggcacacccttgcaatcccaactactcaggaggctgaggtggacggattgcttgagcctgggaggtcaaggctgcaatgatcgtgatcacatcactgcactccagcctgggcaacagagcaagaccctctgtaaataataacagtaataatcagaaagcaacactgtatgtgaataaagtcaccttacctagctgccggtggacagcctttggtgtttcaaggacttagtttttatgcgttcctgctttcgatatttgttgactgtgagctttgggcttatccagggtccatgaagaagaaatggctcttccttatctcaggcttttgttattttggggtgttttaaattcctctcctgtggttactcaatccgaccctacttgcctctctcttccacaaatttctcaaatgtcattcatggtacccttttaactcttacggacttacttgtttttaacatatcttttattcactttgaatggagtttcgactggaaatagagggtagtgttgtgtgtaccacctaccatcttcagctagacactttcaaagagtttgttttgttaattatatcttcttacatggctcattatgcttgttgaaatttgcaagatgctttaaaccaatcctgtccaaaccacagcctgtgggccgcatgtagcccaggatagctttgaatgcagcccaacacaaattcataaactttcttaaaacacgaaattttttttgcaattttttttttccttagctcatcagctatcatagtgttagtgtattttatgtgtggctatggcccaagacaattcttcttccagtgtggcccagggaagccaaaagattacacattgctgaaaactttagatgtatcaggaatcatatagcttttcaaaataaaatatccacacttttgctaagttctatgctatgcaagtgactgaactataccaggacttatcttgtaaacttggaagtgaaatattcttcactcgcaagggtattttgtgattaaattctggaaatatgcatttataagttgataccagctcctggaatgtaactttttcttttttctttttttcttttttagattttttgagatgaagtctcactctgttgcccagggtggagtgcagtggcacaatcttggctcactgcagcctctgggtcccgaggtcaagcaattcgctggcctcagcctctgagtaggtgggactacaggcatctgccaccacagctggctaacttttttttgtatttttagtagagacagggtttcaccttgttggccaggctggtcttgaactcctgacctcaagtgatccatccacctcggcctcccaaagtgctgggattacaggcgtgagccaccgcacccggatgctttttctcatttctccatcgcttaaagatagaggattgagagaggcccgtttgtggacacgatcttaagtacagatctctagtggttaaaacgaaacacaacaattctctctcatcctctagactcttggcttttgcctaaatatgattcataaagctgaagtgttgctaatctttaaataacacccaagggatatgattatatgattacccaacaccctaatacagtttaagaatagagtgatccaaagaaggagaaaatagtgtcttcaaaaatgttgctattagaaatatttcttttctctaagggaggatgcaggctaaagtatttagcatgtgtgtttacttttataaattttctaagtgatgaaggaaggaaggtagaatctttttttttttttttttttttttttttcagatagagtttcactcttgttgcccaggctggagtgagtggtgtgatctcggctcaccgcaatctccgcctcccaggttcaagcgattctctgcttcagcctccctagtagctgggatcacaggtgtgcaccaccacgcccagctaatttttttttttttttttttttttttttttttttggtatttttagtagagatggggttgcaccatgttggccaggctggtctcaaactcctgacctcaggtgatccaccctactcggcctcctagagtcctgggattacaggcgtgagccactatgccctgccagaagtagaattcttatcaacatctttctaggttgataatcaggtaatccctaaagttaataccctaaaatgcaattttttagttttgatggaaaattgattctatcccttttttttttttttttttttttttttttttgaggtggagttttgctcttgttgcccaggctggagagcaatggcacgatctcagctcactgcaacctcggcctcccggttcaagcgattctcctgcctcagcctcctgagtagctgggattacaggcatgtgccaccacgcctggctaattttgtatttttagtagagatggggtttctccatgttggtcaggctgttctcaaacccccgacctcagatgatccacccggcttggcctcccaaattgctgggattacaggcgtgagccaccatgcctggccggttctataacttctatgatagagaatttttaaattatcaaaaaagcctgatctttcatgtaacactttgaccagtcttaccctgtgagtgttttcatctgccttctcacgctttgcatccacaagtgaaagtgcttctatttttctatgtattgtacagtaaagattttagagctttctaggccaggcatggtggctcgcacctataaccccagcactttgggaggccgaggtgggcagatcactgaggccaggagtttgagaccagcctggccaacatggtgaaaccctgtgtctactaaaaatacaaaaattagccgggagtgttggcaggtgccgtaatcccagctgctaataaggtggaggttgcggtgagctgagatcgtgccattgcactccagcctgggtgacagagagagactctatctcaaaaataaaaaaaaaaaatttttttagatccttctaataagatgaagcccactgtgtcaaaaaaaaatctaaaggttaggatatgaagtcattctgacagattatgctgtggaagaatatatatccctgttcctttcttctgagccttactttcatgttaatagtttaaactacatactatatgccaagaactttatataccttatcatatttcattttcacaaaattttaggaggttgatattactcacattaattaacaggcccaacatcacaatttctagcaagaggaagaggtatgcttttaatgcaagtctgactctgaattctgtggcctaatctgcagtctatgttgcatccacatgttttaaatgttcgctatgaattctcttgagctattatttctatctctaattatgccataatttaaaaatcagaatacttgggctcgtgtgaagagatggtgtgcctagatgtttcttcctggctcagtgtgagatatgattttgaaagcacatgatgtgcttcattacattttttaaatccatttatcccaggttaatagcttagatggcctttttttttttttttttttgagatggaatcttgctatgtcgcccaggttgcagtgcagtggcgtgatcttggctcactgcaacctccaccttccagcttcaagcgattctcctgcctcagcctcccaagtagctgggactacgggtacacgccaccatgtccagctgatttttatatttttagtagagatggggttttgccatgttggccaggctggtcttgaactgacctcaggtgatccacctgcctcggcctcccaaagtgctgggattacaggtgtgagccactgcacccggccagatggccatttctctaatgtaaaatgtgaagcaggcccaatggagggccccaagcctgtgccagaggtgaccagtctgcagccgtgccccgacatcctaacttccttggtgaaaaatgagaccactattcagtgtgctagctgtttacaaggagcaattggttagaaatgacagtgtactgaaagtcttttttttccctccaattttttacagggaaggttgggtgtggctctccaagaatacattttggtggactcattgaggaagatgatgtgattctccttgctgcagctctgcgaattcaggtttgttcaacatagctgtctgagaatcttgagtttggaagtttgattaatagttgctaacattttgcaagtggtttctgtttaccaggtacagtgttaaacacttcacacacagtgttaggcccatttgataagtgaagaaatggtgattttgaaaaatgaagtgagttgcctatgatcacatggcagtgtggggcagggacccatcctggggactgtgtatgttatcttgtgctgtgtaataaattatcccaaaatttagcaactgaagcaacaaggcatttattatctcacagtttcttcaagtcagagatttggtagtagattagcagattaggtggtatgttagtccattcttgcattgctataaagaaataccagctactcaggaggctaaagcaggaggatcgcttgaacccaggagacagaggttgtggtgagctgagattgcaccactgaactccaacctgggtgacagagggagactgaaaaaaaaaaaaaagaaatacctgagactggttaacttagaaagaaaacagatttaattggctcacggttcttttttttccccttgggacagagtctcactttgtcacccaggctggagtgcagtggtgcgatcttggctcactgcaacctccacctcctgggtttaagagattctcatgcctcagcctcctgagtagccgggactgcaggcacacaccaccacgcctggctaattttttgtatttttagtagagacagggtttcaccatgtcggccaggctggtctcaaactcctggcctcatgtgatccacccgccttggcctcccaaagtgctgggattacaggcatgagccaccgcgcctgacctggctcacagttctgcaggccttacaggaagcataacacaggcatctgcttctggagaggcctcaccaagcttccaagaatggcagaaagtgaagggaaagcaggcatctcacaaggcgggaacaggagcagagagtgagggatggtgctatatacttttaaatgaccagatctcatgagaactcattcactatcacaaggacgctaccgagggagatgatgctaaaccatcatgagaaactagcccctgtgatcccatcaccctccaccaggccccacctctaacactggggattacatttcaagatgggatttgggcagggacacacatccaaactatatcaaattgtttaggctcaggatctctcatgcatttgaagtgaagatgtcagctggggctgcagtcatctgaggcattaactggggctggaggatctgtttccaagatggcatactcacatggctgtgggcatgtgtatttcattcctcactggccatcagcaggatgccttggttcctcatcatgtccacctctctgtagggctgctcacagtgtggcagctaacttcccccagtgtgagcaatccaagggaggcaaccaggaggagtctgcagtgtggatgacctgggctctaacctcatgtgccgccacttccttttatcctgtttgttagaagtagatcactaagtccagttcacattcaagagaaggagaattgtcctcacttcttcaagacaggagtattaaagtatttggaggcattttttcaaaccaccaccacctgtgtgacctaaaggcgaaggtcatcagtgttccaccatataagctgagtgttctcatggtgctggagcctgcagcagtggtggcctctggcagtgacatttagttcatttctttcttatgtacagggtaatacacaattgaaactctttacctcaaaatgggtcattagacatttttgtaaggattataagttacatttccatcaaagccaaattttatttttatttatttttatttcatttacttataatttatatgcatacataacactactcagtagttcaatttgcttgctcttttataccaactatggaaggatggtatttggaagctgggcatccaagctgatcattcacgcagtcctatattttcttcatttttcttttctaaattggatgacgaacctattcagtataagtttatccatgtacatgatgtcttttgtgaacacttaatctatttatttatttatttatttatttgagacggggtctcactgtgtcacccaggctggaatgcagtggcacgatctcagctcactgcagcctccacctcccaggttcaagtgattctcctgcctcagcctcctgggtagctgggattacaggcacatgccaccacacccagctaattttttttttttttttttttttttttttgagacagagtttagctcttgttgcccaggctagagtgtaatgtcgcaaactcggctcactgcaacctccatctcccgggctcaagtgattctcccgcctcagcctcctgagtagttgggattacaggcacatgccaccaccacgcccggctaattttttgtattttttgagatggagttttgctcttgttgcccaggctggggtgcaatggcacgatctcagctcactgcaacctccacctcccgggttcaagtgattctcctgcctcagcctcccgagtagctgggattacaggcgtgtgccaccacacccagctaattttgtatttttagtagagacggggtttctccatgttggtcaggctggtctcgaactcccgacctcagttgatcccgcctacctcagcctcccaaagaggattacaggcgtgagccactgcacctggcctaatttttgtatttttagtagagacagggtttcaccatgttgcccaggctggtcttgaattcctgacctcaagtgatctgcccacctcggcctcccaaagtgctgggattacaggcatgagccacctcacctggcctatttattcatttatttttaaagagacagaatctcagctaggatgaagtacagtggtgtgatcttgactcactgcagcctcaaacttctgggctcaaacaatcctcccacctcagcctcccgagtagctgggattataggtgcgcatcaccacacctggattttttaatagtgtattttctcacattttcctgtttttctttttaaaatttaacaaaaacaatgaacatagtcagaagttctggcctgtgacttgaaataaccctggatgtacatttttaaaaacattctcagattcattgctgtaagtatgaagagctaatagtctgcaagggaactatagaattaagctggatcatcaagttcatgcatgcatatttaagaaacagagcagcttcttttaatactatcaaactcttcagtgcgatattgaatagttgtatatctaactagtggttttcacgttttcctttttaagaaaaacctacaaacctagttacacgtgaataaaaatattcctaatatcctcctggcttattgtgcgactcgataatcttgttttgtaacatccacaaacaatatttccatggtttaagtgtgtgccctgtcagcttttaccattctaacatgttttcccctctatccctgctgaagaacatggtcagtagtggaaggagatggcttcgtgaacagcagcacaggcggtggagacttcactgcttgaaacttcagcctctctcccctgtgccaaggtaacactggtgttttatttacactgatgtcagctcagcacagtgccttagccctagttagtcatgggggagaagcacaactcatggtactgtggttttgatggtagataagtttctctattcattaaattgccaccctattttctctattgtaaattctccaaaattaaatcataatgaatgtattactgtgttctgtcaattctaagaaggcatatttttttatttcaatgatgttttctatattaaatggcagttttttaatgatgttttaaaattaatttatattaatttaatttcaatgatgtttcctatatttaatggcagtgttttccccccccaccctttttttttttttgagatggagtcttgctctgttgcccaggctagagtgcaatggcgcgatctcggctcactgcaacctctacctcccaggttcaagcgattctcctgcctcagcctcccgggtagctgagattacaggtgcacgccaccacacccagctaatttttgtatttttagtagagatgggggtttcaccattttggccagccggtctcaaactcctgacctcaggtgatctgcccaccttggcctcccaaagtgctgggattacaggcgtgagcgaccacgcctggcctggcagtggtttttcttcttagtggtccatgaagtaatggttttaaatttgacaaaatatggtaatgtaatatttggaatatgcttttcaatgtcagaaatgcccaacacgtatatatccgcctggtgttaagggccatataggtttctactctggggataaaggaccgtccaaaccaaacattattccacgtgggaactgagctcagctttcttcagaacgatctgatagaatagtctgtgctcgtcaaggtggatattttcctcagagtgctctctgatgaggtctgagctacatattctatctataaatttggaaatataaactgtaggtcatagtctcagcttgtggtttagaatgattgggtagggatgatgtctgaatcagacagctgcattttccagcctgatgatgagtcatctgtgtctgtcccactccaaggaattggccccacccccattatccaggtgtgcataatactaggtgtgcatccccaggtaatctcatccagcaacgttggaatgcacacagtgccgaggagataaaatccctctagtaactgacactttatttatttatttatttatttatttattttttcttttttttttttttttttttgagacagagtcttgctctggtcttgaactcttgacctcaggtgttccacctgcctcggcctaccaaagtgctgggattacaagcatgagccaccgcaccggggctgactcattttttacctgataaccagttgctttatagaattgaactccatttccttggacagtcagatgaacaccctggttcagttctacccactaggagggtgtgaccctcctggacatgttttcatccctgcaatagacgaaacatctcagttatgctctctgttcattaattatataagttgcaatgaggaatgttattctttgtaatatcatccctgggcttgtgcaatctgtttcataaaatatcttattttagagttatttttgttgttataagaccttagattttaaaagtaaatcaataatttctacttacaaagtgctaaaaaagattaagatagattccaccaaattgtgtaccaaagtttcaaagtaaattcttcttgttaaataattaaatccttttctcccccaagaagaatttactttgaaatcattgatttctagacccactgggcaaagagaagcaggctgagtagtttataaatcaccccaaaaatcggatggtgtctctgtgactagctagtaaagagaaaaccttacaggtgtttgttttgttttgtttttgagacagagccttgctctgttgcccaggctggagtgcagtggcttcatctctgctcattgtaaccttcacttcctgagttcaagcgaggacatctggctaatttttgtatttttagtagagacagggtttcaccatgtttgccaggctggtcttgaactcctgacctcaagtgatctgccctcctgtgctcccaaagtgctgggcttacaggcatgagccaccatgccaggcctgttttgtttgcttgtttgttttttgagacagtcttattctgttgcccaggctggagtgcagtggtgcaatctcagctcacctcaacctccgcctcccaggttcaagtgattgtcctgcctcggcctcccgagtagctgggactacaggtgccaccaccacacctggctaatttgtttgtatttttagtagagacgggattttgctatgttggccaggctggtctcaaactcatggactcaagtgatcctcccgccttggcctcccaaagtgctgggattacaggcgtgagcctctgcagcctgccaaaagcttacacattgttcaagattaagctcttcaatttaggagattgtgggaagagagagacagaaaaaaactatggccaggaaggcaaaacaaagtaggaggctagaaaggaaaggtcggataggtggaggcctggaaaggaatactcagcggtacttgaggggggtaacctgaactcctagtttctctggtgccctttggagaagtctgggtggaggtgtgtttgctgttgcctcttacccccgggtcaggcccctacaggatcctggaggagagtctagggtggtctgaacactgagggtagattacctgcagtagctacagaaacagtcagggccaaggggctgactaaagtccactgagggggttgatctgcccaccgcaaggaggcagaccacaacaaaaataagtgttctggggtgagtgaaggaatagctgtcctctctgatgcaacctttaagggtagtcccccgccgcgtggtctcccggggttagtcttgctgctgggggaacaggtgtgccttccatctctcactctcagacacatgaagggcctgactgcccagcaaagaaatgactgagcacatgagccccagaggaaagagtccagcattacacatgctggtatccagaccactcctgtaagacgagcagtggtggccagtaaaatagaagagttcagttacgtgcccaatgactctctggagttcctacaatttcctgtctgaacttgggctcagggcactaggtccttttaccgacagttatgtaattaataaaacattttgaaatatgattttagactgtaaatagagagggggaagtgtggacacagataaaacgaaatagcatttccacattttttctttttttttgtacttaatctctaatgtgatagtaatgttcacatttttgaatagccaagagaaacatgtggccagcccgatcggagattattatgcaatgaccctctattcatcgctaatgaataccatgatggcccatacagagcattttgctctgtagtcgaatcacacttgcaggagggttttggacacattataatatgctgttcttgtctctatgccataggtgttatacttccacctggacacaattctaggatctttgtgagttttttggagttgcatttctaaaatgatacaccattttctcatacacgttaattattagcagttgtgcttattactgcctgggagaaaggaccccaaagtaattgcattgatttcatcgttggcgtgatgtgtggctgttttcactccagttgtgaccacctaagctgagaagccttttctctctttcgtattgtctttcccctcagtgacattgagatttcaagaggacaaactccaaaagctgtggatgtccttgccaaggagattggattgcttgcagatgaaattgaaatctatggcaaaagcaaagccaaagtacgtttgtccgtgctagaaaggttaaaggatcaagcagatggaaaatacgtcttagttgctgggtaagacgccatctaacatctacttgatcaagcagacatatttacaaaactcttccctatttatctctctcctcgtacccctcaatccatcctattctcacatttgacatttcgtccatttcatttggcatttctttatttggtgtgagataagtttttattttcagtgcagagcaaactagtcgactctacacaagataaagtcaaacaagttgcagtgctttatcttttgtttctcatattatgttgttattacccctgcccctccttgactttttgaatttcatttttcattataaaaatcaaaataggaattgaaagtaaactattttgaactgagcagtttgttttgtgcgttctacttgaaatattttcgtggaaaaggtacagataatcatatgaaacatgttttcctgttaatatccttgatcttacctacatattcacatttcaaaagctcattatttccctttttctgcatttcaaaactaatgttgggccattttcatttgtgttggttattttataaaagacaaattcatagtttttgtgaaaaggagtgtttgcctttttccccttctttttaaaaaaagaagtacattcactagctgaaaagatgatagaaagcaagggatttcaaatatttattcagtgtgacctgagggaacatcatgagaccatataaattcctttgctgccttgaaatttcatttcagtgactattgcttatgatgtatacaaagcttcaggcacaaaacctatttgtcaggcagagacatttcttgtaattggaattgactcctaggtaactttgtttttacgtatttaattattaatgtaagtgcttttttctttatttctttttctggttataaaaagaatgtagtttcattgtagaaatattctaaaaattcagaaaacagaagtgaaaaagtaaaacatcccaaacccaagcactcagaggaaacaactgttgacctgcgaggactgttttgacgctgatagagtctctcagccatgaggtcacactcacatgctattgtgtaagcaacctgattattcaagcatatgtggcatactgagctccatgtgagtgaatattgagctatgtcaccatttttcatgacaacataacattccatcactcacatcccagattctttttttttttttttttttgagacagagtcttgctctgttgccaagactggggtgcagtggtgtgatctcagctcactgcaaactctgcctcccgggttcaagcgattctcctgcctcagcctcccgagtagctgggattacaggcatgcgccaccatgcccagctaatttttgtatttttagtcgagatggggtttcaccatgttggccaggcttttctcgaactcctgacctcaagtgatccacccaccttggcatcccaaagtgctgggattacaggtgtgagccaccgcacctggccacatcccagattcttaaacatgttggggaagcaggggctgggggagtagcaaaatgcccaggatgagggtggagatcccatcttacacatcttctggcacctctagttccatcaataagtgctaccctggtagttctgagtgtttctaattgtccaagtgcactgatgcagaaaaataatttgaacatagaatagggatgttccacaacttacttgaccaattttctattgatgggcaatcaaagtgttcccaatttttgccattttaaactgctagaattaacaaccttgggcatgtggatttgtgcatctgtttaattatctccttaggaaaaatccccggaagtgagttcaattatttataaccacaaataaagcaaaaatattatccaaaacaggccaagcgcggtggctcacacctgtaatcccagctctttgggaggccgaggcaggtggatcacaaggtcaggagatcgagaccatcctggctaacatggtgaaaccccgtctctactaaaaataccaaaaaattagccaggcgtggtggcaggcacctgtagtcccagctactcaggaggctgaggcaggagaatggcgtgaacctgggaggcggagcttgcggtgagccaagatcacgccactgcactccagcctaggtgacagagcaagactgtctcaaaaaaaaaaaaaaaaaaaaaaaatcacctctttaatgatatagtgatttcttcaaatcctttttccctcctcctgtcccactttcctgtcctcctctttctccttctctttgtgtagcttttcttttttttttttgagatgaagtcacccaggctggagtgcactggtgcgattttggctcgctgcaacctccgccccctgggttcaagcaattcttgtgcctcagcttcccaagtagctgggattccaggcatgcacccccacgcctggctaactgtttttgtatttttatagagacggggtttcgccacattagccaggctggccttgaactcctggcctcaagtggtccgcccgcctcctccttccaaagtgctaggattacaggtgtgagccatcatgcccagcttctgtagcttttttgtaagagggacagacagccagggcctctctgaatccctcagcagttggcattgtaaggaattcatcctttgctccacaccttggttgcctgtggcttcacccttctcccgcaggcttccaggctcactgcagttagattcctgagcccctttccaacctagaaccccaaacttaatgtccccataatcgagtgtgggaaagttcctggctgaggggaggggttggctccacctgcaggcaccctctgggcccacaccctgcaaggagctgcctctggttagattggctccggggtctctgagtttagggcacagtttagtcagggttgttttatggcagtatgcttgatgcatatttgtctgcaattaataaacaaactcttggccattaagaccttgaaaaagcatttgatttgtgaaattggttcctttcttccaggcttcagatgatcttggtaggtgggtttgcaggctttctcaccctgttcagataggaacacttaaggaaaacttggtaggatgtgttgtctgtttatgaaggaagaatcctgcagcagattttcttatccagtccttgtgctttactccattttgggcttgtcaataaaatcagaaatccagatatggatggctctgaccttagcttggaacacaaaactgatacttctaaaacaaagctgtgatgatactgttttcaggttccttacttgtaaacaaagctgggcctccagcctcatgctggagaatgctagctagcacgactgcctggggttacagccaatgcagtccatggccagtagaacatttctccacgctggctttttgctagcattaatatgtataatcaagctgaaattggcctgccatgttgtaaatagaaaagaagactaaagatgaattttcaagaacagattaaacaccaagggatcaacaattctttttctgaaattctaagtttctttacctaacaaagacctttgaaggaacaaaaattaaatggcctgtctcttttttaactgtagtggaaaaaaataaccgtgctggtaagattatgatatatgtatgcatttgtggcacagcttgaagatttttaggaaatagccacactggattctataagggaagaatgaacagccccttctccccaacacaacaaatgatatattttttagggctgtaaactgtcatcagtatctaatcccttaatagctgaatattgatatcagtttagatcacaggcaactattttatcgatagcctaaagtgggcctggcatgacgggttgtgcctataacccaattactctggagactgtgggtggatcacttgaggccaggagttcaagaccagcctgagctgcatagcaagaccccatctttaaaaaatacaaacaaacagcaaaaagcagcactggtttaaagcaacatttgtaatctaaagtgaaaagtcaatttgaaataaaaatcatcttcatatttttacatttgaccaggtcaagcgttagggggaaatgactgttatcaaaccattatatgcactgttgcaacttctttaaaaatataaatgacccctccattaaatggagaattatttcctttttctaaaagtcttttctaattctgaaaataatattagcttattgtaaaaaatttaacataaagtaaaaaggagataactaggtctctcataactcaatattttatttatatattcatctttttacacattgagatcatgctataaatatcatttttgtcctgcctttttctctgaacactgtaacataaatctttttccatgctttagaagaattcaaatacccaagtaatttttaaataatactaaataacaatatatttgttattacatattttaatttatatagaaatgtgatttaaatatatcagcaatgggattaaaatataaaacaatgagatttttttaaatcttctattattaataactcaaatgcagaacagattaattcttttaaaaagccattcttcaaactttaggatttcttattcagtcagaatcatctgcatttcatcaactacatatcgcatggtatttacacctacacatcactttatttgctttgcctgacaaaatgaaaagtattgggaattgttcagggaaatatgccaaaagaatcttagggactcatgagttttacatattttcccagttacactaatgaaaaggaattttgtttgagaacttgacttggagtgcagctgcagggcatttgaatctcagtctccatcaggcctgcacccatttctgtgcagaagtttctagaatttccctgaattggttggacagagcagctaaaaaagcagcccaaactgatctgggaatagactgaatttcacattaaagaaaaatttgaatcattcacatcatttcatctttttttttttttttttttttttctgcagagggccaaatacccgattggattttttaaaaatgtttcaaccctttatttcggtacaatgttaaaataatctgacttttctatgatttggcttttctgccttgagtaactatttaaatatctgtgtgattttcttttatttgtgctacttctagaacaaaacagaggtatttagaagaaaccacttcccacagggcctttgaaccgtttacctaagtcaagtgtaatgagaaacataaccaaatgcaccatggggtttattgttagataataaaaggcttaaaaagcccctagaccctaaagatgcctgggatggatgatttatgttcatatgctacttgagcatgtagttttggagtgcatggtgaggcccatggctaatggcagtggtgctattcaacaagattctgggtctttagaatagttcaaagttttaccacttctctctggataagccatctttttgacctttgagtaaattataaacttcttttcagattgtgtccaaatggtcacaggtactttgacagtttttactgtaactgccaataagtaatactcatctttaaaaagacatcattctggcagggcatggtggctcacgcctgtaatgccagccctttgggaggccgaggcgggcggatcatttgaggtcaggagttcgagaccagcctggccaacatggtgaaaccctgtttctattaaaaatacaaaaattagctgggcatggtgatgggtgcctgtaatcccagctactcaagagggtgaggcaagagaattgcttgagcccgggaggtggaggttgcaatgagcagagatcacaccattgcagtccagcctgggcaacagagtgagactccatctcaaaaaaaaaaaaaaaaaaaaaaaaagcatcattccattgtcaacccttttttgctgttctgtgccctgaacaggtgatgtgatagcggtgcaaagagggtgagcattgtcctttacctcaacaagtgtgtggcctggtaggcgagacaggcatgtcagaatgcttatcatgaagccatctgaaaaattctagaataatcatataatcaatgctctagatatcagagagggggtacagaaatctgccgggagaagtggaggaatgtaatgaacaaaaatcacagttccatctctatgaactctaagctcccatagaaaaagaaattagagggctgggcgtggtggctcacgcctgtaatcccagcactttgggaggctgaggtgggcggatcacaaggtcaggagtttgagaccagcctggccaacaaggtgaaaccccgtctctactaaaaatacaaaaattagccaggtgtgatgacgtgcctgtagtcccagctactcaggaggccgaggcaggagaattgcttgaacctgggaggcagagattgcagtgagctgagattgtgccactgcactccagcctgggcaacaagagcgaaactccatgtgtctccaaaaaaaaaagagaaaggaagaaagggaggaagagagggagggaggaaggaaggaaggaaggaaggaagggagagagagtaattagattaccttaaggaaagaaggaaggaaggaaggaaggaaaagagagaaagaaagagaaattagattaccttggtgctcattctttcgtatatccccgttgatgatttggaatctgagctaaagatactggggggaaaactaaaccaaattttgataccaaatacaggaaggaggtgaaataagcttttttattgtagctctccttttattgctcacaataaatacttcctactttgtgattttcccgaactgtattagttggcagaaagctgagcagtcctgtgtttctaattaagaattggatggttagctggagttttgaggaggtcatctctgggcgtgtctgcttttggctttcttgggcagctatgctagcatatccttgggaatgaaaatgtaatccttcatgtgacacagtttaggtaaaccacttagtcctttgcaaacaccaaatgctcagtgcggtacttaaatgacaccatatttgatgccacagtttctttacaggctcttctaagattgtaatgcctgtgggcttttaactgcccttattgatgttgtatccaagaaaacagaaagttgactccaagcagaagtattaatatctttgtataactttcagtcttcacgttgaccccactgcagatctgctgtttagacagatgcagaggtgactgataagccggggtcatgtggcttcaggagtcttaggtttctccatgcagcggtgtcaggataggctcaccagctcctggccacagtgggtaccagcgacctccttgttgctgaatccaccgaccactctcggtcctcatcctgcttcctgcctcagtggcgtttgactttcctgttctggaaacagtctcatccttggcctccttctgagacttcctgtcatgttctgccttcttctccagggtcctcttattttttgtgtttttagagacagggtctcactatattgcccaggctggtctcaaactccctagctcaagcagtccttttaccttggcctcccaaagtgctaggattacaagcatgaaccactgcacacagccgggttctcttattttatactacgccttcttagtttccttttggactctcttcttctgacaactcattacaagcaaatgtgcttaactcttctgtccttatcccttttctcactcggtgcactgtccttgggtgatcttacccattccatgctttaaatggctatagttatgatttccatccatggagaacctggttaagtcagatggctggctttgcctcccagctctactgcttactagctgtgtgactgtcggcaagttgcttacactctgtgcctcagtttcctcatctatcaagtgagcgtacaaataattaaccccataaatatgaagcatagcacctctcctattaactgccccaatccactctcagttttatctagttaacatttattaatttgccgggtctcacctaagatgttacttcctacaggaaacattcccagatgttcaaatctagttagatcctttttccatgtaccctcataattcagtctgactgccctatttccctgtcttagtgtttgtcacatttatcgtaattgctgatatattcagatcagctggaagctcgtgaggatagagatgaagtctgactggatcatcattttgtccccagcgtctagctcagtgcctggtacatagcagtacttgacaaatatttgctgaatgaatgactcatggaattgtagggtatgatgacgcctctaaagacattctttctttgtggttacatccttaggttttgtagatcagaaaactctattagattggttgtggttgagtatccttgacaacatggctgacagtaactcatggaagaccaaactgtaaaccctaatgacagcctttaaattttttaacgatgcttgagagctaagctggaaggacgtggggtgcttatccctcgtagaaatgcctgccaatgctttctcatttggacccaaactccagatcgggagcagtcttatagctggatcagctaccaagagaaattctaaagcaagaagagaaaagcatttcaatttgggacatttatttgcacctggaaatggggaatgggctatcagaccagacttctatcctgtccaacctgccttcattcagtccttccacattgttattctgggtttggactgtgctggaaagacaactgtcttatacaggctgcagttcaatgaatttgtaaataccatacctaccaaaggatttaacactgagaaaattaaggtaagcttgggaaattctaaaacagtcacttttcacttctgggatgtaggtggtcaggagaaattaaggccactgtggaagtcatataccagatgcacagatggcattgtatttgttgtggactctgttgatgtcgaaaggatggaagaagccaaaactgaacttcacaaaataactaggatatcagaaaatcaaggagtccctgtacttatagttgctaacaaacaagacttgaggaactcattgtctctttcagaaattgagaaattgttagcaatgggtgaactgagctcatcagctccttggcatttgtagcctacctgtgcaatcataggagatggcctaaaggaaggacttgagaaactacatgatatgatcattaaaagaaaaattttgcggcaacagaaaaagaaaagatgaatatcaatatctattatatctgtgtggagtaggttttctctggtctgattttgacaaatagaagagtgtctacagcgtggtttgcctgtctgccctcctggatgctattaaagctttgttttgttgaacaatcagatgcccaactctgttgccttgtggaagatgagtaaatgcagtgcttcttaaagtggtttcttctccctaccccacacatcttttggtactaccatttggggaagccaagcaaggatagtaaattgatcagaacacagttgtgggaatttggcctgaagttagtgaaataaaactttaaagagtggaaaaaaaaaatttttaacaatgcttgtgatgtactaaagaacaattttatgaggccttacttggtaatgtaataggctctcttcaatacctaatactgtgatgttatgaacatgggaacatttggttttgcaaagtgttgtcatcaacaataagattctcaagagcagaagtttccgccatagtatgcacagggcctgtggactttttgaatatttgaaggactgtcatatggaaagggatcaggcttagtgtgtaggactccaagagctaggacacaacatgaatgcagatgccttctctctagaacaaagaacttttgaactgtaacagctgtctgtaaatgagtgggccaccccagaggtcatgaccttatcaccatctgtgttcaagcatggcagggagaagccctgggcagggatatctggaaggagaaggacaagtggggactttagggtcccttctaatcctgagagtctggcagtgccctactcacccaaggaccgttgagctaggccctgtccccaaaccataggccctgtgcccacaccctgccccaataaatggctcaggaagaacaactgctatatactcatcagcaagaaatgccccaccatcagctgaattatttaaaccattttgatgagtggttttatggcctttcttgaaactgatgttgttattagcactgcctaataccttttccttttttggtttcttggtaaaggtgtgtctgtatcttgactttagcttatgcctgtcctgtgtgatgtgagtagaccataatagcccgagaaaattaaattatggagtgcattttgaaatgagcaccctcagatttgattctggtgtcttcggctggttttgcataggttgtctgggaaatattataaaattcactttctccccccgaactcaggatcacacccacccctcttggagaagggaagagcacagtcaccatcgggcttgtgcaggctctgaccgcacacctgaatgtcaactcctttgcctgcttgaggcagccttcccaaggaccgacgtttggagtgaaaggtactgtctttaacaactagtgtacttttcagggcaaagttggggggagagaattgtaaaaagaacattgtcaacagataaagagttaagacttttcaggggacttggtacatttcttcactgcacactcagtacatagtggtcgccccatgttggttcccccgggcatgaaaaagagcagtgggagccgccagggcttcactggatgcctcaggagcctgttcctggggctgcgttgctcaaggctcccgcctcgagtgcggtctcccatttcatcagggccttctttgccaagtgatcttgaaacacggccatccatatcggtgtttgatcatcccagtcccggggaaaggtctttccctctgctttagtctcggctcattggagttgctgtgtggggcccgcagagctctctggagacggactggctgtggacagcgagtcgtgatgaaattcctccttggccgtggtcgggctgatatctggcacttccccattcattactctttcttccctgatttatcatgaaatcattccttagctcactttacagtggtggttattgctgcaattacagtttgtccttggcacttcgtgattttttaagaatattgcatttgtattactgttaaacatattaataacgtatctcataaagtactgataacgcacagagtgtcatgcatcgtgtagtggaatgaacactagggttggagcgagaaagccaaggttttggtcacagctgtgtttcctaccgccatgtgacccttggccacttgagccagtcacaacctctcggagccgcatctctaaaagtccaaaatgctgagagcggcaccaggctcacccagttgttgtgaggatcaaatgagaaagcacgtaaagaacgagggctactgtcaaatgatacacacatgggcggtgttgttctgctttaggaaagagcagtccttttactctaacaaccaacattttgagggatacgcagcatgacaaatctcacatactattatctgaaataaattgaagtttataatttactcatttgaggtggttatgcggtggtttttttgtttttgtttttgtttttgttttgagacagagtctcacttggttgcccaggctggaatgcagtggtgcaatctcggctcactccaatctccgcctcccagtttcaagtgattctcctgcctcagcctcccaagtagctgggattacaggcacccgccaccatgcctagctaatttttatatttttaatagagatagggtttcatcatgttggccaggccggtctcgaactcctgacctcaagtgatccgcctgcctcagcctcccaaagtgctgggtttacaggcatgagccacctcgcccagccacagtgtattttttttaaacaaagtttgctcagatatgaaatcatatacaattgatttagataaagtatagtcacagagatctaataataaattatcaaaatattctcatatcctggtatgttttacagtaatgacatctgctctatttttaccttttttttttaagcaaagaaacagaggtatagttagacaaagtgtcaactttttttgttgttgttctgcttggatataaccattagtgtctctcactgccttttgttacttcatcttgggtgtgacgcctctctgttgggtttggggagctgtgtcccttggcctgtgtccatcgtggcagctgtacttggtgacccgtttgaaatgcctcttgctctgttgtttaggaggagccgcgggtggtggatatgcccaggtcatccccatggaggaggtaagaccttgaagagatgcgggtcagctatcactgtgtttccttcctgacatcttgtctctgctcccatccacacaggcccacagaccctcatccataatcccaaagtcattaaggctctgaaaccccaaaatgtttgcataactcatgcagtgacaaaccctagtatttactgtgatgagctataattatatggattttgtacgtgctacttggcgtgaatattcatatacattgctgtggaaaaattatttttgattaacaggtgctgacctagcccctgcttggggtgttttacaaataaactacatgtaaatcacactgccttcctaaacttcaaaaaattcagaatcttgaaaccctgctggccttgcgggtctggatgagagaatgtgggtctgtgcctcccttgatcatctgctgtactgccaagttcacgaagacttgacgcttcccctctgtcaattcaggctctagtgcgtgcctcggcagcatagatactaaaactggaatgacacagagaggattagcatggtccctgcacgaggatgacacacaaatttgtgaagtgtcccattaaaaataaaagaccccaaaataaaagagttccagaggaaaatgggcaaaaagaactgacgttgttaattctcacttctgtaagaactccacctttgttccacataacctctttgttgcctgtaactaaccagtgaccagctcttttcagtttcactctctgcatcagccttatcattcagggcctggacaatcttccaaaacccaaatctgagcaggtcactttcctgttctgtcatttccgccgttgcctgtcaccctccagcacagcacaggaggtcctcgtgggtggctgctcctgcttccctgtccacaagtccccacctgccttctctctactgcgtcaagctccttgcagactctttttttttttttttttttgagacagagttttgctttgttgctcaggctggagtgcagtggcacagtctcggctcactgcaacctctgcctcccaggttcaagcaattctcatgcctcagcctcctgagtagctgggattacaggcaactgccattgtgcctgactgattttttgtattttagtagagacggggtttcaccatgttggccaggcttgtctggaactcgtgagctcagacaatccactggtctcagcctcccaaagtgttaggattacaggcgtgagccactgtgcccagcccttgcagactcttttcctgttctctcttggttccaggattttcccatgcctggaacattcttccttttctgtcctctttacccagtttagtcaaggttttttgtcaaggttcttctctaccccacagactccctctgtgtttacggctatctggttcagttggctgtggcgagttgcgggcctttcttgaggtctcaggtcccagcattgagcagagtgcccagcacatagtaggaactcactagaaagtacttgttgactttgttaaaggaatagaagtgtttacccatggaggtctgagtgtcagggaagctaaagagaaaatctgtaggaacttcaagtactgggagtgggggtgagaaagagtagtccaaggcactgctgaaaaaaatcgtcccaggcctcaggtcagaatggggatgggtaccattcatgagccagcaagacccagaaccaggaggccaaattagaggtggtgtacaaggggcatacacaggggaatggctcgggtttagccagcaaattggaaggacattggtgtcccgctggtttagggcatcagctgcgtggcttggaggagagagctacttttattttattttattttattttttgagatggagtctcgctctgtcacccaggctggagtgcaatggtgcaatctcggctcgctgcaacctctgcctcccaggttcaagtgattctcctgcctcagcctcccgagaagctgggattacaggcacctgccaccatgcccagctaatttttatattttaatacagatggggtttcaccatgttggtcaggccggtcttgaactcctgacctcaggtgacccacccacctcggtcttcaaaagtgctaggattacaggcgtgagccaccgcgcccagccaagaagactaccttatgagggtagagtgggccagacacactcaggcaatttgttccttgaagttgagtgcctccagtcttttcttcatctgtatcctcccagctctgagcaccgtgcctgacacttggtggatgtttgttgactgtgtgccaggcacagacaatatgtactggacggaacataataaatcaccataggggaaaatgttagaataaattccagatgggctgaggaattgaaagtgaaaacactatgactggaaggatgggaaggagccggccttgtgaagaatgagggagagcattcagccagtgggaactgctggtgggaaagtcctgaggcaggaaagggtgtggcctgttcagggaactggaggacaccagggtggctggagccccgtgggccagcgggagttgggggggttgaggtagagaagtgtgcaggcgccagctctgtcgagcgattgcaatttgtagccaagaacctggattttatttgaagtgccaaggtcagccattgaagggatcttgacagataacacaatgcagattgagttttattaaaatcaccctgtcttctgtgtgatgaaaggaccaggggcctctcagtagacacgatgaatccaggaggaagactatggaagtagcctagggaaagatgtcagtgacttggcccaggatgggggcagtgaggatggaaaagaggaaaaaacagtttaagatttgtttgctgatgtttgcaggattagatgttgggggttagaaaagaggaggattcaaggacgacatccagggtactggcttgagcaactcagtagactcatttgttgaggcagagaacaggggagtgatggtatgaggtttgaactgtgtggtgtggggtgtggtggagggtggtagtcagaaggagggagtcagtttagaggcctatgaaacatgcaggtggacatcaagtagacggctggaaagaaaaacttacattccagttgtgaaatggccaaagagttcaatagaaacatcgaaaaagaaatattaactaaatgcatattcatcttcaccaataatcaagtaaataaatctacattaaaaccactatcaggccgggcacggtggctcatgcctgtaatcccagcactttgggaggctgaggcgagtggatcacctgaggtcaggagtttgagaccagcctggccaacatggggaaaccctgtctctactaaaaatacaaaaagtagctgggcgtggtggcaggcgcctgtaatcccagctccttgggaggcggaggcaggaggatcactcaaacctgggaggcagaggttgcagtgagccgagatcatgccactgcactccagcccaggcaacaagagcgagactccgtctccaaataaataaataaataaaaataaaaccactatcagttaccattttacttgtcaaattggcaaaattggatttttcaaaatagttatgataccaaattttggcaaagaaattgaaatggactcccacacactgctgggaagtgtatgttgataaaaacacttcaggaagaagagtagaaatacatattaagtgttttaccgtgcatatcctttggcccaaataaattcatttttagtgtaccctaaggaaaaaatgaatgtatgggaaaatagatcattttaaattaaatataccctcacatagtttataacattaaaaaatggggggataataataggacatcaggttaactgtattttgaagaatctttaatgatgtaaaaatgcttgctatgttgagagtgtaagagctaaagtataaactgttacgatgttatgattccaatatttaaaagtacaaatatatatttataaaatatatatacatatgtaatttttcatgttttctccagttaacattattttatgttataaagtaaaattttaacaagaaaatatttaaccttccaagaaattaaggaaatgcagctttaaaaagaataacactttctcaactattaaattatttcttagtctaaaagttactttatttctgaagtaactgatctactactagtgttttgcagatgacacttcatctctttcaaaaagcaatttggtgatattatcaagatctcaaaggccggatgtggtggctcatgcctgtaatcccagcactttgggagtctgaggtgggcagatcacaaggtcaggagtttgagaccagcctggccaacatggtgaaaccacatctctactaaaaatacaaaaattaaccaggtgtggtggcaggcgcctatagtcccagctacttgggaggcaggagaatcccttgaacctgggaggcggaggttgcattgagctgagatcatgccactgcacaccagcctaggtgaaagagcgaaactccgtctcaaaaaaaaataaataaaataaaaatacttcatccctttcaaaaagcaatttggtgatattatcaagatcccaagggctgggcgtggtggctcatgcctggaatcctagcactttggggggctgaagcgagaggatcacttgagtccaggaatctgagaccaacctgtgcaacatagtgagactgtgtctctacagaaaaaaaaagaaaaaaaagaaaagaaagagagctcatttaacctagtaactacctcctgaaaatatattactcattagcaattaatttttttaataaaaggaaaagctatttgtgtatattctttataactgtggcctttcttgtaaaagtgaacatttggtagtagcgtatgtatccagcctgaaacttttggtacatctaccgtatacagcttctataaactatacaaaagattattatagaaaaagttttgtgaaaaacgaaacttggaagtttgtaggaagatgattctacaaatgataatcgagtgtgctcatgagactggaaggaaaataacagaatgagtagagtcatgagggtaaaatactctatttctccaaagttctgtaatatttcatattattttattgttactgtttattttatgccctgcctcactccaaagtatatttgatatgatactgttttctagataataaaacaatgaataaacgtagtgagtgactataaggagattcattattaaatgcatcagaatgttttgccttaacctgaggatggaagaatttatgatctgagtaattgctcaaaggttctttgttgtcacgtggaaggctttgaccttgattttctgatttaggcattcctatagactcagctcattataaggatatgtaatttgcatgctattttatttattcagtccttaaattccatagttgtttaaaacaaataggaagatgtcttagccgagcacagtggcccaagagctcataaccagcctaggcaacatagcaagacccccgtctccacagaaaattcaaaaattagccaggcacaatggtgtgcacctatagtcccagcctactcagtaggcttaggtgagaggattgcttgagcccaagagtttgagaatacagtgagctatgatcatgccactgcactccagcctgggcaacaaagcgagaccctatttctgaaaataaataaatagaaagatatcttatttctctagttcaaccttcacttgactggagacatccacgccatcaccgctgccaataacttgctggctgccgccatcgacacgaggattcttcatgaaaacacgcaaacagataaggtgagaaggatgccttgctagccattttgggtattgtatcctggaattcctggattcttaaggagtttgtggaaagaattctggtgtctgcaaactctgaaatgttattcaattcaattttgtgatttttacatatgtccctgtttcccaaggagaaggagccatcctttgatcagattctcaaatgggtttatgagcactgccaagttattgggagaattgtagtatgttgtaaaagccaaatattctctaagatgagtctttagttttaaagatggtaggtagaccagttctcttcattctggtcataggtccaatctctgatctgttctaaggggattggacagatgtcgttttaagactaatgttatgtggagctattttagatgtgctgaaaagatgtcagagacccttattgggcttcatgtgcttgtaggttaagagttaaaccacacccccaaaggggacagcccaccagaagctaattcctcacagatataggacatagataaaaggggtaccttctggcacattttacaacaagggtcctcactttctttaattaaagtagttccttagtgagtctttgctacataatccagatacatcttcatatggtagttgtagcgatatagatcaagaaatatatttatgcaaactctttgcaatgtgtattatttcagatcttgtcagttttatgaaaatgacagaatttaagtcaacattgtttatattagcccacaaattttaatagggtcttttatctaaatagtttggttataaatgcaatgaatttttgtcatatcctgtgaattgtccaagttcatggacaactaacttttgtgtggtctcatttttgttttgtgtttttaggctctgtataatcggctggttcctttagtgaatggtgtcagagaattttcagaaattcagcttgctcggctaaaagtaagtttccagttagcaattctttaaaaagaaaatatcatagaaacgcatcagaaagattgtcaaagcctgaaattttcaacttggtttgattttggttttcagatatccttttgggtattaaactctatagagaccgaacactggagcagagagagcacagtgttggaagcctgaaccctggttctacacgaaagagccaggtggacaaattaattaaccttttttggtctcagtttcttcgtctatgaaatgagaggactgttttgctaatttatgagtactctagtcaactgacaagttagctgggcacaggagcacatacatacctgtagtccgagctactcatgatgctgatgtgagaggtttgcttgagccaaggagttcaaggtttatagtgcaccatgatggcccctgtgaatagccactgcatgccagcctgagcaacacagcgagagcccatctcttaaaaaaaaataacaaattagaatttttggtgagtccttctctttctaaagtgaaatatttttatgaaatttgttaaatttctaggaaattataggataacctttgaaaactcatctatctcatttgtggttttctgttttgttttgttttgttttttgagacagagttttactcttgttgcccaggctggagtgcagtggcatgatcttggctcactgcaacctctcccttcctggttcaagtgattctcctgcctcagcctcccaagtagctgtgattacagacacgcaccaccgcacctggctaatttttgtattttcagtacagatgggatttcaccatgttggccaggctggtctcaaacgcctgacctcaagtgatccatccaccttggcctcccaaagtgctgggattacaggtgtgagctactgcgcccagcctcatctacgtttttgttgcagcaaacactacaattatacttgcgtatgccatcttaattcttaaaacctgtcttatcttttttctgatgccatttgctgcctctggtcttctaatcatattgcttgctactagccctgtttcagagactaaaaaataaccctaaatggtataacttaacaaccttactggttggtattaagtggttttaaaaattcacctcctgcctcttactgaaccaagttcagtgtgttgaattagtgagtaattccatcctcggcagctataacaacatgcagtttctgtttcccagatcttttttatgcttcattaaaaatcactattttgccaggcacagtggctcacgcctgtaatcccagcactttgggaggccgaggcaggcagatcctgaggtcaggagattgagaccatcctggctaacacggtgaaaccccatctctactaaaaatacaaaaaattagccgggcgtggtggcaggcgcctgtagtcccagcttctcgggaggctggggcaggagaatggcgtgaacccaggaggcggagcttgcagtgagccgagatcgtgccattgcactccagcctgggcaacagagcaagactccatctcaaaaaagaaaaaaaaaaaagaaaaatcactattttgtgtgtgtgtgacagtcttgctctgttgctcaggctggagtgcaatggcacgatctcggctcgctgcaacctccgcctcctaggttcaagcagttctgcctcggccttctgagtagctgggattacaggtgcccaccaccatgccagcgaattttttgtatttttagtagagaaggggcttcaccatgttggccaggctggtctcgaactcctgacctcaggtgatccacctgcttcagcctcccaaagtgctgggattacaggcatgagccaccacacccagccaaaaatcactttcttaagatgttttatttacacaaaataaataggaagatttcttggcttggtgtggtggctcacccctgtaatctgagcactttgggaggccaagacaagaggattgcttgagcccaggagttcatgaccagcccaggcaacatagcaagacccccgtctctacaaaaaatttaaaaattggctgggcattaaaagttttaatttttttttttctcctccataaattaggaataacttactttgaaacataggaataaacttaacttgaattactggtatttgtatttgaaaaactaaagaactgcggcatcaattatatggacagacagcagtttatgtctcttctgagcagcgtacatggtggccacatagagcagcccaaggagcccctggctaacgcagccagcagcaggcacaagtggtagttagctgtatgctgtccactgcaggacatcttcagatcaatccttttcagagtctattacgaactcacagtatcttactcgtagaagaaatctggccataggtatttgtctgacttggcctaacctataattcactcaaagttcagtttagtttagtttttttttgtttgttttttgttttttgtttttttttgagacggagtttcactcttgttgcccaggctggagtgcaatggcgcaatcttggctcactgcaacttctgcctcccaggttaaagcgattctcctgcctcagcctcccaagtagctgggattacaggcatgtgccaccacgccaggctaattttgtatttttagtagagacggagtttctccatgttggtcaggctggtctcgaactcctgacctcaggtgatctgcccacctccgcctcccaaagcgctgggattacaggcgtgagccaccacgcccagcttagttttgatttttgttttttggtttttttggagacagagtcttgctctgtcactcaggctggagtgcagtggcaggatctcagctcattgcaacctctgcctcccaggttcaagtgattcttctgcctcagcctcccaagtagctgggattacaggtgctctccaccatacctggctaatttttttatgtatttttagtagagacggggattcaccatgttggccagtctggtctcgaactcctgaccttaggtgatccacctgcctccaccttccaaagtgctgggattacgggcatgagccaccgcacctggcccagtttagtgttttttttgttttgttttgtttttgagatggagtttctctcttgttgcccaggctggagtgcaatggcacgattttggctcaccgcaacctccgcctcccaggttacagcgattctcctgcctcagtttcccaagtagctgggattacaggcatgcgccaccatgcccagctaatttttgcatttttagtagagatggggtttctccatgttggtcaggctggtctcgaactcctgacctcaggtgatctgcccaccttggcttcccaaagtgccagtttagttttttaaaaggctttaccaatcatggagaaaataaaattagagggataattttggtgaccctttgctttctgtttcttctcaaacttctcaccttttttcttcttaatcattagaaactgggaataaataagactgatccgagcacactgacagaagaggaagtgagtaaatttgcccgtctcgacatcgacccatctaccatcacgtggcagagaggtgggtgctggggagatgccagcaggctgatggccaggtggggaggcgtgttcgagccgaagcgcttaaattcagaaacttacagtttgatcctgtccagtgatcttcccagcctgtgcttcatattcccaccatttatttcagttactattatcgtaccaccctcccttatccttgcctccaattaaaacaaaaattctgtccagggtcaatcccatctactcccgtgtcttctaaatttccaaggaaaattacctaattttctcttctgtttctctctcctttggcctcttgtatctatattaagaaaaaaaaaaagaaactttttttaaagaccacgcctccctggctttgtcctgctcctcctccacccaccatcccaccttcttctgttcacttccttaccactggctctcggcagctctctgtgtgtttccagtgctggattttcctccaagtctgatatgtgctttcacccacttaacgaggcatcgctccactgcttcacatgcatccaggtggagtccccgtgagctccccaccacctcgacttccctgcttccctctcagttgtgaagtccccttccttctcccacactgccctcagtctcatcgctcactatgggatgagacagagggaaatgcactaaacaggaagttaggagccctgagtgtgtgtctcccctgccactgactcactgcatgatctcgagcaggtcgcatgcatgttcttggcgttggagatggagatggtcacatacgctgcacagaaacacggcaaccacattttatgaaccctgtgcaactgcagaaatgttcaatggcatggatccctgattcttcctggattattcttctcatacttgtgccctcatttacctctttatgctcacatttggaacatatttatcagatgcgcattttatagcagttcccgactaatagattatcttgcttccgtttccatcccccagttcagagggttcacattaacagagatatcccgttgtgatcagaggcctccagtggctccccacatcctgggtgatacagttgccatcgcagagcttggtcttcaggacacccgcagtggcttccctcactctgctccctgcctgctttctagtcagcagtgccgacctccatcctcctgccagccctagctgggccatctccatcctgtctcctgcctaggccagtgttgccctctaagatgcacccaggtctcgtcccttcagggagcttcccttctgggaatccacccagccagtccattaagaatttagtgtagtcccacaaaccatgaggtagagagacaaagaccagagactgagcgttggctctgcggtttatgggctgcacaactttggacagactgctcactcagtttcctcatctttaaaatggaatcataattccagctgccttgctgggaggcttcactgaaacataagcatcctttccagacccaaaagctctgcccacacgatcatcagaagtcactgtggtgatagctgtattgagtagagttttttgtttgttgttattttgagacagagtctcacttgccctgtcacctaggctgaagtgcagtggtgcgatctaggctcactgcaacctctgcatcactggctcagtcgattctcttgcctcatccttacgagtagctgggattacaggcacacaccaccacacgtggctaatttttgtattttactagagatggggtttcaccatgttggccaggctggtctggaactcctgacctcaaacgatccgcccacctcagcctcccaaagtgctgggattacatgcgtgagccactgtgcctggcttgggtagtttttttgagtgtctttgtctcccaaactaaactaaaatctccttggaaactttatggtttttttttttttttttttttgagacagggcctcattctgtcacccaggttggagtgcagtagtgcaatctccactcactgcaagctctgcctcccaggctcaagcaattctcctgcctcagcctcctgagtagctggaggctgtgcgccacaacactcagctaattttcgtatttttagtagagatggggtttcatcatgctgcccaggctggtctcaaactcctgagctcaggtgatcttcctgcctcggcctcccaaagtgctgggattacagacatgaaccactgcacccagcctagaaactttcaaggatacatttttcattttgaaataagtaataacattatagagattttggaaatgtctcaaaagaattttaaaaaccttgctatactaataaaactactattcatagttttttgtgtgcatctagttttttggtataactctagttataactttagtgtatagattttatatcctacgagtttcattcatttatatcataagcattttgtattttgttagctctttgttgtaatggccattttaaatactctagaatattcctttgtggatgaaccacaacttacttaagcaaggctcagttcttgaaaacaccaacagcattttaaataatggacatgaatactttaagcattttattgagaagcctacatattttctttgaaaattttttttataactaggaagatttattattaaaatgtcatcatgtccaaaatgtattgtcatctttttttttttcaaagcatttgtgattttgtgttactcttcaaaacttttttggaggtttactgatgataggaaaatcaggaaggtggaaattagtgtattttaaaccaagcatatggatgtgctaaaagagaaagttttatgccaattggtattctttggtgtctgctttggggttccagcctgagcagccatcagaaacagggcaatggcttagacatggatcttggaagagaaaggctacatcatcttttatacctgggtctggtctgcaattggtttctctctggagccaggaaggactgaagtgttttgtggttgtgaatcacttttaatggaagtgacaactttacaaaattcttccggaaaaaaatttgaattccattattgttcagggcactgaagtaaagaaaactttattgctgtggacaagctacctgggtcagaggaatttggaatgacatttgataagtagtttggctcttatgaccatgaattaataacagaaataggactcttcatcaaaagaattgagaacatttgctagtagggttttttggcttaaacctagaactaatgtaacccttgtgatgaaattggatccttatttgatttgacaactagagcaggacagtcagggtgcacggtggtgggagtgagaccctcttctcaggccatatggatgttgcgccatttaatgaccaccccttcctttcagcctgtgtacaaaatctgatgattgtttcatctttttttttgagacagagtctcactctcttgccaggctggagtgcagtgtgcgatctcggctcaccgcaacctccaactccctggatcaagcaattatcctgcctcagcctcccgagtagctgggactacaggcatgcgccaccatgcccagctaatttttgtatttttagtagagatggggtttcatcgtgttggccaggatggtctcgatttcctgacctcgtgatccgcctgccttggcctcccgaagtgctgcgattacaggcgtgagccaccacgtccagcagattgtttcatcttatgcctcataccgaaagtttaaaggcctcatgttcctggacccagagtggaacaaggaacccacagacctttccagaaatacttaacataagcagaagaaaatatagacatacagccattttgttacagagcataattttgcacagatgagcctctgcctgtccgagccccggggcctcacaggcttgccgtctctccatctccctcgcatgcccaactcctggccatggaccaagggcccacaagcctccctcagcctcagggaatcaaccatcaagtggctggttccttgccccaacaacactctagggaatcagtaccgtgtcttccactggggccgaaacagtggacctgcccctgattgaacaccttgtactgccaggctcttggccaatattggctgtttcatcagccattaggcatactgtggatgttccttaggacatagtcagcactgtagtatagtcagcactgtagtactaaaagggatggtccagagcaaaaaataagcaaacagatctcccccggctgcctccacccccacacccactggcattgtcctagcatgccttacataagaggctggcactgtcttcactatatctctgtacagctggctcgggactaggcacaagtagcccctcaatacatactccaggagtgaataagtgtttcttattccacctttagttctatcattcagagaccaggaattccattttggatcactaacttagggttactttctagtatctttcttgtgggctggaatttaaccttcacatttcttatgtatcactgatgcatcacttaccgggccatgttaaaggcagaggtgggctttggaggccactgattctagttgatcttgccagacatttttttttcttgttttctctttgctagataaaaaacagctgaatttctcttgttgattttaaagaaatttgataaaaagattccctcaatctggtgccaagatcgtgtatactacagagcaggaaagaggtttttagttgattgactttgcaccccatgtacatcttgggaagaacagtggtggctgaggatactattgaaaagcaggcctttcattttgtatatgctctgcttatagctgaaaaactcataaagaaggtttctgtgtgtttatatgagtgtcagttggtgtttgtgtgagggtgtgagtgtgtctgagagagagggagcttgttataaagactaacaacagccgagtcagggaacagccataggccaagagggcaagctggcctgctggtgctttgcgtatgaaagaaaaggttaactttcttcatcctacggatgcctatagtaccaaatacgtaatttccatcaccattttcataagtgctgtatcgtatacattgagtaaagcggatctaaattgtcaatgtggacagcttgttatttgaagctgcataaattaacaaagtcagtgtactggctttgttttgttgcattggtattcactaaaccaaacctaattttcacaaaatgtaaataactgcaattcttgttttgttttgttttgagacagggccttggctgggtgcagtggctcacgctagttatcccagcactttgggaggccgaggcaggtggatcacatgaggtcaggagttcaagaccagcctggccaaaatggcaaaaccccatctcttctaaaaatacaaaaaattagccaggcatggtggcaggcgcctgtaatcccagctacttgggaggctgagacaggagaatcgcttgatcccaggaggcgaaggttgtagtgagccaagatcacgccactgcactccagcctgcatgacaaaaaaaaaaagagagacaaggtctcacttccatctcccaaatgggagtgcagagacacaatcatggtcattgcagcctcaacccccaagactcaagcaatcctcccacctcatttttgtattctttgtagagacaaggtctcactgtgttgcccaggctgttctcaaattcctaggtgaccctcccgcctcagcctcccaaagtgctgggaggtgtgtgccaccacacccagccaataactgaaattctaataagccagtgaagaaaataaagagaactggtacttgctctattcaccattcacccccgccaccccccacaattctactttatttacttttgctttttaaaattgtggtaaaatatacataacgaaatatttttccccatttgtaagcacacaattcatggcattaaatacattcacaatgattgcactatcatcactatctatacccagaaccttttcattatccccaacaaaaactccttatccattaaataattactcccctcttctgcccctgcctattctaggtgcctgatataagtggactcatatagtacttgcctttctgtgtctggcatatttcactatgcaccatgttttcaacatccattcatgtatcaacatgaccttcttttatagccgtctaatattccattgcctgtctgtgccacattttgtttatccattcacctgttggtcgcttcctccttttgactattttgaatagtgctgctatgaacatgggtgtacagatatctgagtgtctccttttggttctttcgggtaatgccaagaagggaagttgctggttgggtttttttttttttttttttttttagagggggtctcactctgtcgcccaggctggagtgcagtggtgcaatctcagctcactgcaacctccgcctcccaggttcaagtaattctcctgcctcagcctcctgagtagctgggactacaggcacacactaccatgcctggcaaatttttatatttttagtagagatggggtttcaccatgttggccaggctggtctggaactcctgacctcaaacgatccgcccacctcagcctcccaaagtgctgggattacaggcgtgagccactgtgcttggcctctagtggatttttttgtttgtttgttgtttatttgattctttctctatgtctacccactagatggtcagcttgggggagcctgaccttttctctttcaccctctgcaacttcctgagcatcagaacaatgccagacacacaccaggtggctggtccatatttgtcgactgaatgactaatctgttctctttcagtattggatacaaatgaccgatttctacgaaaaataaccatcgggcagggaaacacagagaagggccattaccggcaggtaggtggtgctttcttcccgggtgtggctctgttcttacgttcatttctactggcctgggagctcactctttgcctttcttgtctcatccccaacctgttgtggccagtggttctctcactgttttgggtgctcagcagggctgggagaggatcagaagacatagaggctccagtgtctttttaccatcttttctatgtatgtttatttcattttctttttttcatgtatgtttccaattgtgtttccaggaagagccactcagggtattctttgaatataaattcttacttattttattgggaaccatccaggtaatactacatctgcataactgataaatgaaaatctcagacacattactcaaatttcatatatcaaagaacaaacacctagttattagacttaatagcatgaggattttttaaaggataatggcttattaatacaaaaatggcttattaataaaatacagagaatgcagaagaaaaattatgtctgacttcattgtaatagatattggatgtgcgtcaatggcacttagggaatacaaattaattcctatgatttttcatccaggcacagtgggcttctaaattgtgttgtgtttttttttcttttgaattgattataaactgtacatttaagaacagttttagatttctgtcctttatgttaagtttttattagtgaaaaaagagtcaccatactataataaccaatccttacgccaaatagacttgtgaccttttgaagtgtcttgaattaaaaagtgaatgtaggtattggattaagaagagaaacttaagttcgtggacctcgtctcctcccagtcctgtaacttacacacacacacaaacagatttcaaatatccatgctagcaaactggaatcattgccatgaagttttagatagttctgaaaaataggaagatggaattagattgatgattaaaaggacagcccaaaatatggtggacttccatccttaacaagcattcttgcttttcatgttcttagcctctcctgctaaagtgggagctttataaaagcagaggttattcccctttttatttgctgctgtgttccctatgctcagaacagaactttgttacatatagtcgtaagtgttcagtaaatatctgttgaacaaatgagtagaataagtaaaagacaatttatggatacagaactaaaatgccaacataaaaagatgttcatgaataatcataaaactgcaaattgaaacaatggagtatcatttacctaggagcttgtcaagtgaaaatagtaggtactaaatgctagtgaggatgcaatgaaatgggggcatttatgcagcgttagtgggagtagaaatcctttttggatgagtttgttattactaaaatttgaaatgacccaacaattacaactttggaactaaaaatattttaatgaaaagaacaagaaaatgtgtaacgtacaggaaaaaattctgtgtattaggatatttgttgtgccattatttgcagtggtgaaaattggaaacaatccaaatgtccaacagtagagatggttgcatatatttggtccgccattttgtcccatgggagagttgaaattaataaatgtgcgtatgggtgtcttgacatgagtagagagctctcatacaccattggaaaggttgtaaaaaccattttaaaactttgaagtaaaatactgatattgtaaacctgtttatgttaagaaaaacccagcgtgtttacttacattataggcacttacaacttatttgtgtatataagtgcctagaatgaaaagtagaaagatgtataccaactgttggcattagttgcctgtgtaataaaagcgagtattgaaaaggccctttctctgcatagttttttactgtttaggtactggagagatggaagattcacagtggccttgatttcagtgcctactctgtgcattgtattgatagttccattacatatattagcacagttcatttgtaaagctgatttgcaaatggggaaattgggatgttatgttaaaaaaacttgcccaaggttatatcttgtgttgcttcgtgcatagatatttttaagtaaaaaggggttatagtgtatttaagagatttaactgctttttatgtatcataagactgtagggaagacatctttttaggtcgataaaggtagacctgtatcttcatttttaatgaccacatcatatctcatagaggtaccatagtagattcagccatttccctgttaatgaacatgtagagtgtttgcagtttcaggctatcacaagtaagctgtagtaagtatacacatatatttgtgtgtatacttgatactatccttaggatattattccagatgtgtgattgcagagtccaagaggatacaaatttccaatgttgacatatgttttgacattaacttccaggaaattcataccgattcacatccttgccaatatcccatattggcctttgtttaaatgtgtgctaaatccctcatttgccctatcatgattattacacattgcatacctgtatcagaatagttcatgcaatccacaaatatatacacctactatatacctaaaaaaatgaaaaggtaaatactaaatcaataaatgtgtgataagctgatgaacaataatgttttcattggcatctttatatgattttgaaatattttatttgcaaaacagaaatgagcagccttccgctatgcgtgtcatttagtcattaaagtgaataacagtgatactttaattgacccagtgtgtttcattttttttatgctcaagatgtgaaattttgtaattgtaacaattacaaatgaagagcttgaatatcgattatatattattcttatttacacagttaatatttcaagaatgtttctagtctcatgttttgtacagaaaatctccatattttttagtcattttctcatatgcactgtttataatagaatggtagtatagagaaccctaaatttcatacaatgaaaaaccacttatgtttggaatgagttatattgagaatgtaataatttaatatagttgtatttgactttcaggtaatattttttcactaaatcagtgactaatgcaatctcaaccaggaagtagccagaaagctccttatttccttcctttccttacttgtcagtgacggaaatggataataaaatgtctcataaggtgatcccaccagggcacagccattctctctctgcgtaagcttgaacttgtctggctcacactccccttgggaagaagagaattaagctggggcgtaatgaagtggttctgtccagagaaacattcctagtggctgaattatgaggaggaggaagtacacattcctgtgtcccttttattccatgttggacttcgtacaacgtggagccacagccaagagatgggaataggaagtcctagaactttttgcaaaaagtctgtgctctctagctttcactactgaaagcttcaagatctgatgtggccatatcctcctgggcagctgaaaattgagtctgtgccaccagttgactgggttgccctccctgctgtgttgagatccagctctgggaaagtagcctcacatgcaggaagccagcatctttcactgccccttatctctgtgccagacagacaatgcagccttcttgacagacctattactaacaagggaggtggcccgtaggctagtcattaattcatctgatgcatattgtatgcctactgggtctcatgctccgtgctggggattcagaagtgaacctgcctaatatagtccctgccgtcatggcacttacggtccagtggtagactgataatgaccacactagactgataatgacattagtaatcaattaagtctgagacatgctacaacagcaaaccatgtggtagtgctgtgagcgggtgtaacaggggtcctaactcagcccaccctttgctgagcagagcatggcaaagagcacattccgcctgggaggccaccctagggagcaccaggcacaaaccctgcatggtccagacacgcagaaaactgatgggattgcatgcatggccttttgagggtagactctctgggcctgtggttgcttcatggctgaagtccagctccttgtgggaatggccatcccactggcactgtcgctgaccactacctgtgtttgggctggttcaggcgcagtttgacatcgcagtggccagcgagatcatggcggtgctggccctgacggacagcctcgcagacatgaaggcacggctgggaaggatggtggtggccagtgacaaaagcgggcagcctgtgacagcagatgatttggtgagtgtttccaacccggaagcttcagggagtggacggtcctcgttcttcgttaccagaaaaagaaaggttttcttccttttatcagtgagtgtaatgaggatacagaaaaagtttccacacacacatttcttccccgacaagcatgtttgcctgactgcttcctaatgttctcatagtcatatatgacgtgcttatgcctggctgcaacaaaaacatgtgaaatttatttcaggagctttccaccatccttgccaatcctgatctctgcttctgcctgggctggggaggagtcacccccctgcagtcacttggtgacttttaaaaaatgtaccttctatgcctgcctgaaattgagggcaaatcacctttccaaggaacagaaggaagtggctctgcttccatgaacaggaagataaagttaaaattggcacatttctggcaccagcctggcttattatttaatttggggccctagatttgggttttgtattataaaagcaaatctctgcctcaatcagtcttgcttttctagttcccctttgagtagttgtggtgctttctgtaaagcttccatggaacaccatttccttttttagtgctttttctaattggcatgctagtcttcttttcttcttcgtctttctggtataataacaacctttcctgttaacttttttttttttttttttttctgagacagtctggctctgttgcccaggctggagtgcaatggcacgatctcagctcactgcagcccctgcctcccggattcaagcgattctcctgcctccgcctcctgagtagctgagattacaggcgcacgccaccacgcccagttaatttttgtatttttagtagagatggggtttcaccaggttgtccaggctggtctcgaactcctgacctcaggtgatccacccaacttggcctcccaaaatgctgggattacaggcatgagccaccacacctggccttttccagttaacttaaactccacatattccataggtgttttgtttgcttgcatttttgtatataagtgcatgggtgtggacacaggcctctaagatagccattactccaaatttaagtttactttcccatatactgaatctcctacaataatggaacttaaaatgcacactggtgattggtaagcagttgtgaacagagagaggcaaagtcatattttattaatttcaagggcttagggtataatttgaattctttttcaaagtgtccggattgtttttcagctgcttttgaagaaatgaatctaactcatctcagaagtcttgtcaagtaaattcaatagatcaacgtatgtcgcagcctatggaatacttagtataaaaattgaagagaaaaccctcaggttgctataaaagtgctgctttattaaaattaccaaaatctcactatttctatctaaactgacatactacagtttctgtctaaatacattgctctgtattttattaatttgtatggcaataaatatgtgtcaggaacagttttaaaacttaatcctcaaatactgcttccttaaatctatttatttatttttatttatttattttgtttttgagatggagtttcgctcttgttgcccaggctggagtacaatgccgtgatcttggctcactgcaacctccgcctcccagattcaagtgattctcctgcctcagcctcccaagtagctgggattatgggtgcccactgccacacccggctaatttttgtatttttagtagagatggggtttcaccattttggccaggctggtctcgaactcctcaggtgatctgcccacctcgacctcccaaagtgctgggattgcaggcatgagccaccacacccagcccttaaatgtatttttgtgtgagtgtatgataaaaatcttggatctggaacaaacccaaagattactctttttagttacctttttaaataaactctttatttatctttttaataaactctttttagttatcttttgtgtttcttgtttgcaaaaagtacctaatttattaaattgtgcttcatccagtgggagctattgagagttggccacccatagaaaattgagggaggattttaggaactgctgaaggtttctgccacatgcatgattctgatataccctggaagaatccatctgagccttccccacatggacacagagtgtggaatgctagcagcacacagagggtggcagagcttgccctgcacgtgacagcacaggcgctgagatgtgtcccagaaaaatgagcaggtagaagcctacctgagacatccaacagaaacatccctcttaacttccttcctcctttagtgttttgaatcagtttatttggttgggaagtgtaagcaaggatagtgtacagagaagtaggaaaactactcctcttcttccacctgctctgcattagcacaacaggacaactctcactgagccttcctgtcctgaagatttcttttttcttttcttttctttttttttttttttttgagatggagtcttgctctattgcccaggctggaatgcaatggtgcaatctaagctcactgcaacctccaactcccaggttcaagtgattctcctgcctcagcctctcgagttgctgggatgacaggcacctgccaccatgcctggctaatttttgtatttttagtagagatggggttttgctatgttggctaggctggtctcgaactcctgaccccaggtgatccacccgccttggcctcccaacgtgttgggattacaggtgtgtgccaccatgcccagcctgtcctgcagctttcaaagtgaaccatcttcgtgtatgtataatgagtgggttgcattcatatcatgtgtgttttatacactgaggtagattccagttacgtaggaatatagttagtaatagtgtattcctgaaaattgctaagagagtggttataaagtattctcaccaccaaaatgataactgtgaggtagtgcatatgttaattaactaggtttaatcattccacagcatatacttcaaaacatcatgttatacacaataaatacatacagttttatctgtcaatttgaagttaagaaaatagattggattttcttacaccttttaaatgattaaatattataaaaatagaaaccaatcacatgagagaaacatttactactgttgttgataaaagtacggggagaatgtaacgcactttagagtgaggaagattctctggattctaccactgcatctgttagcgccatggcatactgtggtaaaatggcactgttttccgatgctatgtacagcaagggatagcgccctgttttccccccctagagctaccgttacaagcatttgcttatgttatagccttccaataactaatatgttgaaaacaccaagacaccacttaaggtctttacaaagtgagaaggaattgggaaaaaaagaaacaaaggccgggcacagtggctcacgcctgtaatgctagcactttgagaggccgaggcaggcagatcatgaagtcaggagttcgcgaccagcctggccaatatggtgaaaccccatctctgctaaaaatacaaaaaaaattagccgtgtgtggtggtgcatgcctgtagtcccagctactggggaggctgaggcagaagaatcgcttgaaccctggaggcagaggttgcagtgagcctccagcctgggcaacagagagagattccgttctcaaaaaaagaaagaaaagaatgtgaatagtgacatcacattaaaaaataataacaaactttagccttgtggcctttttttggcacatgttttccgctagttctcatgcatcatccctattctctctcttctctgtcttttcttcatccaggaacagagaaagaggacttagaaggaactcaacccagtacttcctaggattggaaggaagctgccttatttcatgtataagtggcaccagcttgactgtaggaagagagatagcgtgaagcctttcagatctaaactagaaagcttttaaacgtggtagtttgttgagttattctctctctgtggaatgaatgatgtagagatggtgagaaatcagagtgggtgattttagacatttccctttaccctacttcattcctgctctgtacagagccttgtttctgttcttcaccttatttctttgagcaagagtaaagcctctgattatgaaaatacactgtgcataaatagccagaaaacacattttcttgcaatgaaagatttgttttatggaaaatctcataaacaccatcaaggaaggttttggaagaaggtcaaatgtccttcaaaatgctattaccccatcaccattcacatcttagtgtgactgacatccgttctcagctctggtggggagaggtggacagagacagcagcactgtcccctgtggcccagggttgcctgtggggacgcccacccaagaagcaggctggagagaagtgccaaggggttaaccattgcctggatgatattttgtcaggaatctaatgtttttctctctcctgtagggggtgacaggtgctttgacagttttgatgaaagatgcaataaaaccaaacctgatgcagaccctggaagtaagtggttttcttcttatagtaattgtttgcattaactggattgccacccaatgtgaacatttttagccaatatgaggcaggcatagagcatgcctggggcagcagtgtgctttgcaatctcaggcagaaagagtgaggatctggttaggaacctgtattagtccattttgacattgctacaaggaactacctgagactgggtaatttatgaagaagcatcagaataacttcttggccaaccaaaaaaaaaaaattttaagtgtattcatagcttctttaatataagtcatgtcttggcttaattgacccgagtagaaacttagaaagtcaatgtctgaggccaggcgcggtggctcatgcctgtaatcccagcactttgggaggccgaggtgggcagatcatgaggtcaggagttcaagaccggcctgaccaatatggtgaaaccccatctctactaaaaatacaaaaaaattagccgggcattgtggcacacacctgtagtcccagctatttgggaggctgaggcaggagaatcgcttgaacccgggaggcagaggttgcagtgagctgagatcgcaccaccgcactccagcctgggcgacagagcgagactccgtctgaaaaaaaaaaaaaagagaaagtcaatgtctgtctaacatttcaataggttgtatggccatgtttacaatttattttctgtgttcccttaatctctcataatcattgagttgtggattttttggtttgcttttttattgttgtttgtttgtttccaagcaaaatacaataaatgccaaggctttccaggaaagcatttgccaaaggcaagtcaataaacacacagcatgttagttggtggtaaggtctggagaagaaaaatcagaggtcatgaggggcagagtgatgtggggtatgtgtgtctgtgcctgcccgcctgttaaagcagtaccagcacagagctgagtaaaccaagggggtgagccatgcacgtgtcttgaagaacatttggacagagggttacctttagtgcaggggccttgggcagcaaggtgttttgcaatttcagacagcaagagcgaggatctggttaggaacctgtattagtttgttctcgcattgccgtaaggaactacctgagactgggtaatttaagaagaaaattggtttaattggctcacagttctgcaggctgtacaggaagcatggctggggaggcctcaggaaacttatcatggtggaaggcgaaggggaagcagacaagtcttcacatggcagaacaggagagagagggcgaaggaggaagtgctacacacttttaaacaactagatctcatgaggactcactcacaatcatgagaacagcaagggggaaattcactcccagaatccagtcacctctccccaggcccctcctccaacattgaaggttataattcgacatgagatgtgggtggggacacagagccaaaccatatcagaaccaatatgacagaaatggggggattggccaggcacggtggctcaagcctgtaatcccagcactttgggaggccaaggcgggcagatcccttgaggtcaggaacctcgagaccagcctggccaacatagtgaatcccatgtctactaaaaatacaaaataaattagctgggcatggtggcacgtgcctgaaatcccagctccttgggaggctgaggcaggagaatcacttgaacaggaggcgaagattacagtgaactgagattgcaccactgcactccagcctgggcgacagagtgagcctcttatcttttaaaaaaagggaatagaaaaaaatggggggaccatttctgaaggtgcccagtgaggatgcagactgcaggtgtcccctgagctgaggaagggaggactgaacgcctttgaacaggtgtctgcagccccgggggaggggtgcaggatgcacaggtgccaaggccacacccttctgcggcaggttgtccttcccgtctttcctctcccctgatcattctgccagcaggcacgtgtcctcagaggtaggccatcttaaaaagcaaacaaaaacatttcaaaaacctcctgccccccctgcatcctcatctagcttctgcccagctcttgtctgtcactggggtctccatgttaactgacctcgggttccacctctcctgactgcccttgtccaggtcacttttcccttggagacaccaagtctttgttgctgtgccctcctcagagaagctcagcagagtttgacacagctgcccttgtcttccttcaggagcacctggttcctctggcgtctggggtccccccctccccaggcctgctcgctgctcctcctccgctttgctggcttctctgatgacccctcaccttttttgccccgttctcctccagaattagccaggtgatgactcccaaactcttgtttggaatatcatgcacctggaatttcagacttgcaggtatagttaccaggagccacgtgggtggggaaaagccatttcaaactgatacataaaccaggacccacctcctacctacttccttccagctcgctgcttccctgaaaccttcccagtcattcaaggcagaaacccgaggatgatcctagaggcctgttttcccttcccctcttcctgtgtccatccctgcagagttgtccttggttacatgactctgccctgtccacgatgctcaatgcctccctccttcctgctttagctgccagcacgccccacctgcacgagtgcagcagcctcccaaccagtctctctgctgctactcttttcttccaaaatactctctcctcagcagccacagagactgaaacctaatgaagccctgttgccttcctacttagagttcttccatgatttacccatgtttccaccccggtctgaaaagccctagggatctggctctcaccccttcccgctccttgtcccttatcctcatctctcatcctctgggggacctttgcacggctaacaccactacctgggccacttcctgatattctcatgtccagctccttcgcctccctctgttctcatgtcatgtaagcatcagctgctcagagaagccacaggaatgtgcagcccccgtccctctgctgtcattgcagtacatggcacagaatgctgagagcttcctatttccttatctgttttctgtatttctcctcccaccgagatgacagcaagaccttttccatcctgttcaccaccgtatctccagcttctagaaagtgcccgacacctattagaggctcagtaaagacttgttgaataattaagtgaatgtttattatttttactacattctcctaaaaatacacatttattaataaataactgaataagagaaaaaatacgaagtgatgtgatattccttcataacacttctccctcaaagatgaatacttattattagggataatcattttctttattgttgttgtttgttttgttttgttttgttttgtttttttgagacggagtctctccctgtcgcccagcctggagtgcaatggtgggatctcggctcactgcaacctctgcctcccaggttcaagcgattctcttgcctcagcctcccaggtagctgggattataggcgcctgccaccacacccggctaatttttgtattttttttttaagtagagatggggtttcaccacgttggccaggctggtctcaaactcctgacctcaggtgatctgcccgcctgagcccccaaagtgctggaattacaggcgtgagccaccatgccccagccaggataatcattttcttgttttaaataattctttttttttttttttttttgaaacggagttttgctcttgttgcccaggctggagtgcaatggtgtgatcttggctcactgcaacctctgccttccggtttcaagcgattctcctgcctcagcctcctgagcatctgggattacaggcgcccgctaccatgcctggctaatttttgtatttttagtagagacagggttttaccatgttggccaggctggtctcgaactcctgacctcatgatccacccacctcggcctcccaaagtgctgggattacaggcgtgggccaccacgcccagcaaatttttgtatttttagtagaggcagggtttcaccatgttggccaggccagtctcaaactcctgacctcaggtgatccgtctgcctctgcctctcaaagtactgggattataggcgtgagccaccgtgcccggcctgagcactttttaaaatataatctaaacctgttatttctgtgctgcctaataaatcagagattcagaacccttaaaaagcaaataaaagtaagggcaataagacctgctgaggctgaggcaggagaatagcttgaaccggggaggtggaggttgcagtgagcagagatcatgccactgcactccagcctgggcgacagattgagacataaaatagactgagaccctgcctcaaaaaaaaaaaaaaagagtcctcaaactgttcatatacaggactgggcttgctagggaaagaagggggaattcttcagactactttacaaggacacaagaactcctcaacctaaacaaagtatgaaggtacatagacaagtttcttgtaagtcggaaaacagagaaatccacagtaactataatacatcccttaaaggataagcatgcatttgtaggaagcaaacaaagctttccatagagaaaccacttccaccagatgattatatggacttgggttttgtttctgcatctgtcacttggcaaatgaagataccatcttcaggatgttccgtgtcatcgatttcatttaaggcataggctgttttaagattactttaaaagatatggacctttttacaaaataaaacactgcattcacttaaaatatttgcagacgtgaactcttgtaccctgatcctatgttgtcactctgggttttatgtatctaatcattgactaggaatctatctcagcagataatccaaaaatctagtttgactagttggtagattatgctttcccgctcacatctgaacacacctggttgttagtctggtaggaggtcatcaagggccacatccttacaggttgccaggagaccagtagttcttaatcctgactgcacttgagaagctcctgggaaggtttaagaatattgattgattgatgccgggctccccatcagacccagtgaacgtaatgtctgaggataaggcttgggtatcatgtattgccagactgaggaagacttaagacaagaaaacagtgagagctgttaacattttcccacaggttagccgtgtgtggtgttgatggaaacttcacatgcgagagcacactgtccaatatggcggccactggacatgtggccatttcaatctaaattacctaaacttcaataaaatttggaattcagttcttcagtcattttagccacatttccatttatgcatttatttgtttatattttactgttcatatttaagtgcttagaactctggtaaactaacaattacttgaaattacttgaaatattaatcttatgaaatgtttgaaagggccattatggagaatattcatagcaagatagttcctgccttattttcctgagtgttctgcatgtaaaataaaacccagaactcaagataaatgtgtgtatgcctttgagttagtcatagaattttttaagcaacatgtttaatttgatgtactgtatcttatagctatatccatgtttgagtgtgcaagtgtgtgtgtacctgtgtttggaaatctaacaatgacattccaatatttttttctcaccaactccatactgggagttttaaaaccagagccctaatcttgacttaattattaatttcctccgtggccctgaagaattcccttagcctctctgggccttaaatttctggataaagaagttggctgcttcgtgctctcaacattatctgattctgtgatttctagctaaagctacatttatacaaaaatataaagtgcttttgcaaagtaaagagtagaatagtggttatcagaggcagtgggggatggagaagttgaccaaataatacaaaattccagttagacaccacctgtgtattcataaacatgtgtccctaggttttatttatttatttttatttattatttttttcatttttgagtcagagtcggtctgtcacccacactggagtgcagtggtgcgatctcagctcactgcaacctccacctcccaggttcaagctgttcttgtgcttcagcctcccgagtagctgagctgggtttacaggagcacaccaccacaccctgctaaattttgtatttttagtagagacgggtttcactgttggccaggccagtcttgaactcctgacctcaggcgatccgcccatcttggcctcccaaagtacggggattacaggcgtgagtcactgtgcccagccaattgtaatgatttttatggttaccttttcttgaatggaatcatttcttaattaaaaaaataaatataccttttataccatcagggtttaatttcattcttttaaaaaaatatagtgcatggcaacataaaataaggtaaataatttatttcatggtcattgaggcaactaacaaaatggtttaacaatattttggaaggaagtgactgtattctcacagttttgtctctcaggttcagcattaaatgtagaataacatttttctagaatccggagggaatttggtcctttgattgagtcagggtgttttgactgtctttgaaatattttatgcattaaatatgcagtattcataaaagctttcctaccccatttgccccaaattgatcttggtttccatgcttctgtttgtcttttgggattttgatttgctttttcacttctctaggggacacctgtgttcgtgcatgcgggcccttttgctaacattgctcacggcaactcttcagtgttggctgataaaattgccctgaaactggttggtgaagaaggatttgtaggtaagttatttcttttaaatttagttgttgtagaatattgaagaaatctaaaagctgatgactggaatggagtgatatccatcctgacatgaaacatattctttcaggcaccctctttcatagagggtctcaataatggaaaagccctaaggtctggtctatactcgtgaaattatgcttgtgcttgaatcatagagtctggtatcaagtacatatgggtttgagtataaactctgactcttgcaaactgagtgacattggacacattttaattactactgagcttcggttttcttgtgtgtaaaatagtgataacaatactgtatcaaaccttttagggttgttatgaaaactgaatgagatattttagtcattcagcaaatgttttttgagaacctaccacttagaaggcatgttagctagggatccagtggtaagcaaaacagataggcgcagtggcacatgcctcgctactcaggaagccgaggcaggaggattgctcgagcccaggagtttgtgtccagcctgggcagcatagaagaccctgcctctgtgaaaaaattaaaattaaaacaaccagctttagcccctgctcctgtggagcgtactgtctaatggtaattgaataagagaaagtgctcattgactgtcagccattactacccttactatgtagtactgataacttgaagtcgtgggtttatttccatgtacagtttctccttgttttttgtgagctaatataggagagattcccaaccagtagacttagaaatgttaattggtagtactgcacaccttttgctgctgtcaagttctttgcagaacctgttcctctttggcttttcttgcatattccagctagaaagaaggggcaactctcatagagtttactaagtcagtgccagccccagtctcacccacaatactaaggcagcaaggaaacaaaagacaaaaccaaaacacaggcattcatggaggagtcccttaatctgacatatgagggactgcattggcagatttcccatgctaacaagtaattcccattaaccacacgtatacctataatcggagacagcaatctcttctttcactcttatcatcagctttggatcaaactcaaaagagttattttattagaagagagtgtgctggacaaaagaacttggcactgcattttatgctcagacatcacaaagttcattcagtgttattgagactcttttaagaattccttgtggactggcagtcaggatcagatgaggcttggtggagctccactcctccatgatctgttttctgcagctctcatgtactttgctccttcggtagcaaatccactgcaagagtggctagacatgctgtctaagtggatttgctcaattgatcgctgcctaattgtagagctaatggacgaggaggctgggtcagggcgggcactggaaagttgggtgcttaagtgaagtggtggttctgatgcatcagctctgcaaataaagtagcttctagaaggaagcactctattttatgctgacagagatctctgcccataccagttcttactttgtcaaacacatatttataaaatacatgttatcatggcagaatactttcaaagatataaactgatgatgtatgcaaagcaaacgagccctctgtgtgaccttgaacaagccattagcctctctgggtgtgtcccctgtagacattctcatctgaaaaatgagaagttggaccagatgaggagttggatgtggatgtgtagccgtggactcagagttagacactgtggaattggagccctgactggtagtgtgttttcatttctctagggctcaattttttatttaataaaaagaatacttctgtattttaatgaataggatcaagtgagaaactgctttgtaaaatatgaactatgttcaggtcagcaattatactaattctttctatgatctcatctagtctaagatgccgtaagtgggggggtttttcatgaggatgaaatctgtccgttgccagatggttcaaagggcaagccctaagtcagaggttttacctcaactgctttcaagtcacagataaccttgggcacatgaacccttctcttccttggtttccctacctgtaaaatagggctttggatagggcttccctctcgaaaggacttggtaggtttgaaatgaggcatcaatgagatcatggggttgagtcctggcacctgacacatggtaagactcaatccttcttggccactcctggctgtcattgttacccccactattgatacactactgatgaaggttacattttcttttttctttggatctttttattttttggatgattttatttatagttgttataaaatacacgtaacatgaaagttaccatcttcaccatttttgagtgtacgttcattagtgaagtacaccttcattgttgtgcaaccaagctgcagaaccgaagtcccatgcccattaaatattcctcattctccagcccctggcagtgcccttctactttctgtctcaatgaagttgactcctggataccccatgtgagtggaatcatgtagtatttgtccttctgtgactgacttatttcacttagcataatgtcctcaaggttcatccatgttgcagcaggcgtcagaattctcttccttttttttttttttttttttattttttgtgagatggagtttcgctcttgttgcccaggctggagcgcaatggcacaatctcagctcactgcaacctccgcctcccaggttcaagcgatcctcctacctcagcctcccgagtagctgggattacaaacatgcaccaccacgcccagctaatttttgtattttttagtagagatggggtttctccatgttggtcagtctggtctcaaactcctgacctcaggtgatccacccatatcagcctcccaaagtgctgggattacaggtgtgagccaccacacccggctagaattctcttcctttttaaggcggaataatattccatcgtatggatagaccatactttgtttatccactcatcctacattggacatttgacttgtttccacctttggctcttatgaataatgctgctatgaacatagatgtacaaatatattttaatgtctaaaaatcgtgctctatgatgtctaaatatgtgatggcaatgacttatattcacaaatacgtaccacggaactctagccctgtaatgttgaactctcccgaaggtggtgtgtccatgctgtggctctgttggaatgctggtggcaaagccagtgtattgcacagtgggaacggggtgtggtcaggagacagtgttctttgcccattgcttggtcaagcctgcactgtggggctcgttcattccttgcccttggatgaagtttataatagttccctctcattctcagttaatatctagtccctctaacacatatattttttaattcctctggtcactttcaatcataagaatagcccctaaaattaaaaatgcatatccagttgtatatcaaaaccaaaaactccaaatgtcactcagatttgagctcctctcctcccctgtctgggcctcctctggctgacagtgggaaggggaaggtggctgcttgcttctctgccacccttgtcttgcacttaggctcgccctggcccctcctaggttgaagctttggcatgaaatggtgcccatgtagcctctaccagcagacgtcctcacacttttggcagaagccccctgagcagtacctcatttagactttcctacctctgattccacacctggtctcgggtaccacagacctctgacctctggctggggacatgccctgagccttgccaactggtcttctggtcctcacttgtggcttaagggggaagcggggacgccaaggcgggtggatcacctgaggtcaggtgttcaaaaccagcctggccaacatggtgaaaccccgtctctactaaaaatacaaaaaaatttagcagggcttggtggcgcatgatgtaatatcagctactcaggaggctgaggcaggagaatcgcttgaaccccaggaggcagaggttgcagtgagctgagatcacaccattgcactccagcctaggcaacagagacagactctgtctcaaaaaataaaaataagggggaagcagcttcgcatgctcttcactgggagctgggaggggagctggatgtggcacactgataactttctttgaagaaattctttcccaggttctaacccgtcaacccttttgaagcctcaatgggctaaggcatacaaaatctatttcaaactgctttgcaaaccctcccaggtcagccagcaccatcctttggcatgtgagcaaattgacaccaatttgaggcccgaaacaaaagtgagacaaaaagacgttcatttcaacatccttctacagaagttaaatagagtaggcacatctgaggtgtatctgaagtctgagcaggaattcatgttcttcaaaaagttgtcgtttatagtagactatctttatgacctcataatagggaaggatctcttaaaatatgaaaagctcaaaccatagagaaaaatgtcgataatttggcctgcattaagaagtaaactgtatgtgataaaagatacaaggataaaaaacaagtgacagattggaaagaaacgtttgcaaagatagtagacaatgattagcattgagaatatgtaaaacactaaagactaaagactgataagagaaagacaaataatccaatacaaaaatagagaatttgaaaaggtgattcgcagcaaatgagcaatttggtggaatttctaggtagaactgaaaatgaacaaatgatttagcaatttcacttctatgtatactctggaaaagaagtagtcaaaaatatatttaagtcctttgaaataattgacttcagtacccctttaatgagcatttattaagcttctgctatatgtcaagtactatctgctaggagctgggaatcaaatatgaataagacaggtttcttgccctccagtaattgatgatgtgctgtgagagacaagaacttcaatggtaagtacaatgcacttgattaagtactatattagttaaggttcttaactaagaattttaagggatgatgggcatctcttagatagaactgtctccatattactggttttgctgatttagtctaatttttgttctaacaaaaagcacacacaaggaaggaattattttgtctattctgaataattagtctaagataatagaatcagtagtccatttagacttaaaacagagtgacatttattttaaaaaagcatgaatttgcaaaacactttatgagaatttttcaaaaactgctgtgatcactgttgtggctgtttcttccgttagtcagcagtcctcatgggagttcacctaacttccatttacatgctgtaaaggcaaacagatatttggcatcgaattctaatcatgtattacatttaaaaaataaagcaaaaggaaagaaagaaaggaaaaagcagtattgagttcctggattttaaaaacattattatctcatctttaaactatttgtaggaatttcaaacttacccattaacttaggattttttaatttgttttctgctctctcagttggttttgattccagttttcagataaagatcttgtctttgcagaggagtgcagaatgcaattgtgtgtccttataggcaggtgtcattaactgagggtcaccagccactggtggactcctggatagacttcgatctacaactctgtcccataattaaatataggttcgtgcatatggagacatatatatatacacctttttttttttttttgagatggagtcccactctgtcttccaggctggagtgcagtggcgtgacctcagctcacggtgacctccacctcccaggttcaagcgattctcctacctcagcctcttgagtagcttggattacaggtgcatgccaccacactcggctaatttttgtattttcagtagagacctggtttcaccatgttagccaggctggtctcgaactgacctcaggtgttccacccgcctcggcctcccaaagtgctaggattacaggtgtgagctgccgcacctggccaccttttttttttaacctggagaaaattacacaattcttggattctcacaggggaccatgacataagagagagaaagaactgttggtgcatatctcaaagcctagctctactttcgacggtagctttcgatgtcccatacacatttggcatttattatccttatccagaggtgcttgtcaagaagctacctaattgattgcaactctgctgcttgctctctgtagagaatcacacagacctggctgtgttccccaggtgcttcctgggtacatgagcataaacactcatgcagcagaggagaaatatgagacaagtgcccaattaaaacacagggtgatctttgcctcagacatttcaggattaggatttagaaatcagaatgaatcgacttagcagttccaagacaaattgaatgggattgggaaacaaagccttgttaatattttcattaaaaacgcccccgtttctgagccattcctgagcattagaccggtgctgagactatcatataccttctcactcaatccttaaaaccgtctgtgggatcagtgttactatcctcatcttacagatgatgtaacagaagcttagcaagatgatgatacatgtccacgatcaatcagagagtaagtgacagaggacgtgacctgagggctcctcctcgccaaagcttgtgggtgatcaggcggctattgtgctcagtgtttttctcaatgctctttacctggttgccaccctctcccattaaaaaataattttagctgggcgcagtggctcactcctgtaatcctagcactttgggaggccgaggtgggtggatcacttgaggtcaggagttcgagactagcctgaccaacatggtgaaaccctgtctctgctgaaaatacaaaattagccgagcgtggttgtgggccctgtaatcccagctacttgggagggtgaggcaggagaatcgcttgaacctgggaggcagaggctgcagtgagctgagattgtgccatcgcactccagcctgggcaacaagagcaaaactctgtctcaaaaaaataagaagaattttgggtgagctgtctacagcagatggtcacagttacaggaagtaccaatataactatattgtaccaatatatcgtaatgtgcgccaacagtggtggtcctttttggtcctttttttcttttctgtgttctactttaacatttcttcctcccaagtaggttactgattgaagatgaccttatcgagtcccactgtttccttgctctacctctcaacctgtatttttgggggacagttttttaatttttttattttccttttttgagacggagtctcactctgtctcctaggcttgagttcagtggcacgatcttggctcactgcaacctccgcctcccgggttcaagcgattctactgccttagcctcccaagtagctgggattacaggcacgcaccaccatgcccggctagttttgtatttttagtagagatggagtttctccatgttagccaggctagtctcaaattcctgacctcaggcgatccactcacccctgcctcccaaagtgtagagattatagctgtgcaccactgcacccagcctaggggacagttttataatcagtcttcttggccttcagaggactctgctggtggctatacccagctagtggcttgttctctctttccacttttattgccctgaaattctaaatattccatcattttggtagaagaaaaccagaccaaactaaacattctcatgatttcatccaccttttaaaaaaaaaaaaaatctgacgtcaagtgatcctgcagctctaagctgtaattctcccagaccttgccctgtttacattatttaaaaacactgatctcagcctgggctccacttttgttattatgatgcttccaggttttttgtctttagtaaatttattcataattaaatcaaggttgagaagtgctggcttattagagactctggctgaaggtcatgtgcgaactcaggaaactgctaatcacaggtcgtgtttttcagcccctgtcttcaggaaggcttaactctaagggagggttgttttgtgtcatctccagagctctcatttctcctgtgtggcttggtgccgaagctcattcgtcccctcgctgtctgttcggcccttgtcctacctcccctttctctttccacgcttttgtgtaaagtagccctctttcaagctgctcctctgtcctttgaaaacaaatgaaaaagcaaaatgttcttcatatacactaaacaggaaagtatgcaaagtaatgttacaaacacccatgttcccaccactctgtttcatcaaaatcttaacatgtcgctgtgtgtcctttagattttttgtttttttaaagagatacgtttagctgggcatggtggcgcatgcctatagtcctagctacttgggagtctgaggcaggaggatcaattatgcccagcagtttaattctcctgggcaacagagtgagaccctgtctctaaaaaaaaaaaaaaaagaaagaaagaaaagaaaagagagaagagaagaaatcagatattagagacacagttgaagttcccgtggaccctcctgatcccgttcttttttctgcttctctcctgatttgagtgattatcgtttccgggtgtgtgtttctactttgaccacacacatatatgtacactagagatctgtagcggaggttctcagactttctctgctcgtgaccattaatggcccagcaatttttttcatggtaccgcccgggcaagagaaatacctaacatgtccatttattaaataggtccaaacaacttaatgagtatttatgtccttacaactaagtggccacctgaaaaaaaaatacatatgaattcgaaggaaaaaataacatcatttcatttttaaattaccaccatatgttatgaatgagatgtgtgtccttgtcaggcaccagacaacttctgaccctttgtaaccagttgacacccgcacctcatttcctgttccacgttgattttcacacgatttttgcattttgctgcggtacctgccaaaaactttgctttgcaaatatatgatgtcatggaaagggatgtagagcactattgttgaagcagtgaaaaacctcacatgagtagtatttgcagtgtccaacggatgtcctgtattaccgcgtttccgtcaaaaatttaaaataccccacggtgcctctgagtttgctgcaatgcctcacggcacctcattgcacattagaatcacagatgtgcggcttttcttggtattttttatgtgttttcaaattttatatattaatagatattaactgactgcattgttctctaatgaggtcactgcactttttctgtaaatggcaagatcataaatagtttgggtcacagagtctctgtcccaagtactcaatttagaaagcagccataggtaaagcatgaattcataaactagtccatgtttaggaatgagtctggctgtgttccaacagatgttattattggttcctaacatttgaatttcatataattttcacgtgtaataatactcttctgatattgttggcaacattttaaaaggtggccaggcacagtggctcatgcctgtaattccactgcttttggaggccaaggtgggaggattgcttgagcccaggggttcaagaccagactgggcaacatagcaagatcccatctctataaaaaaaatttttaattagccaggtttggtggcacatgcctgtagttccagctactcgggaggctgaggtgggaagatcacttgagtccaaaagtttaaggctgcagcaagctatgatcacacctagctacttggtaagctactatggacaacatggtgaaaccctgtcttgaaagaaagagagagagagagggagagggggagagagagagataatactttttaaaagagaaagaaagaaaagaaagaaagagaacactttttaaaaggataaataatttttaaaaacttaataatttaacatgtaaaaaaaaaaagatgtagaccatatacaaaacccagaggcacctggatttgtcctgctagccatactggccaacccctgctctataacttgatatttttgtgcaacataacagttttgcatttctctatgtcactgtgatccaaaaagcctcattttgcctgcagtttagccttctgtgcgtgcatgtagcacgtgcatttgtgcattatttgtcaaggggctttcagattgcttccagtgttctgctgttacaaataatgctacgggggacattcttgtccatgtctctgagatttagtctaaaaggtcttctagggactatatacaggagtgagatttggggggttaaaagtacgcttagcaacaacttaatagataaagccaaattgttctgcaacgtaataccaatttatatcactaccaattgtgtgtgtgagatttctgacctctccacgtttgtcctgacacttcttttttttttttttcttgagacagagtctctctctgttgcccaggctggcgtgcagtggcatgatctcagctcattgcaacctccacctcccaggttcaagcaattctcctgcctcagcctcccaagtagctgggcttacaggtgcacaccatcacacgtggctaagttttgtatttttagtagagatggggtttcgccaagttgaccaggttggtttcaaactcctgacctcaggtgatccacccaccttggcctcccaaagtactgggattacaggcatgagccactatgaccggctgaacgcttctattgttagatttttttagctcttgctaatctgatggtagttcattatagttgtgagatttagcatctttatggctgtttctgggcatttgtgaattgtctattttgtattgtgctatttacctttttcttactaattaatggaaatcctttatagattccgaatacgaatactttgccattatgagttacaaatatcttctcccctgtatggcttatcttttaaatatgcttgttgtaccttttcttgtccaccctttttctttatgatttctgcttttggaggttataaagataatcatttgtattgccttataactgttgtctcttgcattgaggcctttaatcatcttagaatttgtttgtgtaatggtgtcttttttccttaactcttacagtttgtgagacttttctgccctggtgatatgtgcatcagtggttgttagcccagccctatgaaaagggccagctggcctccatagatctaaggcagccgagagtgctgtcccctttgtcccaggctctgcagcatccaaggcgagtgcagatggggccagctgttcttccaaaaccatcatctcttctttacctgctccttctgagcttcacctgacatggctgtgcagtccccaggaaaaagaaagtctctcttgtcttcctacttcctaagtcaatcctaggaactgttacgttcaattccaagcagttgtcataaaagaagtttccttggaactttgaaaacaaaagaaagggtttaattttcttcttttcgttttgttttgttttgtttttaattttttgagacagagtctcgttctatcccccaggctaacagctcactgcaacctctacctcctgggctcgagcgatcctcccacctctgcctcctgagtagctgagactgcaggcacaatccactacacccagccaattgttcaatttttttctggagatgaggtctcactacgttgcccaggctggtcttaaactcctgagctcaagtgatcgcctgcctcagcctcccaaaatgctgggattacaggcatgaaccactgcgcccatccaaaaggatttaattttatggtcaaattctacattgtctattgactttaatatttttataaaattctttaaataaaatgtctttacctggaataccttcaatgtacttactggattagaggcaggtaggtcctgtttgtatggctagtatgttcattaaatatgaaagtaatggaaagatgtttatgacataaggagagaggaaccttcgcctgtcaggataatagaaattgaaagatttttatgacctggctcagcagaaaaaggagtatatgatgttagcaattttttagaattgatttttcagaagaaacatgcaaaacaaatgagaattaagtagctagaaagcctttttcccccctttattcagataaagtaactgaagacttttaatgagaagcctggtttctgtctttctacacggtgcactgggaatagtaagctgttagaagtcagtgcttagaagtacctaccatcctaaacacaggaaccaaaaacaaggggaaaaaaaaaaaaaaggaagataaataaagtaaaagtaaaaaagtacctaccgtcccaaattttgtatatgatgatgttcacgtttttgaacttacacatattcttctgtataagtaaaatatttcataaaattaaaaatgttttataaaattaggaacagaatttcttaaagatcaacatggtactaatacatcttacaatctgtctttcaaagtttcaatagacttaacttagagtcattttttaaattgcattttgatgccaatataattcatgtgtcattttccgctataatacaatgaaaatccagataatggagatggattttcttctgagtagccacgcatattaggtttcaggctccaattgcctggttttgaattgctctttgccatgtgctgtctgtgaccttgggtgggtcacttcacctcccccaaatctaggtttctccaatacctacctccaggcttgttctaggcatgaagtgcagtgatgatggagaaggcatggactgtggcacaaatagaagagtcaggggttggcagctcctattcccactgtacgatgccaaggatctttacctataggataagccttcagaaacataatttggtctttcaagtgctgaatacctctgtgagtatacttttttccatcttttttcttttggtaaatgaaactcactgagaaatttgacttctgataatgggaaacagtgctgcttatgtgttctccttgtacaaaggtgtctgggaccattatacttagaggtgatctgagaaatcggaggggctctgattgttttgaaaactctcctttgaggtcgggcacagtggctcatgcctgtaatcccagcactttgggaggccgaggcgggtggatcacttgagaccagcttggccaacatgatgaaacctgtctctactaaaaatacaaaaattagccgggcttggtagcatgcatttgtaatcccagctacttggggggctgaggaaagagaattgcttgaacctggaaggtggaggttgcggtgagccaagatcacaccattgcactccagcctgggtgacagagtgagactctgtctcaaaaaaaaaaaaaaaaaaaaaagaaagaaagaaaaagaaaactctcctttgaattaaggtaatccttcttgaaaggcttgtttaaaatgtttccttgttacctgggagagagcaggaagcgctgggaaatagcacgtcactggtgcctcgtgccatttccgtgcctttccctgtcttgcctcagccttgcactgtggaatgcaaaagagtagaagaaactccaacgtgaaaattgtcgacaaacaatgcagagaatcttcggtggcattaaacattaaaattaaagacacatggtcttaaattcagctgatatacttgacacctcagatatactcttggtgccaaaagggatgttaagcaaaatttgagggatttgactccttatttgggaaagaccatgactaccaaggggagagaaaccagaggcaaaccttattgaaaaatggagtagctaagtcattttgtatatgttacttttacccagccaagtacagtctgtagttttacacagtgaatttgatctttactctaaattcttttcctttaatgaaagtgctagtcagtaatgcagaacttgggcaagttttataaatatgtttgctttacaaccagtcttattaagtcagggtatcatctaagggcccaatcaaggacttttcatttaaaaaagaaaaactctaaattgcattgtgatataacccttaaattccaactgtcatggggaatcccaagacctacatctgtatgtatgtgctgtgttctaaacactgctccccaacctttttggcaccagggaccggtgtcttggaagacaacatttccgtggttttgggattaaacggttccacctcagatcataaggcgtgggtcctagatcccttacatgcgcagttcacagtagcattcacactcctatgagaatctaatgccactgctgatctgacaggaggtggagctcaggcagtaatgctcacttgcccgctgctcacctcctgctgtgcgacccagttccttacaggggctgcagaccagggggttaggggtctctgtttttgtttttttggagatcaagtctcactctgtcgcccaggctgaagtgcagtggcacaatatcggctcaccacactcttcacctcccaggttcaagtgattctcctgtttcagcctcccaagtagctgggactacaggcatctaccatgcccagttaatttttgtcattttagtagagactgagtttcaccatgttggccaggctggtctcgaactcctgacctcaagtgatctgcccccctcagcctctcaaagtgctgggattacagacgtgagccaccgcgcctggctggggacctctgttctaatatgcttaccatgccaaatgcattatgaagaaaaacagaaacaaggcttttaatgttaaagtcttattttctcgctactgaaataggcaaaatgtttcaattttgcaaaaataatatagtattgtgtataggatcttccctaacctgctttttacatttaattaggcttctacgagtcattcgggtagttgcatctagcaggctatttatccattctttatagaccctttagaggtttgagacccctttatagaggtttgagagccctttcttgccccagttctcttgtctgtaaagctgtaggaaataatatgacctaacatacaaggcagtgtgaggacagcagaagtgacttctgtaatgcatatggtgctgttccaggcatggataaatctttgctaacagtcgtaagagtttacctcctgtgaggacctggctacgtgctgagcaccctgcttggtgctttgtacattgtgactcattcagttgctcaaacaacaccatgagtagtttaccagaattacccccatcttgcaggtgagaaaactgagcatccgagtgagttagtagtttgctcaaaggcaggcagctagcgcaagggggagcaggaatttgaacctgagtgtcggccccacagcctttgcttttaccaccgtgctttgccacctctgaatgttcactttcattccatagcagcatcatacagccctgtgcataacaggaagtgcacgtttgttaaatgagaaactagtaacacttctggtagctgaatgacttaactactggtaaacctgtctgcatggccactaggctttttatggtgaacacaggcatattttccatgtgctgtgttgaagcagcaattaaataaatcaggtaaaagagtaattaaatttaaaaggtaaaacgttttggaaggagttttgaggtttagggctgtctaacctgaccttgactgtttctctatgtgctgtaagatgcagattgattttcaatgagatattcagcccatccctgcttatgatttatatatattctaagtaatatgcttagaatgtagttctgcttaccatcataaaatgtggagttaaaataagatccttgtcaaaacattgtcatgcagagattagtgctatgaaagttaacattaaatgattttaaaatgtgatccagaggttaaactgaagttttgaaattcataaaatgcataagctttttgagaatttttaaaaatatccgttacataataactttaaaattacgttatatgattgctatcttaccccatcttagccaagagcattcagcctgaggatactcaaaaagagtcaaattaccccttccttgtataagctatagtttaggatattgcaattatatgaggtcgttttaaagtttttagcaacgtttggtataattacaatattgtgctgttcttacacaaagaaaacataacagaattttgagctaggaatattgggaaaccagccattgctaaaggaagatgcatttagtgtatctttctatgtacctcttaacatcttttgtggggtgtagaaaaacagattattagggctttctttttttgggggggggcgggagcggggatggagtttcactcttgttgcccaggctggagtgcaatgacgtaatctcggctcaccacaacctcctcctcccaggtttaagtgattcttctgcctcagcctcccaagtagctgggattacaggcatgtgccaccacacccggctaattttgtatttttagtagaggtggggtttctccatgttggtcaggctggtctcgaactcctgacctcaggtgatctgcccaccttggcctcccaaagcgctgggattacaggcatgtgccaccatacccggctaattttgtatttttagtagagatggggtttctccatgttggtcaggctggtgtcgaactcctgacctcaggtgatctgcccacctcagcttcccaaagtgctgggattacaggcgtgagccaccacgcctggcctattagggatctctaaaagccgcaagcctcttgctagccatagctgtgaatgttgtcttaaccattaatgcttcagtataaataatatcaatttaaaaactgcctaagatttaaaagtactatgcaaattacaaactgcttgggtatctagatcaaaataaagcagagcaaagaagtaactttaggaatgaaagggtatctaagtggaatgataaaggaagacttcatgcaacagaagaatttaagtaaaactgaaaaactgaaactaatgtgatcatggcattaaatagtgtaaccctgaagacgcatccagtatataaggaacaccacagcagtgcctatactcaccgttattattcatcattattctgaagcatgaataagaacaatttcaaaaattataaatattggaaaggaagagacacattttattatttatgtacagaataattatataactagaaaattcaagagaggcaactgacaacttattttaagtaataaaagttttagtttgctagtggatgcaatgtaaatatgtaaatgtcaatagttttctttttttgttagccataaatacatactgtaatagagaaaatgtcctacttatacatgtcccccaaaggatagaatacttaggaaataagtttagcaagaaatgagcacatagaataaaactataaaactttattgaaagacaaacaacaagacctgaataaatggtaagacacatgacatactcttagatgggaataactggtattaatcatccttcctctgtcaaactaacacctaaattactataaaattactatactatatcatgccacactatactatactgtatttactgtaaaaactgcagaggaaaatgaacttcgtggttaaattaatcacagcatttgtctagattctgcaagaatgaattcatgaggatggatttaaaagctttttcaaggccgggcgcagtggctcacgcctgtaatctcagcactttgggaggccaaggtgggcagatcacttgaggtcaggagttcgagaccagcttggccaacatggtgaaaccctgtctctactaaaaatacaaaaattagccaggtgaggtggtgcgtgcctgtagtcccagctacttgggaggctgaggcaggagaatcgcttgaaccagggaggcagaggttgcagtgagcctagattgtaccactgcactccagcccggcgacggagtgagattctgtctcaaaaaaaaaaaaggctttttcaagaaccatgatggatgattaaactaattgtaagtatcagaacaagataaccctatagcaaaacagttaatagcagaggaataccctggagtgtcctgagatagatttcttccagtagtaatttgataagatgacattttatttttatttttatttttttcttttcttttatttttttgagacagagtttcactcttcttgcccaggctggagtgcaatggcgtgatcttagctcactgcaacctccacctcccaggttcaagtgattctcctgcctcagcctcccgagtagccgggattacaggcatgcgccaccatgcccagctatttttttgtattttttagtagagacagggcttcaccaggttggccagcctggtcttgaactcccaacctcaggtgatccatctgccttggccttccaacgtgctgggattacaggcatgagccactgcacctggccagatgacattttaaattagtggtgaatggatgggatactgattaaatgatgttggaacatttgactaataattttaaaacataaaccatagagtttgttgttgttgttgtttgaaatgtagtctcgctctgtcacccaggctggagcgcagtggtgcgatctcagctcactgcaacctccgcctcctgcgttcaagtgattttcctgcctcagcctccctgagtagctgggattacaggcacatgccaccatgcctggctaatttttgtatttttagtagagacggagtttcgccatgttgtccaggctgctcttgaactcgtgacctcaggtgatccatctgcctctgcttcccaaagtgctgggattacaggcatgagctgccatgccctgccaaaatataaaccatagagctttgtatcacaatatattcaaaataaagatagagtgactttttactttttagtgtgcaaattaaacataaagcttccaggaaaaagcaaaaaaaaaaaattattgttggtatcctatcaaggctagtaaaaagaatagataaatgtatacatggaacatgggaaaacattcacaaaatataaagttaaaaaaatcaggttgtaaaataatatatctccaatttgtatgagatttatatctatatatggaatgaagagatatagaagtatatcaaatgattatttttgtttgcctggaggtaatggaatcatggtgattttcacttcacactttgtgttttggcattctcaaatttttacaattactgtgtattacttttgtagtagttttttttataaaaggaaaaaatgacttgaaaaatcaagtaatttgacatgtagacacagggaaattacattcgaggcagagagcaaacaacaggcatgtgactgtagctgacaagtgtcggcagattgtgggcatagtttagagtctaagacatctgggggagatgagtttcatcattagatgaagtcatattctggaggggaataaatgctaatctgaaatactatgctttcaattgccagtgaggagaaattgacagttttgaaatagtggtttcaggaaggctctcctgagaagatggcactgaggcgagccttgaagaaggcgagaggggagaaagattggcctgtgttcaaggaatcaaaatagttcgctagttcagagacagggtaaagcaaatagactggagtctcattcaatgtctttaaaagtcatggagaagagttagtatagtttctaatccatgaggacttcctgaatgattttgccaggactgtactttaagatactgtttctttccaaccccccatcagataagtcataccacttttctgaagtcgaataagtgaagggaaagagtggacaaattgttatctaacagggctccctccccaggaaaggactccttcgtcagtaagagatgtgcacgtggtataaccaacaatgctacttctgggtatgtccacactgctggagctcagaaatgcacaatgaaaaaacaaaacgggttgtggaagtgtgtatacaatctgttacatttttgaaaaacacataacacaatgctatattctgtttatgcatgtgtgcttatgtagaaaaagtctgaaaacctgatctgcataagctctgagttcataggagttatgaccatgggaagaagtagaggggtgggatgagcgcatgggatactgaactcagctatgctgctttacttctctgaaagaggaacaatcttaagtaatcatggtaaaatgttaatgtttgtccatttcagggtggggaaggaaatttaggtctgtaatttaggagagaggttgaggccagagccaagattggcagttgtgatgagtatgtggttacatcttcactttttttagaactaaatctggatgtcaatggccatgtttagtgggccaggggccttacattactttcttgcagcactgatggcttttgtttgaggctgcacaaattcctgcatttcccttgggttgaatggtagggatgcgggcagttggtgactgggtgaaccacctgacttgagcagggctacgactctctctgcaaacgaaacccagagacatgaacagtgctgagatttctcagtggtttcccatgtaggctgctttccaagggcagcaagcatggcttcatcactcacccagtgcttctgattcagcactgtgatgctcggttaagttttaatgaggttttaaattttttcgtatgtttgagtgtttatgcaaacaaagatgctgaattgtaaacaccagcaatctgagtaccttcttttgatttctctctccatattgtttagtccctttttctttgtttgttttatgaaattgcatagatgttttggttgagagtagattgtttttacttttcagggacaggcaacaatttcatgatataacttctaaaaatattttaaacaagtatgaaaatagttttttcttccaaaaaaccatttcttcatttggcacatacacaaacaaatgagcagaatttagagtaatttagagacagaatttagataatttgggtgggtttttttttggacagtcttgccctgttgtccaggctggagtgcagtgatgtgatctcggcgcaccacagcctcctcctcccaggctcaagcgattcttgtgccttagcctctcaagctacaggcacacaccaccacgtccagctaatttttgtatttttattagagacgagtttttgccatgttgcccaggctggtcttgaactcctggccttaagtgatcctcctgcctcggcctccttaagggctgggattacaggcatgagccaccacagccggcctagtgtgaaagcagtttttaaggacagttgaacaggaaagctcctggattcctgcacatagatcttgtgcccctccaaagtgccgtaagtaccgatttctgctgtcttgatttaactcagtgtctggagcttacgatccttcctctctgtttccttcagtggcgtagcttgggggtgtcaattaaagagttattgcaagatctcagcctctgaaagtttagcttattcatcagcaaaactttaagcaagtctcacctcttctaaattagaattgtaaccttgactttagtctcagagttaacattgtgcagaaaaagaaaacactgcgcagtgttgaagcagtttgcaaactgaaatgatacaaatgaaaaatgctatgatgtttctcagtagtctctgtatttgcaaatgagtcagttaggattagttttacccacaaataacaacaacagtaaaaaaaaaaaaaaaagaaagaaagaaagaaagtgacccagcactataatacaagtttatttctctctcacatcaaggaagttcagggtagccagtctgggctggtttagcaactccttgatcatcatgggttctgtgctacctggtagtccaggatggttgcacaagctccagccattgcatctgtatcccaatcagcaagaaaaaggaagaaaggcatacccccttttcaggaggcttcctggaaatcacatacaacatacctggttacatctcatcagtgaccttagtcacacagccatacttagctgcaagacaagcgaagacattcagattctacctcttcttcttgaaatagaaaggtgagttgccaatccactgtcagcgtgacgacagttcaagaggttttcctagacacagagttgagttaatcccgtcatctgtgtcatcgtctctattttgacagcatctgtcaggtggtcaaccagagtttaggcaagaagacctatgacttctctacacagacatgattaggattatcttctaaatcaaccaaactgaccagcccaccctttcattcttctgtgcatcacagatcatttttgaaaaagagtttaggacacatccaatagtaagagtgtagttttataaatcaggactcagtcttacagtggaagattatatggtagttagtgtcatggagaaaagcttcatattagattagttgaatcgattgggatacagaaccgtctttagagcatggcatcgttacattgcagataaagcatgtaggtagagaatgatatctttgttggggagagccccaaactgctcttcaggaacctttctccgagatttgcaagccaattaggcataatgaaaccttgtttttaatgcatatcttttgccagtataataaacataataattaaatgtttatatatctttcgtattttcctgtataatacaactaatcatatttttgtcaggctgaggacatctcaagaggagggaaaggtggcaaattgagggtctgttcttcttttataccagatggcaattataacaaattacttctggacttagggatgggggaggggtggggagatgggaacatgagaattattcctgatttttgttactttttgtcctgtaaaatatgcttaccaggccgggcacggtggctcacgcctgtatcccagcactttgggaggccgaggcaggcagatcgcctgaggtcgggagttcgagaccagcctgaccaacatggagaaacactgtctctactaaaaatacaaaattagccaggcgtggtggcacatgcctgtaatcccagctactaggaagggtgaggcaggagaatcacttgaacctgggaggcggaggtggcggtgagctgagatcatgccattgcattccagcctgggcaacaagagcgaaactccgtctcaaaaaaaaaaaaaaaaatgcttaccgggacatctcaaggacatcattcctttgtcaacggtacaaagataacctgagacataaagtgaaaatgatttatggttttttgttttcttccttacattaaattttccaataacatatcgctaataacatatttcttttgttttgagacggagttttgctcttgttgcccaggctggagtgcagtggtgcaatctcgactcaccgcaacctccgcctcccaggttcaagtgatttctcctgcctcagcctcccaagtagctgggattacctgccaccacatcaggctaattttttgtatttttagtagagacggggtttcaccatgttggccaggctggttttgaactcctgactttgtgatccacctgccttggcctcccaaagtgctgggattacaggcgtgagccacggtgcctggccaacatatttctaataatatattaatttgataaacagaagttattttggaaataagccaaaacaacaaaaaatgctcatccctgcttttcaaggctattatctgtagtttgaggttttatcaaatgtagatatgaactgcgggcctcttcaggatgtcctcattgcttctgttaatgcttttaccatccagtaccactgaacaggcagcagggtgccttcttgggcacaccggaaggacccaggaaaaggaagatagtgtggcctgttcttgtctccatgccccaaaatggaccactacaccagtggggtaggaaatagcaggtgtgttatgggttgagtttggagaccttgacttgatcaaccatctgctcacccaggtcatctttcctttttttgcagaggtgaggtctcactatcttgcccaggctggtctcctgggctcaagtgatcttaccgcctttacctcccaaagtgctggtattacaggtgtgagccaccatgcctggttcttgtcaccattcttaacatcagcagcagcagaaaaaccccctgtttagccttcaatgttaatttcctccttgatctatgtgttctacacaaaccactcccttgttgtcccccatatattacatttgtggactcttctcaaactctgcagctcagccctggttcctgctgagcctacagccccaggcctgagcagccggctgggccaagttaccctcagtctcaagatgacttcctcacaaggcaaaacatttctccagctgggttggagacctaagctggggaactgggctctcacattccaagatagaggtttgcctatggacccctgaaagtaggcgtgtagaagcaggttcctctgatggcagaggccctctgtttatctctgaaagatcctgaatgctatgcttctttcatcccctctgccttgaattcgcctgctttctaggtgcggtggagaaagctgggaaaagagccacctctgctcccaggggccactgagagggtagaacactgaccgaatcccagactcactacctcaggggctgagatgggtccaaaggggcccttaacctctcacttgatcacctgactcttaccgctgtcattgatctgacatgttctcctgggcgctgtcccagctctgtcccagcttctcagcactgtgtcctggtcagccctgagggctcatttcctttatccatactgaggaccaagacctgtctttcctgtagggcagtgagggccacgggctagtgcctgagccgatgagtgcactgctggtactgtgctgagccctggacaagggtgtaggttgctctaaaaaacaacttcccaatattctacaaaataacgttcaaactgaacagagcttgactgaagattcttcttacttcatttgttttcatgctacatttttgctgtccggctccaagtctgtgacaatgggtcacgggatcagtgcgagtaacagtgaagatgtttttcttcatctttgggctatgattgtgctttgtgatcctaagtataaatacattgaggctgggcacggtgtctcacacctgtaatcccagcactttgggaggccaaggcaggtggatgcctcgagcccaggagttcgagaccagcctgggcaacatgtcaaaaccccatctctacaaaaaaaatacaaaaattagccaggtgtggtggtgtgcacctgtggtcccagctgctcaggaggctgaggtgggaggatcacctgagccctggagatcaaggctgaagtgagttatgatcgtaccactgcactccagcctgtctcaaaaaacaaaacaaaaaaaatacatacactgactaataacaccagcaatattgtttcatgggagctgcctctgctgtttgtaccaaaactgagcagattctttaggccaggcccgagtaatcattaaatcgatctgcttgtgagaaaccggtaggtctaggcatgagcacaaagtggcaggtccgtctcttcccttcttaaataaggaatcaccagaggtagactctgtgcctgtgactcttgaatgtttaactgaaatccagagcagcaattgcattttatatgacaccatgtgtgtgcaaaaactgaatcaaaatcttgtgaaacagtgctactttcacttactatatatgatgtagtctaataattttctatcctattttatttcctttttttaaatgctggttgaaattctgtaaatttatataatgacaaactactgggactctatcttggttcaaaagtccatgatcagcctgcttgtattgagttactacattgtacgatcttataattgtaaagtttaagatattttccttctgtctgtcttaatttattctgtaatctaagttgtcctgccaggaatgctggcatatttactttgtttttgaattcaataatcatagtttctcttgctaagttacattaatggtaccaaaaaaaagttactgcatggtttttgaaactgttctttcctaggaagttttaaagtaaaatgtttttaccttttattgtttacacaggttaagcatccctaattcaaaaatccaaaatccaaagaagtgctcaaaaatccaaagttttttgagtgacaacatgatgccaccagtggaaaattccacacctgatctcgtgtgacgggttgcagtcagcatgcagttaaatctttcatatatgcacaaaattattaaaactattgtccagggccaggcacagtggctcacacctgtaatcccagcattttgggaggccagggcaggcagatcacttgagctcaggagttcgagaccagcctaggcaaggtgatgaaaccctgtctcctctaaaaatacaaaaaaaaaaaaaaaacattagctgggcacggtggcacacacctgtagtcccagctatttgggaggctgaggtgggagaatcacttgaactgggtggcagaggttgcagtgagccaagatcatgtcactgcactccagcctgggcaaacagagggagaccctgtcttaaaaaaatatatatacatatatatatatagtttaggctatgtctataaggagtatatgaaatataaatgaatttcatgtttagacaggggtcccaaccccaagatatctcgttatgtatatgcaaatattacaaaatctgaaaaaatttaaaagccaaaaatcacttcagtctggtgccaaccatttttgcataattgcattttccatgttgcattttgcaaccattttgcataattctgtacttctttcccttttgggtttgttttcataactgctcagtaaaaagtgttctgtgtcatctttccattattttgggctaaatcatgttaatggccaagcctgtcagaattcatttgttttgagttaacttcctggtgtccagttctcaggagttgcaagaatagagctcttccctcatgcaatcatccaaaatcccaggcctctaaccaggattggggaacaccactgttggccaagagcagaaggcttaaagctctggtcatagtcatggcactgtacaaactgttcttgttccctacaagaacatgggaactatttggataatggatttatgaatttaattctgatggatttttataaaggagctaaaaataagcctatataatttattacatgtataatcatataattttaaatgtgtataatttataatattcatcgaaacatttctttttggaaattaaatttcactttggtcaaaatcatcttacaaaacaagatgactcatgatggttctaaataatgtaaaccggtgtctgtaactaattaatgctctggaggaaggaaattctgagttctgacacaaaagcacgtctaagtggtattggtattttcaaagcttttactacaaccaaaaatatgttcacgtgtacctgtctcctctttacactgcttactttctctatcgcttttcccaaatacgtccccagtaacttcctcatgttctgtgcaccacctccaatcttcccctaatgtgtatgaacttggtcatcaccaaagaggtggaaaggaagaagggcatgtgctaatattaatattgaggtttgggctgggtgtggtggctcatgcctgtaatcccagaattttgggaagccgaggcaggtggatcacgaggtcaagacattgagaccatcctggccacatggtgaaaccccgtctctactaaaaatacaaaaattagctgagtgtgatggtgcacaactgtagtcccagctactcgggaggctgaggcaggagaattgcttgaaccagggaggtggaggttgcagtgagccgagatcgtgccactgcactccagcctggcaacagggagagactctgtctcaaaaaaaaaaaaaaaaagaaaaaaattgaggtttgtgccagtttctttttcctttaggtctcctgatatgtgtctagttagttctatatacttcctggaaattcgactccaagatatttaataaaactaaacagggttatatgttgaatagacaaatcctaaagagcagaaaggatttagtggttagtgaaatttcattgacttaagatgagttggatcctcaaaattaatatattctaaacaaagttctatttttaagctgcagtaataatgccgaatttctcttatagttaattgaatgatttatcctggtgttgtctcctggtagtcactgaaaaagtcattacaatcctcactttctcccctttaattcaagttcagaattcatgtgttgctgtgactttttttgagtttatctgcagacagctgccattgaataaacatgtttatatagggcagaaaaaggcagcctgaagattctactttctatttcttttagcactgtttggcagttaacaccaacagcgcttcagaatgaggtactgtccagcatacaccttgcttgttcctctacaaagcttctatttttgtttttgatttgttgtgaggaagcaaagtgtagcctttacttgaatgaaagctacagttttatttttctttcttatttacaagaaattcttttgatgattaagttagccagatacgccccgtgcgctcatatttcttaacctattttgagctgagctagttgcaaggactagttcttctgtgaaacctctggcagtccataaattcaagttcgtgtccagacgtaatggtgaactcaatatgttgtatatttgatatatgtttgttgcacacatggagagaaaagttgctaccattgtgaagtagccatgaaatccgacagttctaatttctttatcttctgagtacccatggaataaaggacctcttagtgccatagcaaggcagaagtttaatttgcaattctggtggcaacatccaggtatttcaagtagaaattaagaaaactttacggaaaaactatctcagcacttcagtttaactatttttcaaagtccaaggagggttttccccagtgtaaaagcagaaatgagaatttcagatctaaagcggttcttgccttttcttttccctccatgcacatgtgctgacaacagaaagtaaaatttgaaaagaaaacccaggctagagcattggggtcactcatttcccatccagcgaagggagagctggtgcctggctgggggaggttaggaaggcaagtcttgggatctgatcactcggctgggagtgggtaaaatacctggacctcaggaggccggattgcagcgccagtgttctctacctgtgtggcctgttcctgcctggggttgggtaccaagtccaggtggaagtggtccctggagcatcctctctctgaagtgtttctttgtcaaacagaatactccctgctgctgccccagaactcatcactgttgacacatggaccaagaactagcagaggaggtgatttataatctctaaatgaattgctctaaaagagacaacaagcactctgacttaagtaaaggaagggagggtgggtggaaaggaaggaggatcataaagaacattctagattgcatactttggtaatcacagcagggccttattgcagttagaacaaaagcctggacacacttacctctcagttcaggaaaataatttagagctacttgttaaatgctggagtattattgaagtaccaagtgttaagattttcactgaaagcaaaactgaccaagcagctcagctagggaaatgctatgtgatcagttgattgtttgatgaggagtatggagcagggactttggcagaggttgctagcagacaggccttggttttagtccaagctctatcgcttaatagctgtgtgaccttggggaaaattataaaattttccagtccttagtatcataaactgtaaatggaggagaaagatgcctcacagatgttgaaggtgaagtgagacaggacacctagtacattgcctggctacatagaaaatgtttcacaaatgttaacttgaggccctctccccatgcctcggtctcttagaatggtttttccccatcgtgtgcacattgagcggtaaggcggacagctgccgccgcccatgctgccccatgttgagagcatttctgttgaccttcccttcttccctgtgaagctggttcagcagtcacctcatcactgtttttcttctccagagagtgctgggttgtagcgaccatactgttgacgcaacacatcccaaccacgctggacggaatttttactgcgataattcatattccaggatcttacagtgcacagggttacaacgattagcataatgatcttgcacaatctttctgcctagcatgtagtgcattcgtaatattctcagaggaggcgtctagaaagcgccaggctccttcctcctgcgtgagccactgcaagctgtcggcgcctcagtgctatggagaccttgggtggattattccttgttggcggggggagggtcccagctgtcctgtgcattataggatatttagcagcatccttgctagatgccatttacaacaatcaaaaatgtctccaggcattgctaagtgtccaggtggggagcggaataggcagaaccgcctccagtcgagaagggctgaactgtacttaggatttgtgattctgcagaaatgggttctgtgaatgcactaaagcatgagaacatccaaaaatcagtgtggcacagaactgaattcaaatttacctggatccaggtaaataagcacaattttgaaagtaccaaacagaattcaagaaaaacaacaacaacaacaaaaaacacattaaaaacagaaaagttggccgggcgccgtggctcacgcctgtaatcccaacactttgggaggccgaggtgggcggatcacctgaggtcagaagttcgagaccagcccgaccaacatggtgaaaccctgactctacaaaaaatacaaaaattagccgagcgtggtggtgggtgcctgtagtcccacctactcgggaggctgaggcaggagaatcgctcgaacctggagggcggaggttgcagtaagccgagatcgcaccattgcattccagcctgggcaaaaagagtgaaactccatatccaaaaaaaaaggggggaaaggtcagaaagacgttctttttcactaggtgatgaattaatctttcccatctttgtcatgttaaaaatgtgcctgtggctgtttctccactaaatgaagacactggcacacagatgattgtgtgtaaacactaggcaagacactaggcacaatcgtaggggttcagtaattattgaatgagaagaaagaaaggttgttcttgaattctgtgatgtgagtgtttaatgatgtttttgaggagaatgccatatgtagcagacagaaccctgggctgggcatcagagggaccgggggcaccacactgggctttgtgtcattatctccagaaagtaactggcctggtgcacaggagaaagttagagtacattgtccatacagttcccacatagctgtagggttttatgaacccatattttaaagggccttctaatgaagtgaggatgttaatgcttttttttaaaaaaaaaaaaaaaaaaagagagagagagattggtgattactttaaaatctgagtcctggccaggactcacgcctgtaatcccagcactttgggaggctgagacgggcagatcatttgaggtcaggagttcgagaccagcctggccaacatggtgaaatcctgtctctactaaatacaaaaatcacgctcctgtaatcccagttacttgggaggctgaggcagaagaatcacttgaacgtgggaggcggaggttgcagtgagccaagatcacaccactgcactccagcctgggcaacagaatgagactccatctcaaaacaaacaaaaaaatccaagtcctaattatcgctgcagctttctttaatgtgtgcagtaaggtggggacatacagaataacttaagatgtagaaatcgtctctccctccctgaagaatatcatggatactacatttgcctgccaggaatgttgtgttgttctggtgttctcgtttctgccgttatcattgtttctgcttaatttttacaacacaactctggccgcacccgtggatgatcatggaaaggcagctgcctggctttccagaattgttttgactctccatctgaacccagagctctgtttcctgtacaggttgctagcagtatttacccaaattgtcccttcccaactcagacccactgacccttcctttctcagctgattacgggtttaagtttgaatcaaaccatgctatagaatcactatctagcagcttctgtgcttgcacaataagagtattagtcagcgtttcctgttttcattcatattgtaagttgaatagctgtaacaaaagggaaagagattgccaagacaaataattcttatggcttgtgcaaacaatttattacaagccttattaaatatgcagctttcagaagtctacgtgatatgcctttcagcaaagctaaatcctactatgtggacttgcttcatgacttaagaacaagtctatattgaatttaacattaaataattatttggcctgtatctcttttaagctttgttaagaactgcaaatatgataagggaataaattgctcatttcaagtcactaagaaaacctaacctataggttatatatgttggcagttcccaagaagtacctaggaaatggaaccttcctataagagtggtttgtccccttctcacgagatgggtcttcatatcaaggccccctaaggcacagatacacagcactccacagtgtccaagttcgtagtaattggtggcaccttattaaagtagtttttactttcataattactgattacacatcagcataccttttccatgttctgtttccttggcagcctgatatttgaatacaaacgacataaaagtgattacatgcagcatttcaggacagttttcaaactgagagaatttggcactttcttttattttcttcccattcttcgtctatttcctttgcatttggaagccaaactcctcgaacctttacttctgcatgttgttttcgtcccctagctagagttctctttattactacttttttgtttccaattggtctctttttaaaaataaaacatggtgaaaccccatcaatacaaaaattagccgggcatgatggcgggtgcctgtgatcccagctactcgggagactgaggtgggagaatcaattgaacccaggagacggaggttgcagtgagctgtgatcgtgccattgcactccagcctgggcgacaagagtgaaactccgtttcaaaaataaatgaataagtaaattaaaatatgaaattaagcttagctagcctgtgtagatgttttagatggtcatatctttatcggatatgacatttatgcctttcagtaaaaccattgtagtattgtaagaaaaaaagggaagtatgatagggaggactaagaacatatttgtacttctatgtaatgctattttatgtgtctatttccattgaagtgtggccttgacatcactggctcccaagtcccatcctgttttttcattgacctgcttgtgccaggtactgcgttaggaagtggagctaccagatgaataaggcgtggtcccgccctccatgtgggagacggcacgtcagtgtacttaggatgctgcatgtggtgacagatgagggccctgcaagggagcacaccacagggccgggagggtgggatgggcgggaggagtagccaactttgcccgaaagcatcaggacaagcttccaggaaatggcacatccaagctgagtcttggacagcgggttaaagaggcagagaggggagagaggaatgttccacatgggaaaagaggtctggaggtgacaacaagtaacatagagtatgtgggctgtgccggaagcttgatattacagaggcacgaagtctgaggcagggagtgtgaaggaagatgaaggtaggggaaggaagtttacacaagggtggccttgacttttatattaaggcactttagggaagcaggaaccactgaagacaggagaacatggtgactacacgggcgcattgaaggggggaggagctaggtttttgaagggaatttgagcttgcaatttttcaagggcattcaatggttataaatgaaacttttcattaatatatttgtgtccaagtgtttttagatgtgcttttctgctactctctttttatttggtttggagatagatggtgactttccttcagtgccttctatgtgtcttgacatgttaatgtctcaaacacatggtccgtatcatcatggagcttgcaatctaacagggtagtttaacacataaatatgcatccagttggaaagaacttagagatcacttgatcagcccccgttatgtaaaatgtatgcaacaatctacctccaactatagggcgacattaaacagtttttcaaaataccatggcattgaaaaaaatgcgtaacatttgggttacttcagtcccactccccggtactaatcaggccagtgaaccagtcttgctggtgaaataatgacttctccagtcatgatggatgatttcccttcatcatgaccatttcttccctggctctgcctttacctatgaatctcttctttcctccctctccttcctcctcttggtctctgcctgccatacccaactccacatttctctgcttggaaaaatcctacttgattctcagagcctgactccatcaccccctctctccaaccctcccaggcaaactccgtccctcccagtgtgccgccctccagctctctctagttgaatagcagatgttctctctcccacttccctgcagggcttcagggtagtgaccctaagagtgagcttctaccagtgagaaaaacgcctggatggagcaggaattcccacaaatgcttaggaattcaatatgatttttagcaagtgggagaattatccttttggttacaaagatgtgaactatttttgtgagttctcagtatgcaccaagaaaaaccccagtgactcagtaatgtacctgtgccgtctcacttaacccttccaacaaggaacttgccaaggtgcacagctgggagggatccggggtcccgtccgtgtgctaacctgcaggacagcgccgcataatccagtactggggccttattgtccagccttccacctccaggagcccactcagtgatgacttttgacaaaagtcacccggattatccctcttttggggtccatgatgccaccaacggctaaagttaacaaatgcattaccaggaggtaccactgaggtaaggattgttactgtaagtgattttctctgattttgaccactacaagtaaaatcacaagatttgtcccaaatactatataaagaggaatgtcttttatttctcgaaattgttctgccactttgtttgttcaaataacacataataaaggataaatggcttgtagctatatttatccaaattgaacatttttgatgtaatttttttaatttgtcaaaagcatatcaatggtcataaaaattttttatgtcctctggccctattaccttacccttgggaatttattccaagaacgtaatttgaaagagattaaagcacataggcacaaatattttcagtgcagtattgtttatattggaaacaacccaaatgttcagtaacagggggaacaattttgtaaatcttgctacagcaacttaacaaaattataagctgccacttataattgtaaattttgaaagtttgtagcacagcaaggaaactgatcatgttaaatgtttctgatatcttagttaatttttctcccgccagttccgatcggtgtcctggtcataccgtcagcatataagtatgtatttcataaacatttactttgtattaactcagtagtattcccttcctagagtggtttgcttcccagattgtaatggacaatcatctcacctggggatcttgtaacaatgtgattctgattctgtaaactttgtggggagcccaagattccacatgtcttagaggctctcagatactgctgatgctgttgatcacgaatcacgcattgagcagcaaggtcctagagctctttgtgtatgaagaagatactactgacccagtgcctcgctatcttgaaaggcagctgtgacctttctagcaactgagggggtggggactagaaacgagtgttttctggtgtttctctaataaagctgctgtcttgtatccagattgaccatcagtatccttatgcccttcaactaacttgaaatttgtcagttaacagaaattactgggtggcactaaaataaattattcttaatataaagggtaagaaagggtcgggtgtggtggctcatgcctgtaatcccagcactttgggaggccaaggtgggcagatcacctgagatcaggactttgagaccagcctggccaacatggcaaaaacccgtctctactaacaataaaaaaaaaaaattagccgggtgtggtggtgggttcctgtaatcccagctacttgggaagctgaggcaggagaatcgcttgaacccgggaggcggaggttgcagtgagctgagattgtgccattgcactccagcctgggggacaagagcgaaactccatctcaaaaaaaaaaaaaaaaaaaagagtaagaaaggatcttccattgtaatcatactatcattgccttttgaaacaatttggaacctgattacaaagttgaaaatccccatctgtatgaagaaaagcttcactggctggtcaccttggctcaacgcctgtaatcccagcactttgtgaggctgaggcgggtggatcacaaggtcaggagtttgagaccagtctggccaacatggtgaaaccccatctctactaaaaatacaaaaataaaaaattagccaggtgtggtggcaaacacctgtagctactcaggaggctgagtcaggagaatcgcttgtgcccgggaggcagaggttgcagtgagccgagatcatgccgctgtactccagcctgtgcgacagggcaagacaccatctccaaaaaaaaaagcttcactgtgagttatgatatgggaagaaaagtcttggcctggccaccacaaggaatccctcaggcctggcggtgggaagcagaggagggcgcagtctctttagggcagaaagtgaagaacatttctatgacaatggggaaatcagttcacctttgtgttggtaaacaaaaggaatgtaagctgtcctttgagctcgaatcatagtggtgattgccaaaacctacctttgtttttagaagataatagcacatattccacttgcttccccacagtgaccgaagctggctttggtgctgacatcggaatggagaaattcttcaacatcaagtgccgagcttccggcttggtgcccaacgtggttgtgttagtggcaacggtgcgagctctgaagatgcatggaggcgggccaagtgtaagtgcccacaccgccttcctaataccaaagaaatttcattatgttaaaacagaattgagcatttgaaaaattcctgcccatttaatgactatagttttctagagtatttttcttaaaactttttttttcctgtagacctccctcgtggacatctaaaacgttttttgttttgtgttgttttttgttttttcccaacaccaccatagggcactttgagtttagtaagttcgagtaaacagtaacacccacagttctttctaaacaatattttggaaaggagcataatgcaaccactttttagtctcaagcttcacatctgatactcaggccaagattgtataaccatatggtaatgggaggttagaggctcttgtccctgaacgaagaacaagaggattagagtgagttctttgatgacagagatttttcattgtttgtacagatagtttttcggttcactgatgctgcaactcatcagatttcatctaaaactattttccttctctttctgtttattatgatttctcctcacaactctgttataatactggattgtttctaagagctttgcttggaaaacacaaattcgattttaacttctttaaagactttttatatttacctatcctaatatatatagaaattacagacattataaaggaaatatattcctttccacagaaaacctgtgcatagatttttgggggtttttttgttgttgtttgcttgtttgttgtttttttgtttcatttttaggaatttccaagtggagaataagacattttatactgattaatcattttgaaataaaataaaatttctctatcataatattcacatatgagacgaactgccaaatctgatttcttaattggtatactgtactgtgtatgtgacaaaagtcatatattcaatgattattgcatagtcaaaacaagtagcaggtttgccatcatgaaacgctgtaaagcaattctttctcctgggagaggtggacatgatttttataccattttacagataaggaagctgagttttgataggcttagggaatatggacaatgtcagcaggccagcagagagccgagaacttcagatctaaatctcctactatgtccaccatgcagagctggatgttaatgaagggcagaagttttctaaatccaaatccactcctaatacccgacacttaagcacttcatttttgcctaaagcttcatcatcatttcaaatgcaagaatgatataatacagattaaaagtagtaaatcataaagaattctgacttcactcaaaacaccccttgttgctacagtccttcctggattttagacattgaatctgtataacaacttctatttttaaaaactacttccgcccatgtaggatgcatttggaattctccctccctgccctgccaccctgaaaattatagaaagggcttagagattgtctgatctcattcagtctttataaagagaaaatctctgaggcacagggagacgcagtgacttgagtggtgtcacacatctatttcagggactgatcagatctacagtcctggtctcttgacatcagtcccatagttttccagactctggtctctgtcctgtaaaaattctctacatggtttacaatcctatttcattcatcttaacatatgtgctctgttattcagtggttgcactttcgtgccacattaatcctttgtgtctcttccactgctgcttaatgtcatggttctcagccagtgatcatggtaacatggaacagggttagtaggcacagatatgggtggaggataagaaaaggtggggaccagccaggcgtggtggctcatgcctgtaatcccagcactttggaggctgaggcaggtggatcacctgaggagttcaagaccagtggtggcgggcgcctgtaattcccactactcaggaggctgaggcaagagaatcgcttgaacttgggaggcagaggttgcagtgatctgagattgcaccattgcactccagcctgggtgacaagaacaaaagtccatctcaacaacaacaacaacaacaaaaaaaaaaaaaaaaaaaaaaaaaaaaaaaaccagcagggaccaggaagccctgtgaagctaggcatccctctcctgggctccagtagtaccttctgcctcacattgtttcatgaatgccttgttctgtgtctccctatgtaattctcaattccttgagtttagggactgtgtcttattaattggtatggtccaagtgtctggcatggtctatatgcagggagtgttttcaataatggcaagataaatgaactttcatcctcttaatcctctattccatagtgctcatctcggtgtccttccttcatattgaatagctctgtatttttgaaccatgattattcatttctacttctgttttcttttttcttttttgctacaaatactgcgctgggatcgacttccttttgatcattacacaaataaccatggctgcctcttatgtttattcagcttgttttttttccataatttgtacagtggaaaatcttgtggcccttgaatttgcccattttaaatttgccctcagtcattttaaactcacatcctgtcccccagagtgctcggccattcccagtgcaatccaataactaatattgtgctatgctttgggatccacagattctttcacaattagatctttaaactaaccattgtatgaatcagcattcttcacacatagaaccaataaggatgtgtgtatatatagagaaagatatttattgtaaggaattgggtcacatgattacagaagctggcaagtccaaaatctgcactgtgggctggcaagctgaagacccaggagaggcagtggtgctaatgcagtctgaaggcagcagtctgctggagaattctcctgctctcaggggaggccagtctttttgttgtactcaaaaaggcctttgactggtcagttgagacccacccacattatgtaggacaacttgcctactcagaggctgctgatttccatatcaatttcatcatagacaccctcacagaaacacgcaaaataatgtttgaacaaatactggacaccctatggccccagcaaagttgacacataagattaaccacaaggccaggcacagtgtttcaccctgtaatgccagcactttgagaggccgaggtgggaggactgcttgagcccaagagttcgagaccagcctggggaagatagcaagacctcgtctctacaaaataataaaaaattatctgggtgtggtggtacacacctgtattcctagctactggggaggctgaggcaggaggatcacttgagcccaggagtttgagaccgcagtgagctgtgattgtgccactgccctccagcctggacaacagaactttatggcaattaccgtaaaatgatttcgaatggtgatgtactctgtataaatcaagtattaaacatattattagttttatgttctaatttgaaccaatgtttgagaagtttcatactgttccattggctcaaattagaatcatccagggagattttaaacattactgatcccaggttcccctcccagaacttctgctttcattggtctgggtggagcccagggatcagtgttttctaaaagcttcccgcaggagtttaggtttagccagtgctgccagctactgttttaaaagcacaaaacatagaggtacatttctaaaaattgaatgtgattatgttgttctttctttcagatcggttgtgtaagcatttttataggattattcttcatgttttctctccttatttcaggtaacggctggtgttcctcttaagaaagaatatacagaggaggtaagaggagctgtttagatgcttatgtgaagaatctcttaaatccagtgactcgttggctttcagtgaatgagccctccttcagtggcctcttagaaaagtgctgttctgtccgggcgcagtgactcacacctgtaatttcagcactttgggaggccaaggcgaccggatcacatgaggccaggagttcaagaccagccaggcaaaacccatggccaacatggcaaaacctcatctctactaaaaatacaaaaattagctgggcatggtggctcacgcctgtagtcccagcatgagaatcgcttgaacctgggaggcagaggttgcagtgagctgcgatcgcaccactgtactccagcctggacgacagagtgagactctgtctcaaaaaaaagaaaagaaaagtgccgttctaagaatccgagaggaaatggatgggatgaaaggataaaattcattcagttaactcttaaatatcaagaaaagatggatataggctttgtctactattgtgtactcccagggtagccatcagagcaggaactcaaggtctccaggtcagaaacaaatatgaagcttacacttctgtattcttttgtcatggaaggtctatatacagttggctttatgatttacaggagtggcttactcttttctgtaaatagactttgatttgctggcagcagtacctcttagctcctacaggtggcgccagggatctgagccaggaatacctggtcagagctcctcacccacctggggccttgtgcctgtcaggcctcaacctgcagagcatgggcgcattgcatagaccctgcagcctgtcctcagcagggtgagctgccaggcttcagacccacccatatgccattggatccagaatcattttagaaattattttgaagacgaacctctttattcttgcagccatctttcttggaggaaaaagtgaaaaaagatgtagcaaatcctgccagagaggtgctggcagtttagcttggcaggtttggtgggagacaatacacaggggtctgggttttgcttttttcttttttacagaacatccagctggtggcagacggctgctgtaacctccagaagcaaattcagatcactcagctctttggggttcccgttgtggtggctctgaatgtcttcaagtaagtccagcctcctcctttaaatgtgggcattatcactaggccaccctgtgaacgatatttgtgtcttggggtatttggtctttctgtgcttcatctaaaagtatacagaaatacccagttctttctgtttgtttatttggtttggtttcattttagcaaatgtgttctcacaatgttattaaggaagtgaaatttatatatagtgagttactatctccttggcttttttttttttttttttttttaattctacccagcatttttgtctgaaacaaactgtgaatgatcaaagggatatgttatggaattttcttgataacacccttaacgacttgaaatatttgagtcactttagagaggactttttttttccatgctttaagtctgatttatttaaacacgatgtgaccacttttgatgtttaaaatgtattcagtgttagggagcgaagttctgtataaatggtgagtctttctttgaaaacatagctaaatggatacagatgcaaaaccacaaacattttcttcactaggaccgacacccgcgctgagattgacttggtgtgtgagcttgcaaagcgggctggtgcctttgatgcagtcccctgctatcactggtccgttggtggaaaaggatcggtggacttggctcgggctgtgagagaggctgcgagtaaaagaagccgattccagttcctgtatgatgttcaggtaagatctagtaaaaacaatggctcacatttcttacaccttagcatgggttgtcccattctgttgtcaccacaaccctacagataagaaaactaaagatagaagagtttaggcccggtgcagtggctcacgcctgtaatcccaacactttgggaggctagggcgggcagatcacttgaggtcaggagttcgagaccagcctggccaacatagagaaaccccatctctactaaaaatacaaaaattaggtgggcatggtggcgtgcacctatagtcccagctactcgggaggctgaggtgggagaattgcttgaacccaggaggtggaggctgcagtgagccaagatcgagatcacaccactgcactccagcctgggcgacagagtgagaccctgtctcaaacaaacaaacaaaaaggtagaagagtttaagccatatgacaaagtcacatttccaagtacagaccctagctccttgtcccaaagcctgtgcttttgaagactcccaaatcgcagtcctaagtgaggaggtactttagcgaacaggatttgacagctgacgctttcaggagttgcacaggaacaagagcaatttcgtgaggattgggaaaccatgggaggtattttccttgttcatttctcttttttttttttgagacagtctctgttgctcaggctggagtacagtggtgcaatctcggcttactgcaacctctgcctcccaggttcaagcacttctctgcctcagcctcctgactagctgggattacaggcacctgccaacacgtctggctaagtttttgtatttttagtagagacggggtttcaccatcttgggcaggctggtctcaaactcctgatctcatggttcacccacctcggcctcccaaagtgctgggattataggcatgagccaccacacctggcctctgcttgttcatttctgttatggttcttttctcttgtggttttattgaactatgtctagtgtatgtgtgtgtatatatacatacataatatatttatttattttcattgtggtaaatatatatataacaaaatttactatcttagccttttttttttttttttttttttgagacagagccttgctctgttgcccaggctggagtgcaatggcgtgatctcggctcactgcaacctccacctcccgggttcaagcaattcttctgcctcagcctcccaagtagctgggactacaggcgcaagcaagcgtgcctggctaatttcttttttattttagtagagtcggggtttcaccgtgttgcccgggctggtctcgaactcctgagctccggcagtccacccgcctcggcctcccagagtgctagggttgcaggcgtgagccaccacacctggcccatcttaaccatttttaagtgcacgtcagtagtgttaagtacattcacattgtcatgcagccaatctccagaacgcttttcatcttgcaaaactgaaactgtacccactgaacaactccccatgcccctccctacagtccctgccagctaccattctccttcatttccatgaatgtaacaactccagggacctcatgtaagtagcatcatactgtggctggcttatttcacttagcataatgtgcgtgcatgttgtagagtgtcagaatttcccttcttttttttttttgagatggagtttcgcttttgttgcccgggctggagtgcagaggcaccatctcagctcaccgcaaccttctgctctcgggttcaagcaattctcctgcctcaggctcccgagtagctgggattacaggcgtgcaccaccacgcccagctaatttttgtatttttagcagagacagggtttcaccatgttcgtcaggctggtctcaaactcctgaccttgtgatccacccacctcggcttcccaaagtgctgggattacaggtgtgagccaccgcgcccggccagaatttcctttatttttcgggctgaatacgctcccattctttggatatcccacattttgtttctttgtccatctgtggatggacacttgagctccccctcacagctattgtaagtaatgctgtatgagcatgcgtgtttatggcatatggcatatgtacaagtatcccttcaagaccgtgttttcttttttttttttttttttttttgagacggagtcttgctctgtcgcccaggctggagtgcagtggcgcaatctcggctcactgcaagctccgcctcccgggttcatgccatgttttcaattcttttggaaatgtattcccagaagtgggattgctgggtcctctaggatatttttaagcacatgtcgatggttcagtcagaagacctgagcttcccagggctcactctcctcctcagatcgtctgtctttgcacccgtctgacatctccattctgaattttgtggttccgattctggctgatggatttgtcttcaggggtagtgcatgattgtggagtgcccaggcttcaagctgattgctgcttctcctgttccttcatccctcacatattctattgttgagtcactcagatgtcacagacactcttctttcctgttcagtggcataaatcaatagcataagtgaagaagaaatcagtgaagcaagagcttagcagcgttgttgataagcctggagtcacagtggtgagagaacggggctgatgtattaatatttaatattaccacagctctcgcttttaaggagttgtttgtgagctgggtatatgggcgctttgcacatgttcacctctttggtcctaacatccctcttaggtggaaactggtgatatcttcccattttacagacaagaaaactaaagcacgaagagactaagtcaactgctcagtgtcccatagctaggaagaggcagagctgggagaaagaatatccagatggttgaggtcatcaccctgctctgttcttcagagctaagtactgtgctcaaaagtgtgtgtgtattggaggtctggggggagacatagttaaaggggacagtgactgagtgacccccctgaagagaaagggtgacagtgatgggcataggcacagattccatgccacacaggggacatcatcgctggcacgcagtcagtgtttacggaaggaaggacacagggaattaattggaggctagctcataaaaggtttttcatttttatgaggccattttgtgaatgaggaactagaatattctggactacagaggcggtagagatcaattgagggagaagattttggatgagtgaaaagaaaaatgttccagttggaagctttgagttctcagacctagaggtgttcagcgcaaaatagatgtagccctgctgtgggcaagtcagaggcattgaagccaactcagatggcaggtggccaaggagaccctgggttcctgttctttggtcctgggtaaggcttgccagggtacctacaacccttggcacatgccagagcctttctacataaaccactgtagggagagtcacccccagatcctgctgtgagtgtgcctctgatcatgccatctgatcatgccatcttgccgtctgatcatgaaccaccccactctgcatagcaaaggcagttattttcatgaatgatttcacaaagtgcggctcttttcaaggaaaacatcccaggtgaaaaagaggtcagtaatcagaagaaatgcttctgagttatgctgtctcagacatgcactaaccctaacatgaacccttttcctttccactgatatttcaatttttttttctgaattcccattcttcatgcagataatgctgctaaaatgtcagctctcttctgaaaggaggaaaatgtttaataataatgtggtctaaagtcctctattgataggcgacctcaaggccaggatccctgcctcctttgccaacacacttctcgcttttcttgtaacagaaattcgatttgagctgcataattgtttgttagataatcagcctcccagcctactgcagcatgacagttcatgaaaagagctgctgctgctgctggctctctttgtactgtctgcctgttagctgtgttcctcacaccagcaagatttagatcatctaagaccatttacagtcttgtcttgtcaccatgtaaaaatctgaattcattggtgcagtcagtaatagagctcaagccttctttgccccggatttcttgcattgattggtgctggtaaaactttagtaacttaagtaatggttttctggaagccctttttacctcccctacaaccccacaccctcacaaccaacccttgggtgctgggcagtgagaaagatatggcattgctctataggagaaagaagttataaatgctttgcatatgacactctcccacctttgcttctcaaagcaaactgggtttctgtgtgccccttggtgtctccccagactttatatccccaagaatgtattcagtacaagactaatggcatcttgtgtgctattctttctccaccccagtcttgtggaaggaaaacaccggagatgatttagggtaatgggaaatagtgctagagcccagggcatgactgcatttgaatgtgaagtagaaattgtctcggaaccccactggagagtgattcagctggagagagtggggcacctggctctcagaggcactgtgcggccagacagcagtgtgctggacttcctaatggcgagctcacaggttaagtgagaaacaggctgcacttctgacttgggagtctctgctgaactttatagaaaactgacttcagcagcaactgctgtctagagaacaatttggcatctctttttgccagagtaacttctaactcaagagtaggcaacttttaattatggtaccggatggaggcagcaatgaataatttagaataaagattgaaaaatatggaataaggtgtagtagactaattgctcagaagaagttttattgtgtgaaaatgaatgtgtttaaacttgaaatacagaggatcatttcctctctacccttgagggtgattgcagtcccttttaagaagctgttaaaagtccccctcaagatcatcttctctttgaattttcctttctaatgtgacttttgacaattatatctttatcgttcactaagagaatatctccatgtctgcagggatgcagggaaatatgatggctgaaagaaacgctaatctacatgcgcactttattagctaagaaatccctcctccatacgttcttccaggcatgcctccgcacatcccatctgctatgtgggctcaactctgcattatagatgggaaggtgatggacttgtccataagaaatggacgcttgataggagaaggaacatattacatagagctaacaggctaaagctttgggatcatgcaaattaagtttaaaccttgagtaggcctcctactgtggacacaatttggggaagctgactaatctctcgagcctcagcatcctcatttgtacaatggtgtctgacagtgacaccaacttcaccaagttgctgtgagacccaaatgaaatgccccagagtaaaatgctggaacatagaaagcaggcaatgaaggccaggagtggtggctctcgcctgtaatcccagcaccttgggaggctgaggcaggtggatcacctgaggccaggagttcgagaccagcctgggaaacatggtgaaaccccatctctactaaaaatacaaaaactagacaggtgtggtgtcacgcacctgtagtcccagctactcgggaggctgaggcaggagaatcgcttgaacctgggaggtagaggttgcagtgagctgagatcacaccactgcactccagcctgggcaacagagttagactctgtctcaaaaagaaaaaaatggaggaaagtagtcaatcaatgctggttcttcctcctgtcatgttcacttggaaagagagtgggcctcctgaattcaccttcaagaattctcctgtaactcaaggtaactttgtcaaactccaagattggtttattttgctctgggttaaaaccaggaattagaagtcaagtctcctaaagcactactgaactaaaccaagacactgacgtttttccttctccgtgagaattgggagcccttagtgatatcataaaacatcagtcatttttgcaaagaaggaggtatgacccggagaagtcagcttgacattcagtcggaatattgtttgttaaatgaggagttaaggttgaaaatcatctctgtatccttcctctagccttgcaaacattttaaggtgtagccttgacagcaagacaggatagtgtttgtttttattaaaaggtctttcctgttccttgcgtgaagccattctcttgatcccagtgggggctggatgaaggaagagcaaaacaaaccacgaagacagcctggagccgcagccagctctgctgacttctgaacttcacgctctcactgcccagatggccaggggtgtttcctcctctgctggtcttttttaaggcaggatgtttgttgttattgttgttgtttttctggttggttcttaagaaattattttctacatcttgaaaatgccagctggaacctacaccagttgttggtggggtgtgagaactatcctttacatggacttggagcatttgcaactagagcctccacattgaaataaacatttaaaaatgcatatctatggatatacagtgggggatcttccattgtggtaaaaatatgtataacatacaatttcccctttaatcgcttttacatgtatagtctgtggcattaagtacattcacattgtacatacagggtttaattaataggatcttaaaacttaaaagggtattgatgcacatctctgttgccttttacatttcacagtaattagaagggaaaaaacacactctaggttgaaaggctgtcctttcttttggttgtccttgtccctggaaaagctgtcttccccctcagggcctttgacctcccccggctctccctcccatcttcagacacgcccagggccagcctgagtcagtagccctttcttcagcgctccctcttctcctgttgtgcattagaatgtttggagtgttctgtggaaagctggtccttacattttccagtcagttatgcatctcactcataaacctgtttcttcccccatgctctttaatattctgctttcttaattatggttgagctgcctttaaacagtcttagattgttcaatgtgagtggcttcaacaagcctcccataagcctcttatcccctggccccctttccatgatccaaccccaaatctccagataccccctgctttttttatgtttttttgtttgttggttggttggttggtttttgggtttttttttttttttgaggcagagtctcgctctgtcacccaggctggagtgcattggcacgatctcggctcactgcaacctccacctcccggtttcaagcaattcttctgcctcagcctcctgagtagctgggattacaggtgtgggccactatgcccagcaaatttttgtatttttagtaaaggcagagtttcaccatgttggctgggctggtctcgaactcctgacctcaagtgatctgtcctcctcagcctcccaaagtgccgggattacaggcatgagccactgcaccaagccccggatacctcctgcttgaccagaccttctgcaaacacaccttagatccctctcaaatctagatgcttctccaacactggcttctaggttctttatgaaacctctgctggccggcagtatataacccaccacccagcctgccaggcacgtcattcagctgtgttagacagtttcgagggatctgcacctgtcatgagcactggcccaaccttctcaaagcatcccactcatccctgtgattctggcaaagcttgccccagctttctttcctcgatggttgaaatagcacccaatgagaaaaaaacagtggcctgtatttattatacttacacatgtcacaagaatccctgtagtgtcattgaaagctttcttctagcatgcaaaatgattgtcactatgatgtaagtttctagaaatgccttatttcatctaaaattatgagagaaggtaaaatgatgaactatcaaagtcacactacatgttggccggctgccttctaccactcactccatccctccccaggctttctgacttaaatttagatcacatgagaccattgcagtggagagagtgtccactttctcaatctaaaagcaagctcgtgaagaccattaaatatgatcacaggaacaaacattaaaggtaccacacgtaatggaccacttaagacagaaaactacgatcttagggtttaggggaaaaaaacactcaaacagcacaggcttccagtctccccagtctctgagaggttgggatttttttttttaataaagtacaagggctccttgaacatgaacacggaacgagcgttgcacctgtattcattcatttcgctcttgtaacacattgatgttcctaagtcagatttgtagaagaggaacgagcagatgcatcatgagaacactgtgcttggccaggcgcggcggctcatgcctgtaatcctagcacttagggaggccaaggtaggaggatcgctagaatcgaggagttcaagactaacctgggtgacatggcagatcctgtctctactaaaaatattttaaaaattagccaggcatagtggcacatgcactgtagtctcagctactcaggaggctgaggtgggaggattgcttgagcttgggaggcagaggttgcagtgagccaagatcaccccactgcattccagcctaagcaacagagccaagctcaaaaaaaaaaggccaggcacgatggctccctcctataatctcaaccctttgggagactgaggcgggcagatcacttgaagtcaggagttggagaccagcctggccaacatggcaaaaccccatctgtactaaaaatacaaaaatgagccgggcatcgtggtgcgtgcctgtaattccagctactctggaggctaaggcccaagaatcacttgaacctgggaagtggaggttgcggtgagccaagaacatgccactacacaccatcatgcccggcctgttttttttgtgtgtgtttgttttgggttttttttgagcctgggcaacagaacaagactctgtctcaaagaaaacaaaacagaacactgtacatgagtgttcctgggcccagcagagtgctcgaaccagtcagcactttgccctcttttgggtgagatgagatctttaaaatcacttattcccatatattccgttttttggcattgctacactattctatttgagagtaataaaagattacccatgtggatttcttactatttcatgtggagaaatgcagcttttctagcggcgagcctttcttccatttcccagagtccggttaccctcaccgcaccccaggtttgccgtagaaggatgagattccctacatgtaggcgtcttcagagtgaacctgttgctcagggcccgcgagcccacagggctccatgcccactgagcaggctcgtggacgtcggcacgtagctcagatgtgctgatttccagccaaggacatgctttgtgtcaacgatacaggggcctgttgttctcagtaacaagggcagagccgctcccgggactccagttggtattggtaatgcaagcccttgcacctagtgtggtgtggtcagtataaattaatatcgacagcttcatgttgtactttaatttgaagtacaggaaaggctgcttgccaaactgtatttgtagatcatttaaaatttatgcttcatttaaaatgcaaaatacgaatggaaataattactgtgtatccggaaatgtctattcaacttacaagtttattaattgatccttctctttacatgttttacgggacttggaatacactttgctaatatcacagcataggaagatttaacccatatgaattcaactctgtagccttggtgaaagaaaagaaccatgtatttgtcattcactgtggcccccgatgtatgccaacgacttcatttggtgcagggctgaagaaatggcagtgtgttccaatacttcacaacagtggggcctcattaagagatgctagggtattgagagtggagtgttacatagtgtttttcataggtcttctaaaagatttttcagagttgctgacttaagaatttggcctctgagtaagatgagacgcccctactacgttataaagccttcatggatctttatttctaacagttcatttttaaacttttgttccatttcattttattttgtccattttttgtcatcaaaaaattattttaaaatgtaacagctcttctagaatgtacagatcaattttattccactaaaaaacaggacttcaataatttaattgaagaattctagtgagcatttccagagcctttccaagaaagctatactgtttaactttgagtgactcagcttctaggaccctggtccaccacacctacaaaatgaatttaataaagcatgaaggtcaccaaatcctctactatttcttcgtggagtcattcagctagtgtttatgttgtgcctgctctgtgcgagagactgtgccaccaatataaccactggtcacagttattttctagagccatactgcctgatatcccatgtggctaagattgacagttcagtttctggattgttccagtcccatttccagtgcttttaatagccacatgaggccagtgaacacacgatacatcttccattgtgatagaaagtggcagtggacagctttgttctagagtatttccgtttctgaaatacatgtttaagaagtttggaaaggaattagtgtagagtatgagaagggttacatttttggtgaatatgaagatttaacataatgttagttcaaaaatgaccaaagacacaagtgtagacaccaggcttttgaagtagctaatatgttaagcagctgtgcattatatagacagaatattcactatgtcccactcagccctgtgtttgacaccatttcaccttggcttctgcctttctttcccttctttgcctattgagatttttcctgtcctttctatcctttttttttttttttttttttttttttttgaggcagagtcttgctgtgtcaccaggctggagtccagtggcacgatctcagctcactgcagtctccacctcccgggttcaagtgattctcctgcctcaccctcccaagtagctttgactacaggaatgcgccaccactcccagctaatttttgtattatttaaatagagatggggtttcaccatgttggccaggatggtctcgatctcttaacctcatgatccgcccaccttggcctcccaaagtgctgggattacaggtgtgagccaccgcaccaggcctcctgtcctttctttaatgcactattccagctttttttttaatatcttgccagcttttgctgattttcatgcctccctctgcaacctgtgatctcttgactttaatagtaatgtttatacagagtcttgactgcacactctcttctgtcatcgttgtttgttgtgtctcattgtccccaatccatcagaagttcttggtacacaaagtccctgaagctgtatgaacaatgccctgacgtcttgaaaggacttgccataggtggttatttgatcacttagcagatgcctttgggatcctactttgtgcaggccactctccaaggcacaatgtggcaagtaaatatattagtcaatatttacagaaccaagagaaagccagcaatgattaatgcataaacagtcataaattggccattttatttgtttataaaagctatcatttactacagagaagtacaagtgaatatcaagctcagatcaagacctttggactgagcttggctttttttttttttttctttaaagattacacttctcccccaaatcaagcagattaaccataggaagttccttgcctgctaacagaatataaatagattgcatgcaaggggaaggaccttatcagggcagattttagtatttacactaaacccaaaagattatttccttaattgtacttgtgagtgaaaaacaaaaattgtagcaggagtcccaagagcactctggccatgggcttttgagctgtgagttgaagcactttattcagcatgtggctgcagggttgtagctcaggttgtagacagtgcattctcttcaggtcccaggaaacagtgtcatacctgtggaagccaccagaatgcaccttcatcttctccagtggtggcgaggttgaggccaagcatcagaagtgctgagtgctgggaaactgtggggctggatagatggcagtgcctgctgggaagcacacagccctgggttgaggcagggaagcagggccgcccagttgggattcattcgtactactggcccctcacagtaccgtcatgtgtgggtggtcgcgcttgtcctacaggaagtaaaccacaactactcatctcacacagtcagcccggcacctccttggaattcccaaaacactttccaataaacattggaaaggaagaaagtttagttggtaacaaaaaaatgtatgttgccttacgcccaaaagcattgaaagcagggactcaagcaggtactcatgcagccctgttgatagcagcattgttcccagtagctgaaaggtgggaacccccttgtctgtcagcggggatcagctaaatatggcacacacatactatggaacattattcagccttgggaaggacacctcctatcacacggatgaaccttgagaacattatgctaaatgaaatacaccagacacggaaggacagatactgcttgattccacttgtaggggcctgtagagccgtcacattcatagacaggaagtagaatggtggttgtcaggggccaaggggaggggcatggaaagttgctgcttaatgggtacagtttcagttttgctaaatacagagagttctggaggttggttgcccgacaccataaatggacttaacgctactgaactgtacacttagaaatggttaaaatggtaaattaggccaggcatggtagcttgcggctgtaatcccagcactttggaagtctgaggcaggcagatcacttgagcccaggagttcaagaccagcctggacaacatagcaagacccccatctctacaacaattttagaaattagctggtggcttacacctgtagtcatagctacacagtatgctgaggtaagaggatcacttgagcccaggaagttgaggctgcagtgagccgtgatcacatcaccgaactccagaatgagaccctgggtcacaaaaaaagaaaagaagatggtaaattatatgttatgtgtacgttaccaaaattaaagttcttaaaaatatatattttaggccagacacagtggctcacacctgaaatcccagcactttgggaggccgaggcaggcagatcacctgaggtcaggagttcaagaccagcctggccaacatagtgaaaccccatctctactaaaaatacaaaaattagccaggcgtggtggcgggagcctgtaatcccagctgttcgggaggctgaggcagaaagaattgcttgacccagaaggcagaggttaccgtgagccaagatcgcgccactacactaccagcctgggtaacagagtgagactctgtctcaaataaataaataaataatatatatatacatattatatagatagatagatagatttcttacaaaacattttcgtgtttaaaaataacaaatcaggccaggcacagtggctcacgcctgtaatcccagcactttgggaggccgaggcaagcggatcacctgaggtcaggagtttgagaccagcctgaccaacatggtgaaaccctgtctctactaaaaatacaaaattagccgggcgtggtggcacatgcctgtaatcccagctacttgggaggctgaggcaggagaatcacttgaacccaggaggcagaggttgcagtcagccaagatctcgccattccactccaccctgggtgacagagtgagtctctgtataaaaaaaatttttttaaataacaactcagccatccactcgcatcaatttattcactagtcattcgattgctattactttgctcccatgtgagttttttaaattattaacagaaaaatcacactctttatttttgaattatgatcttgagttcagtaaagaatgcattctgttgattaaatgtgttatgagtaacagtatcttgttttgctgtacttccaagcaaaatgtaattctttcagtcctccctaccgttctcactccataataatatgacttaaggtttgtatagcatgacgtttacaacgtgcttgcgttttacactgactcaacgtgtgcagtacagtgatgtatagtgaagtattcacatcctcatcttagaaatgaggaaataaattcagggaggttacatgatttaaccacacataaggaggggctgcattctctctgagcccttctacctcacacagccaccaagctcctttgtgcagagcccatggagggttggagtggccacactggggtaggtgcaggccagagactggatgcaacaggaacattgcctgcttcccaaaaccactgttctactgcccggagaacacacccttctgggagctgacttctaacaaagcaaggtccttggacttgccctgcggcttctttcctgcaagaagtatcttccagcatcctaccaacttttatttcttaaaaaaggttgttccttgccaggcattggttgatcagcagaggagctcgcattagtttcagtgcagtgttgggagcaagcacttgagtgcccagcaacataggctgctcatgatctaagattcatggaaaaagtcttctgcgctgttgcctgcagcacatcaacacctgaattttcttatcatcttgtgtggctattgaaccacagggaacccaagcttagtcaataggaaatatagaaatattcattggttcaactgtatagggagggccttgtatatattccaggggctgtatcctatcttgcctctaggtaaataagagatggtcccgaggctcaaagagtttatcaaccattctttattcttcagctaatatgaacattgaatcttttacattagaagttgcccatgcagggcacgcctgtaatcccagcaacctgggaggccaatgcaggaaaatcacttgaggccgggagtttgagaccagcctgggcaacatggtgagacctcatctctaccaaaaataaattttaaaaaaagttacccttaaatttctttctctaacccagcctcaactttgtactcaggcagtaactctttgtacaacattcctggcaccatattcagcttatacagaaccctccaggcaaggacaggtcactgctaagtgagagagctctggttattatagttcttccttaaacactgcactcaaaacgacttccttctaacgtttgtcccttggttcacattctgccctcctttcgattttttgtatggcatggccctccaagagatttcagtgtcagtgtggtgctgccaagtctgtgtgactgttcacacactcgggctccattcacacaccccaagattgcatgagcttttgctgcagccactcacagtcaggccccagtgaatccctgtcctctgaagctgcaggtaggagcgccccaagggcatctagatgtcaaagaagaggatgctcacatgtgcctaaggttcatccatgaaggcttcgtggaggaggtggcttttgggatagatcttagaaagctcagagagttttaacaaagattggtccttgaagattactaatcttttgactttataaatacttgcatatatcttcttccagtctgtctcttattttttgaccttatttataatgtcttcttaaaacaagttttaaattttgctgtagtgaaatctatatatcatttcctttatgggttattctattgttacctcatttaagaaatccttctctacttcagaataatagagttcccactgttttcttccaatatgtagagttataattttcaagtttatgcctttgttccatattgggtttatttggaggcctggtatgtggtaggaatataattttatttctctccagccaaaagtcagatggtagtcagcctttctctgttgatttgtgtcacctctgttatatactatcctgcacatgctgagtgtctttgtgggttctttcttcttttccgttgattaatttgtctatacttgtgccagtacccatggaatttattagcatagttttgtggtatgattgatagctagtagaaaagtcctctttctttgttcttttggttttgttttatttttaaagttatctgactatttatgccattaccctgtgttagttcactctcgagttgctataaaggcatccctgagactggttaatggataaagaaaagtagtttattttggctcatggttctgaaggctgtgcaagcatggcaccaacatctgctgggcttctggtgagggcctcaggaagcttccactcagggcagaaggtgaaggcggggggagccagtgcatcacatggcaagagcgggagcaagagatggggtgggaggtgccaacaagcagacctcctgagaactcagagtgagaactcactcattatcgtgaggacagtaccaagccattcatgagggatccgcccccgtgatccaaacacctcccaccgggccccacctccaacattgaggattacatttcaccatgagatttggaggggaccaccatccaaaccacatcaaccctttattgtaagtttcagaactaattggccaagtaaccaaaaatgagcttgggatttttattggacttgcattgaactgagtaagtttcagagaagtgacgtctgtacagtgttaagtctcctcatccatgagcaaactattttcctccattgactcagactctttttatgtccctcagtgaaaggttataaggcttgcaccttcatttctttttatttgttagaatattcaatatttatgttccagaccacagaacacctctacagtaataaaaactgtagtaatgaaaaacacgttttaaagcagttttgggttctatcagggttgggaggggaagagtgctagcttttatttattttctcttgggtaactcttgtatcaatagtatttcatacaaatgtgacactagctgttgccaagcaaagtccttgaggcacatcacgggagacttgtgccccttggttgacatctgttccatcagcatttggttcagcagttgttcaccaaacagtaaatccactaattgcatcatgcatatgctttctttttttttttttttgagacagagtcttgctctgtcacccaggcttgaagtgcagtggcgcgatcttggctcactgcaacctctgcctcccagggtcaagcgattctcctgcctcagcctcctgagtagctgggattacagaagtgcgctgccacacccagctgatttttgtacttttagcagagacggggtttcaccatgttggccacgctgatcttgaacacctgacctcaagtgatccacccacctcagcctcccaaagtgctgggattacaggtgtgagccactgcacctggccacatatgcatctttacccacaggaggattgtagataattttgccaaatgtgtttcttaaatttagaattactttatctgtggaatattattttcctaatgaatcattcttgtttctgaagatcccttgccgtatgctatcaatagtctgtgtcctggttttcaatctaacattatggaaatcttctcctccaacacacttatttgcctgtatctagtcttctcacatttcttccatgccacatgacttctcataatttgcttaagtgacagtaggttcaacctctgattttccaatatagtgtttgatcacatcagcatttatgttaaaatctcaatccattactgctcatgaaaaaatacttgtttttaatactatgaacccgtattcagacccacttaaaaaccagcactcacaatttcgttgggagactcctgtcctgacatatatgattatttgaaaattatagtaaacaggccaggcgtgatggctcatgcctgtaatcccagtactttgggaggccgaggtggacagtttgcttgagcccaggagttcaagaccaacctgggcaacgtggtgaaacccagtctctacaaaaaatgcagaaaaaaaattagcttggagtcatggtgcacccctgtagtcgcagctactcaggaggctgagatgggaggatcacttgagcctgggaggttgaggctgcagtgggctgagattgtgccactgcacgacagagtgatactgtcttaaaaaaaaaaaagaaattatagtaaactatatttttttaatgctacaatggataaaaatggttacaactagataagaagcctctaaattgcctgaacacctaagacttatttgctagttgacatctgatctatttctgacactgaaaatttcagtgctttagggtgctaaaaggaaaaaagagggtttgctaggaatcctgcagttgctgagggggtactctgataagggaattttaagcaattacagaacatctcactaaagtttttaaaaaatctttaaccagattaaacttatacaattttgttataatttgtgtttctccaggttccaattgtggacaagataaggaccattgctcaggctgtctatggagccaaagatattgaactctctcctgaggcacaagccaaaatagatcgttacactcaacaggtaaaagttctacttttaggggaaaagaaaaaattcaccttaggctctcagaatactcagcttgacttgaggatttgtacatatcgcaccagctaacctttgcttaatctattgtatggttaacaaagatgaaggtaatatcctcgggtagagtgtagactatatttagaactttatggtgaggcatatatcctctgatccatgcatcatttacttctgtgactataaatgtgtctgatatgggtggtatccctgtttttaggtgatgtgtgatctttcatccctcccactcagccctgaatgttgaagctatcctttggagtagagctgcggagtcagatttagatgaattgcaatgcttcctcttccttacaggcctcttacttactaccttaaaaatgctagcgtggtgccagggtaggcagataggagtgcagcctataaagatgggaatgtttgctgttcttcttatgcaagcggttcactggctttttactgagcttgtccgctgagattgaaggctccatcatcttctacctctagccactgacaaaggcaagtaggcaaacagctgggaaggtggctgtgatctgacagcatgcatcaccatctagtccagtgacagtcatgatcaatcaactccactacaggaggctcagccaccttcaccaaaaggaccgtatgcctcgagtgtccctcctactttggtgtagtcggatagatagcagtcagaacactttaagagcctgctggctaaagaacttcatgatgggtagcgttgaccttttctttaaaaaaaatctccaactccttattcttttttgtaaacccatttgaaattttgttaaatgctgccgttgccagccagggtatttgttctcctaggtttggtaaaatagtcagcaactcaggaagttctaaattcttagaattttccctgtatgttcttggcttatcctttacaaaaaggattcccaagcactgctctgtgcacaggcattgtggtgaaattttcattcatgtgcaatgaaccaagtaaaataaggtcattctcataaggttggtttgtttttttttccgtgagtttttaataatgatatttaagactatcatttattctaatattaagtcttttctcctttcagtgttaaaatggtatttcttttatgaagtaatctggtgagagtatatggcatattggttggtttttttctttttaatatgcctactgacaaaatttttacattagcaaacctgtattagttcatagaaattacttcaatatttaaccatgtctgaaatttaaaattctggcaccatttctgaaagacagttgtgattgtcactcagcaaaattcttatcggtatagaagagtggagatttcaaaaagaaaatggccccaagtccaagtcctccctgagttgataagactctaagatcttccaaatagttttaggctaagtcttatgaaaatttaactaaagatttcattccctttatctctatcaaggaaatattccttaaaagtgatgtcaaccgggcacggtgctcacacctgtaatcccagcactttgtggggtcaaggcagaggatcagttgaagccaggagtttgagaccactctgggcaacatagcaaaacctccatctctatttttattttttttttaaagttagtgtcaagtatgtggttgcaatgaattagcaaagcctctaaaggaacactgtgtgccatttaatcagaaccaggctttgaggacactgtgctttttgtgagacaccacatgtgacttcctgctctttcacctttggaactctgggtcagacatagactttggtccttaaaaacaagaagcttaaatagtgacctcatcttagttcttataatgtaattgcagatcaaatagccatgattcataaaccaacacaaaggaaccctttgcttcctgactgactccagaatgagtgaacaacatgagtaagagcctcgtcgcagagcctttctccagactaccttgctgggtcccggatattaatagtcttggaaagtggtttctacagctgctgctttgcctgaaaatagccatgctttccccaaacatgcacataacactgccttctcttaaagagagcctccaaaataaacaatagtcacccttgacctgctaaacagtcatcacatggagatgagtttttatcctcaccttcttgcttcttcagtgaacaagtagtaacaagcagctcctgcgtgtgcctcgatctgagccggcataccattgctgccgagactgtataaagtgcaaattgaaaagcacaggagactaacatctgtatcagtgaacacattttctttcctttctcacagggttttggaaatttgcccatctgcatggcaaagacccacctttctctatctcaccaacctgacaaaaaaggtgtgccaagggacttcatcttacctatcagtgacgtccgggccagcataggcgctgggttcatttaccctttggtcggaacggtgagtgagtcacattttccaaaaaccctccccattctgcattgccgtggtgcctcaaatcgttatgctccacccgctctttaaaaatcatggattagggaaaattgggagtaattaatagtacagtattcgctatttttctaaacactgtgtctcacctacttttgccattgtggtttggatttttctttttttagatcatgtgttcagggtccttagagtcataatactaatttccttcctaaggtgagtaagaacataacttgggagaattcagtctgttatttaaatggtagaatggcttaagacagtggttgtcaacctttatcacacatagcacccaaaatgatgtcatcacggtggggttgactgctcacaccagacaggatctgcccagtcaccccaagggctggggaaagcagtcctcaccctctctcacttccccagcacgtcaggtgggaagctctggcttaggaaattactgaatcataggagttctcatttttgatgttgttgtgatgggatcatgttgctattggatgattattctgttattttgtgttatctatgggggtaaaggagatgggcagataaataaaagcttatcaaagtgcttaaaatccatgaagatgggcttcatttggtacagctacacagtgatagccttccgttggtaccgtcagtggcctaaatttgacttcttgtctttgggagtgctcctaaatttggtttagaacaaaaaagaattcttacaacctagcagatcccatggcaagcaaagaaaaaaatattctaacccatcattatcgtcatcattagtgcaaagtgatctgagcttaaacagcatacattatcataattttttataataaaccatgttgctttattgtgcaaacaagcaatagatagataaaaagtgcagattcttgccttgatatttacatacttcatctaatattggacacaatgttttttcaatcagcattttttgaattcttcctgcatgtgaggcacagagattttaggatgagcaggtgtgagacgcatgggtttgaatagcacagaggtatctggagagcactgtgttggtattctgaatgccctcagagcccagggggataacagctcattatgcctggggtagaacttacccaggatgtggaagaagaggggattcttcaaaaagagctcagcctctgaactggcaaaacagtgagttttgactcaaaggcaccaaagtactaatacatgacatcctctcctggggtgatccgatgtggctggagttggatgagggggggtggctggggatgggaatgggaatgggattgggatagcaggacagggtcacatggccaaggatcttgaagaccatctcatggaacttgaatctgatctctacacactggggagccacggtagggtgggttttttgtttgtttgtttcttggttttttgtttttttggttttacataaggaggagaagaatgtggtctgatgtgtattttagaaaaatagctctggcagcaatatggagaatgtttagtgaaaagagaaccaggcccagagaggtgggttaattcagctcgggccagaggcaatcaaggtccgcactttggccacagaagtagatacagagagtgggggtgaattgcagacatactctaaaagtatcctcctaccgtgggggccgggggaagggaccgttctagcttggtgactctggctagtgatgccatcggtcatggaaaggacacgggagaaggcagattggcagagccagaaatgagcctggcttgaacatagagagctcagagggttaataggatctaaggaatagtctgtgtctccactggaaatacagacacagtgcttcaaagaaagaggcaggaaggtcaccctggtgggtttaaggatatgggtgaaggcagtcgttaaacaagagacacagggatagctggaaatcagtgagaagacagtgaaggaagacacccctgaaacacccacgttaatgcagccgactcctagcaggggtgccttccaggaggcgggaaggaaggagcagcggcatggcagagaacgtccagaaaaatcccacagacaccgctcgtagcagtgttggcacagggagaagggcctggatgaaatgggttctgaatgacattttcaggtctacagttcagatcagtggttgccaggagttgggggaggggaagcgtttgactgcagaggggcaggagggaactttttgggataatgcaaataccctatgttttgacgtggtagtgattccatggctatatacattcttccagactcatagacctattcacgtgtgttgcccaggctggactcaaactcctgggctcaagcaatcctcccacctcagcttcccaagtagctgtgactacaggctcatgccactgtgccgggcctgtgcataatttaattatacctcagttaacaaaaatgggtgctgaagagcttgctttatattcgttagaatggcctcagtcagccgggtgcggtggctcacgcctgtaatcccagcactttgggaggccgaggcgggcggatcacaaggtcaggagttcgagacctgcctggccaaaatggtgaaaccccatcactactaaaaatacaaaaatttgccgggcggggtggtgggcacctataatcccagctgctcaggaggctgaggcaggagaatcgcttgaacccgggaggcagaagttgcagtaagccaagattgcgccattgcacttcagcctgggtgacagagcaagacttcatctctaaatacatacatacatacatacatacatacatacatgcatacatgcatacatagaatggcctcagtgatggccactttactcctgagctttagctggtgaaagccttggcttagggataagagggcggctggacagtgcaggcccagagagactggaccatcaggggaggtgaggggtgacggaggtgcccaaacagagcatgaaatggtagagtagctgagaaggttagcctcagtcacgatctgtcctgtcctaccctctgcggactctaaaccccgcagtagttcacccaacaaattcattcactcggccaatgctgcataaggcactcagctcggggctacagggagccccaactttaagaagctttctctgcttcaggtagtttacaggtggtagacgcagatagaagtgaattagtaaagaaaatagtttggtgtaaaaattgtgcatttaactgaaaccttaattcactactgagcatttaatagccattaaataaaaaccagggcccgcacagtggctcacacttacaatccgagcacttttggaagccaaggtagaaggattgcttcaggccaggagtttgagaccagcctgggcaacatagccagactttgtctctacttaaacaaaaattagccaggagtcatggcacgcacctggagtcccagctactcaggaggctgaaatgggaggattacttgagcccaggagtttgaggctacagtgagctatgatcatatcattgcactccagcctgggagatagagtgagatctctgtctctaaaaaaatgaaataaaataataaaaaacacaatataatttaaaatctttggagtcactaaacaaatatacaatgtgaatctcctctcactccagctaacgccaccatatccaacactaggtaaagaccaaagccgttctggaaaatcagaatctgttgccatggctcatgcctggacaccaggctgtccgctcctgacgtcactctttcacttacgacttgttagaaaatgaatgcgtggaatggccctggatagctgctgcagctccctggtttcctgaagtgagccctctgtgtcattatctggtcttctcagccctcagccgagttcctcctgtggccacacacggggtcgcagtgagcgtcagtgcacagtgatgaaatctcctggaacagtcgggtgtggggcatgaggaagggagtggtgcctgactacagaagttcctggaggtcaggaaactctcactggaggcggtggccctagagggctgctttctatgacagagcaggaagctgcatgtgtagtgggacacacgcaccagaggggccaggatctcctaataaggactggtatttatttttacttgaccccattctgggccttgccacagtctgctgaaatgccttgaacattcatcacccgtgtgggagacaggatagtaatttcctgctgagatgactgaggggacggggaatggggacaccagggggactggctcctgcaggtgggaaaattctagcaaaatgaatcactcttctgcttagtcacccaatgtgcacttattagggtgctgctgaaatacatattcatctatcaactccagaaagatagtccaaactgagacctcaagatcagaaagcctcccattctcctgcagggttcattcatttactcagtgaattattaaatgcctacagcacgcagggccatcagccccacagctatgagaaagattcagtccttccctcacaggccttatgatagactccagtaaataaaaccatacaggcacagaatgcggcgggctttataacaaaggcagaaagcccctcttgtgtcctcaagggaggcagagaagctcccctctggctctagctggagaatcccaacccaagcaagtccatccttaaacaataaacatctccagcattgctggctttggaagaccccatggtgagatgctggagcttttttccgctccagatttcgcttctaaatatttacttttactttccatgttcacttataggccagggtttttttttcctaccattgaattatttcgtcatgttctatttaattattgctttaattggcattggtgaccacaaataataataaatactattaactggtgtaacagcttcactagtctatttcactgtcccatgctgttgtaactgaagcccccagcacaagcattcccagctcgtggtcatctaagacctttgaggtcattcttacatgcattgctagtgttttccatattccttgatggtagccaatttttccttcttaaaataactttcttcattcctagtaagcttcatatgtattttatgtattcttccctcttttttatgacgtgatacatattattgaaagctaggaaataatgcaagattcttgaacgacataataccacttagtacatctttttgtaagagatagtttttctaatacaaatctttgatatgggaagaaacaagcaagttgttttttaaggttttccaaccctatattctactacaaattaccctgttatggtatgcttccaaaattctttcaaggattatggtttatagagttcaataaacctaatagtttataaaacttctcaaaaaataatctcatgccaaaaataatttagtagtaggtggtctttgtcttgtggtcacatggttttgatattgtctttaagtttctataatttacaagggctgtttaatcagttggcataaatttcatgacaaaaatactaatatgtaagcaaagtatatgaaacaatattattgagaagtaaattacattccatgtagaaaaagactagaaagacaacaccaaaaccttaaattagacagtgttattatgagtagctttttttcttctctttttccatatagatcaaattactacattgggcgtatatcacttttataacatgaaaatacagtaaatagggcgatgataaactgcaagtgcttggggagaatgcttaactcaggccagttgcaagagagtgagaacacacacgcagcctgtgggagcgggctccatgccatcacctggccggtcctggctgtgttgctgtgttttcgcacctcaaaagttgggacagcgaagaaaggccataagagctagaacgtttccataagaagtgtattcagtatgatttgtctagctctgactaatgtgtgcaaaccccacattccactaagcaaatgcaagattgtttttccctgttcatttgttcctgggcccttcttgcttactgtgttgggagttggagaggggataattgacttctttcttctcacagtgttttctcttttttttttttttttttttttttgagacagagtattgctctgtcgcccaggctggagtgcagtagcatgatctcggctcactgcaacctccgccttccaggttcaagtgatactcctgcctcagcctcccaagtagctgggactacaggtatatgccaccacatctggctcattttttgtatttttcaaagagactggggtctcaccatgttggccaggctggtctcaaactcctgacctcaagtaagccactgcgcccggccatctctcacagtgttttttaaaacaacaatgcattttcataacagttggcctggagaggtgtccgaccaagttggaattcatagtagaatccattggaagttaatttttgatgtatttgactgttttccattgacttcgcattgaggcagtgagagagacttgaagaacttagaatacgcacccttttgtcactggcaaacatgggacatagaggcatgtcttgacagcaatttgtggcaacactctgggctggaatctaggggttagacagcctggccggttttgtaaattagatagccaggccaccctcagagtcagtttgagggttgagtgggaagcctgaataaaaagagaagttaaacttttaagaaaagggtcaagctttaaaactggaattgggttttcaaatttaatgaggaaaaagaaaccccaaaactggaattgtaattgtggagaaatacaactgataatatttggaatatcatctacaaggaatgaaactatccagaagcatttagatggtagtcagtgccatgtagggcacctctgggggcagggtggctcctggcactgtggagaaagacgactggtgcttccttctcccaatcggaggaaagggatacactgtggaggtcccagcagcttagggcctgccccccatgtggttatctctgtgccgtttccttccctctgtcttcctgtaactccttcactttggcccctctgccctttctgggcagagggtgacaggaggcaccgcatgggtacattctttttttttttttttcttttttttgagacagagtctcactctgtcacctgggctggagtgcagtggcgcaatctcgactcactgcaacctccatctccgggtttcaagcgattctcctgcctcagcctcccgagtagctgggattacaggtggccgccactacgccccgctagttttttgtatttttaatagagatggcatttcactatgttgttcaggctggtctcaaactcctgacctcgtgattcacctgcctcagcctcccaaagtgctgggattacaggagtgagccactgcgcccggccaactacatgcttttttcctcctgtcgggattggcctgggctgtacctatctcatggtggaaacctgcccagggaccaggccctagaagaccagcagtttatttaactgggttggcctttgtccccactccctgtgacccggccctgccacatctttacccaggtgcaccactgacatcatcgcttggctggactctggaaagcaggaaactgctggagcgtgtttggggcatcagtgatgtcacccgctacgaatgctgggtggggttactggactgagggccatgaaaaaagaaagctgcggccccggcccgtggactcactgccattctgctctttctcacgtttcagttcagctcggtttgttttccgtccccctccctctactgtaaaagtatgtactcagtgtttcgtttcctgctggatctgattcaggtcagtgatgaagttatttgtgaactcagtggggaggtgtttcctcccctttgtaccggccctacttagggatgcacggttggttatacgcttgcttcactcggttaggcatggaggagaattcattcagccctcataggtttaaatcaaatgcatgacccttcacattttccagagatttacggccagttacaatgagacaattaaacattcacccccccgccaagctgcacttggagatgtgtaagcagtaatgtagtcatgcgctccccatgatgtgagagcgtgcagaacgccactccccccagcaggtccgccaggacctccgcagggagcatcttgcctgcaaaatcacacatccctttttccccctctctccactttccctactacttttccactcccacacccacaaataaacaaagaaaccttgagcttattttacaaaagtctttgaaatggccctcgtctctccaatgctcctgggtcctggtttggccccatctgtgcaatctctctgatgagtgtgaaataagccaggtttggctcatgctctgccggtgagcttgccctccccatgagcctgtcctctccatctggcctcactttgtttgtgtccctgtgtcctttgtctcccatcctgggatcctggtggtttcctcctcccctcccagcatgagtccttttccccagggttcttccctatctctacatcagaatttcctgctttctcccaaatatgcatttccctggcccaggcatccactgcttcctctcatcgtgaggtccctgccgcaggctgctgatggtattgtggccatgccttcctccacaacccagggaaagctacgtgtgtgtctgtcccatagggaaggagtcatccctgtctcctcagtgtggtgtgttcaggaggaaggaaagtaaccagcgtcgttctcaatttccagaaactgtttatcatattgacaagaagaagaaagctttgtgactcatgagaatgatgttttcctctctggtacataaggttatctaggtccaatccatttgtgtagaggatcttctctcccctagtgtgatatgcacttatttttagcacaagtataaaactactttaaatgaaatcagcctcagccagggaaatatgctgagtaataatgttgccaggtactataccactgagttgagtttgtaattcactgctattaatccctgtgtattagttctgattttttactctttgcatacatagaaaaatggtgtttctcttcagagtcaaggagggaaaaaaagaaaagataaaagatgcttataacacttttgtgtccacccctaaaatcagcatattgatctattattttttctaggtattgatgagatgttgactcatatactttcatacaactggtaatatatatatatatataatatgtgtgtgtatatatatatatatatatatatatatatatatatagactcatttttcttccactttcatctacagcctacttgttttcttccccccatttttcgtatggattcatagcataaattgacaacaaagatacatctcaatttagagcttccaaaaggcacccataaaagtatctggtgctcatggaattgctctttcttctatgtctcttagttacacttttctcttattacacttttctatcccagccatggctaagaggcgtataatcagaagcagctaagcaatatatgcaagggaaataaaatgaatgcaaaccaagataccggttttgtaaattagatagccaggccaccctcagagtcagtttgagggtatagtgggaagcctgaataaaaagagaagttaaacttttaagaaaagggtcaagctttaaaactggaattgggttttcaaatctaatgagtaaaaagaaaccccaaaactggaattgtaattgtggagaaatataacggataatatctggaactcgcggcagtttacaggcttaactatgtatgtgttccttaaattatccacccgcagatatcagattacaataagtcctcacttaatgtcattgataggttcttggaaactaccactttaagcaaaaagacatgatgcatatgaaaccagttttcccatagtctaattgataggaaaaagagttaagttatgcagccacacagtacctcgtttggcttaaagtcactgtttccaagaacctatccacaatgttaagtaaggacttaccgtatatgaaaatatttgcagtaaattgcttttgagagaattggttatcacactcttctctgggtatcattgaaaattcagaatgtttaattacatcaggctatactcactggtataaaatcagggagcaagtataaagtaggtgtagggaaataatttatgttggattaaatgatccaatgaagggattttattaagcccctagaagtcccagaatgaaaatgtataactgcatgactaacccctaagaatttgctggggtttctgcattaagtacgcttcccaggccatttgtaatgaaggtaccgtgatctgttaaggaagagacctacagctgggaacaaaaagagccaattccatcctagacatcagtctcctgtttgactcattccaaccccaagaatatgttgtagagtgtaggacccatgaaagttacttactgtgcttccctgtaccttccatcatccagttcccagacatatctgtgtttcttctctgaatgcctagttacttgggatcccatgctgtattggtctgttctcacactgctgtaaagaactacctgagactggatagtttataaagaaaagaggtttaattgactcagttttacaggctatacgggaagcatggctggggaggcctcaggaaacttacaatcatggtggaaggcaaaggggaagcaagcacatcttcacatggcggcaggaaagagagagagtgaaggggcagtgccacacacttttaaacaaccagatctcatgagaactcactatcacgagaacaacaagggggaaattcacccccatgatccagtcacctcccaccaggcccctcctccaacactgaagatcataattcatcatgagatttggctggggatacagcgccaaaccatagcacatgcctttcccaggactggtgatggaggaacggtgcccttgtcacacctaccagaatatactcacccacctccagacactccatttctctttcaagcacacctcttcacttgtgccgccagctaaggtttactgcagttacttcctttgtgtgtcctcttaccttaccaagtcgcctcacccaccatctactgttaattaaattaccacctcccccacttcccacctccagagtagagactgtgtcttcagttctcttggccttcccacaatgggaagtccagtgtagaacataccctaggagccaactaaatgtgctagtggcctgccaaccctgcagagggctagggaatcttcaaggagtctgctgccagtgaaactcaccagtactagaatcccaggctccaaagaagtctagaaaagtacatcttttaaggaggtaataagaggctcaagtgcccacaaatcctatctgctcttggcctagttcttttgggatcaatgtgctagtctctcttgtcgaaccagttactgaccagcaagactaaaaaaccaggcccaaacacattctattcatgtgcttagatatggacctacggatcaaatatcccactgtaaagcaaaacagcaaactgtttttcccttgtactttcacactcaacaatagcacgcttctgtggctggctgtgtgggggcttttccttacacaccaaatatttctcacaaacaccaaccaggtgtcctcttattcaattcaatcctgacactgtctacctggagatggtgtcggatcccacagattgacggctcagtcccatgagaccagccccacttcaggcactaattgcaaatccaggccatgcatacttctctgactgcctggctaaaaaccgcgttcacagccgggcacggtggctcatgcctgtaatgccaacactttgggagaccaaggtaggtggatcacttgaggtcggaggttcgagaccagcctggccaacatggtgaaaccccatctctattaaaaatacaaagattaggccgggcacagtggctgacgccagtaatcccggcactttgggaggccgaggcaggcagatcacgaggtcaggagattgagaccatcctggctaacacagtgaaaccctgtctctactaaaaatacaaaaaaattagccaggtgtggtggcagatgcctgtagtcccagctactcaggaggctgaggcaggagaatggcgtgaacccgggaggcggagcttgcagtgagcggagaccgcgccactgcactccagcctgggcaagacagcgagactccgtctcaaaaaaaaaaaaaaaaaaaattagctgggtgtggtggcgggctcctgtaagccaagctactagggaggctgaggcaggagaatcgcttgaacccaggaggcggaagttgcagtgagttgagatcctgccactgcactccagcctgggagacagagtgagactccatctcaaaaaaaaaaaaaaaaatgggttcgcatgagccccctccttgggttcaattaagttcctaggatggctcacagaactgagagaaacacttatttacagaggtgttatgatatatattgattttcgtccatggttcctggttcctgaatcccataaaccttcttacagccttttgttataatgttgggggtgtcacgcctcaggggcaggcctctgaccttccctgccctccttgcactgtaatgtttcccccatttctgattgtgagtcttaagaccctcccatgagagggtcccaccctacaccttgtgggaaggaatgtggatgtcatgaagtgtccataaaaacccaagaggacagggttcaaggggattccagatagccagacatgtggagcttcctggaaggcagggcacccaggtcgggcatggaagttctgcacctcttcccccatacctcgccctacacacctcttcatatgtgtcctttgcaatatctttttgttgttgttgtttgtttgagacagagtctcgctctgctgcccaggctggaatacaatggcatgatcttggctccctgctacctccgcctcctgggttcaagcgactctcccacctcagcctcctgagtagctgggattacaggcatccaccatcatgcctggctagtttttgtatttttgtagagacggggtttcaccatgttggccaggctggtcttgaactcctgaccttaggtgacccgcccgccttggcctcccaaagtgctgggattacaggcgtgagccaccgtgcctggcctgtagtatcctttataataaactggaaatgttaagcatgtgtttcctttagttctgttagctgctccagcaaattaatcaaacccaaagaggggagtcctaggaactccaatttgaaaccagttggtcagaagttccagaggcccagacttgcgactggtatggtggggggcactcggccctgtgggatctgacactatctctgggtagacagggtcggaactgaactggaagccaccccacctggtgtctgctgcttggtgtatggggaaaccccatacacatttggtcacagaagtcttctatgttgatgactgttgtggtgcgacagcagaggaaaacacggtttgaggagagcttttcccaacacgcttatgtgtgccagtttattatagaagacacagatgaacaccagatgaagagatgcatagggcatggtctgtggagttggggttcacctccctcctggcacaaggatgccttcaccaacccagaaactcatcaagtcttgttcaaggatttttgtagagcttaatctccactccccgccctccacccttcctggaggttgatgggtggggctgaaagttccagccctccaatcttctacttacttggtctttccatcctgaggctagctggaggcccaccccgtcactccattaccttaagctcaggtgttattgaaggagctccttatgaatagagcaaaatcacccctatcagaaatttcaagagttttaggaaacctgtgactggaaccaaggacaaagatgaaatatattttgtatgatagcacacccaccagattggatcgtggggccatatggcctttagtgtggaagctgcttgaccacattttccgcccatgcactgccattctcatttcaggctgcgtcatcatcatcatcaccatcacctgttcttagcaaaggtcgcacaccttccaaatgctttgtatagattagctcatcactccccatactcaccctgggagcatagtcagggataagaggtagagttctagcgctctgtggctactatggtttatgggatctttgcgcaggaataactggactttaaacatcttggcttttcttttcagtaggtcagtcggcatgtactcacagggccgtgcatgctgagcattgagacacatcacaagggagtgaaaacctgctgccatacccccccagaggcagcaggatgtttggataaataaggcataaacacctggagaattaaagcaagtacaattagtgcagcctttgccaagagaaaggtgtaagtgctaaatgcagtagatgttcaaatacggcagagaccacagtgggcagggtaggccaagaatgctgcctaaggagtggggcttggggtgaaactggggcatttgagacactgcaggcccatcaccctggctgcgccctcctgagggaggcagggactgaggcgggaggcctggagaggtctgtgcgtgagcctgggggctcattgataaggagcttccagtgggggcaataacattggaagtggagaggatggcatgtgtgccgggagacgcagtggagtggaagtcgccggaactgacaagggatgggatgtgagcaaggagtccaggtgagtcctggggacctgaaaggatggacccagagagataaacgacttcaaaccggcacggcagtgaagtgactgacccgcgagtgccctgcaccgaggctgacatttgacttcctgccaagttggccatcagacagttagaaatcaattttggagttcaggagagaggccagagctgaaaattggggagttgtttacattgggagtgatatacagtctctacatttccatccagttcaaaacattcttgcgtgtctgctatgcactgtgcactgaggttaccaagactggaaagacccaatccctgtcctggaagcttagtgttggcaggaggcagacaagctgatacatgcaaacaaagggctcacaggtgccaggatgccaagggatacagaagaaggatggttgcttctctacccaggagtgccctgaggtgtcttaaaaagaggagcatttatgactcaggcagggtggcacattccagacggcagtgggcaggagcctgactccagagcgccttagaggctgccgctgggagttgagctggaccctgaaggcagtagggtaagccataaattagggttaaggaaccaagggaataaggggatcagaccattgcatagctccagcagcaccattactagcagcctgtgtgaatgatggtcccctcttacatgcccaccatgcaagggctctaggccattcttcactctttaatgcagaaaagcaaaacttccagctgttttcccctacccaaaatgtgtgagcctgagcccagccccaggatggatcttgtcctaggtaaccaagaaggccttaagtgtcagaagaggtagctccaggctgaataaagggacaaatgaagcattactgcactgagatcgcccgtcgtggggtgggtctatacccatctagtcattaagcctcaataatttggtttctaaatggactattatttgctacagatcaaaagttgttggaaactatattacacagataaatagaattgtcctgcaaataaaggaagtaatctcttctctgtttgagataccatgcagtatttgtccaacttgtacaaatagttctgatccatgagaatcctccactttcaacttacttgctgctatatcccaactattataaggccatggagaccagtagcctggtttccattatctttgctctgtttttttttatggcatggttgacactacctccagtagcaaagagttaacttgtcatcagagctataaaatcacaatgataagtgaaaagttctcttttgtactttagcatccaagagaagtgtaattcccaactacaatgctcaaaataatagagagtttttactttgggcctgaaaatacttataggtcaggtctcctagttgggtccatgctgttgttggtgttccctcccaagtaaatacatactgaatttagcaaattattcatttgtgatcctctgtgccatctaaaaatatatatagtttaaaacgctggccaggcgcagtggctcatgcctataatctcagcactttgggaggctgaggcaggtggatcacctgaggtcgggaattgaagaccaaactggccaacatggtgaaaccccctctctactaaaaatacaaaaattagctgggcatggtgttggactcctataatcccagctactagggaggctgaggcaggagaatctcttgaacccgggaggtggaggttgcagtgagccgagattgtggcactgtactccagcctgggtgacagagtgagactccatctcaaaaaaaaaaaaaaaaatgcttatcattgcacagatagctgtacagttttttattatttatgataacggtaactgactttttgttaaagctggtttggaatctggaggttattttaattttgataactttatgattttaacttttaattttaactttatgatgtttgtcataaaagagtggaatgtgctcctattttgagatggaaacatttcggcagggagagagaagagagacaccaaaccacctaacagccaggttccaaggggagattcattcagcgtctttgaagcattgttagttttcatttgaggcataaattggaaacttatatctttctttggagtaggaagtatttcagacagaaaaaaaatgattgctacaacaacatcacgaaaaagaacagaaggtttcatgaagagtaataaagttaagtttatgaattagagcttcagatgggaaatcttatttggacagtaaatggttaatggtacagggacaccatgatgggggatctttgcagcattgaaaaaacacgcgtccataaatccttctctagcacttctttgtgatcacagagtcaagctgaggacaatgatggagtgctccagttcatccgaagtgcacgagtcccctttgcagcagactctgacattcccggcccctctccggagtgttatcaacatgcagtcagtgctctctacgtcattactttaaaaacaaaaactcggccagcagcagttcagtacatcttcaaagatcttgacttgtaattttttcccctgcatcttctctattgagcacatgaactgacatctttctacccccaaataatcagttctttccccctaaataaaatgggtaatccaaaaaagacccatcaaaaggaagctaaagatagtaatgcctaggtagtttcgggaccagaatgattgtctctaaatatgtacatgtacagtgattacgtgtttaaaatgtttaatgacttggagaaatagtgtgttgagtggagaaaaatgagatttagtagagcataacgtcaacagtgtaaaaatacatagaaaagcaagcaggaataaaggaatgtttaaataaattacaaagataaaaattaaaaccgtaattcagccgagcctggtgggtcatgcctgtaatcccagcactttgagaggctgaggcaggcagatcacttgaggtcaggattttgagaccagcctggccaacgtggtgaaacctcatttctactaaaaatacaaaaattagctgggcatggtgttgggtgcctgtaatcccagctactcagaaggctgaggcagaagaatcgcttaaacccaggagatggagtttgcagtgagcctagttcgcgccactggactagactaggtgacagagggagactccgtctcaaggaaaaaaaaaaaacttaactagaacatttattgagcacttactaggtgccagctagtgctctgagtgctttgtgtgtattaactcattaatgcccccagcacctcttgaggtagattaaaatctccatctcggttttacatgcaaggaaaccagagcaggaagagcttcaggaacttgccctcctagtaaagatagaaagtagcaaacccaggattcaaccccagaaatattatatactatgtttgtgctgaatcttttttttttttttttgtttttggagatggagttttgctcttgttgcccaggctggagtgcagtggcgcgatctcggctcaccgcaacctccgcctcccaggttcaagtgattctcctgcctcagcctcccaagtagctgggattgcaggtgctcactaccacgccggctaattttgtatttttagtagagacagagtttctccatgttggtcaggctgttctcaagctcccgacctcgggtgatctgcctgcctcggcctcccaaagtgttgggattacaggcgagagccaccgcacctggcctttgtgctgattctatagtcttattttcacatcctatcagttactgtaagtaactcttgattccaagaactgtataataggaaagggtagcttccaattatctactcttgcttgataatgcattaattccacatagcctttaaaagtttagtaaattttaggataaattttcgaactgttatttcctattggctgttagaaaattgtgttgctcaaaggggaacatgtctattgtgccttgtggagattttcctacagcttttctggctgacccgtcacttgcactctggaactctcctaaaccagatacggcccaccacgtggcatggtgtggatcctggactttctgtcatccgttaggttcatattcttgaagcaagtctagaactattttctgagagattccctggctgttgttctgtgtttgggtgggttagtcacctttttaggtgagagacttgatttgggtacacagtttcacaaaagtattgtcaaccctgctggccaagtgactgacgtgctgggcatgggagcacactccatcggcatggcagagtggattcactccatgccattgccagagaataggactttgaaccacagccacccggctttttctgaaaggcctgcttgggcaatgatgcctggagaattatctgaagaatgcagtctgtccattcctctggagatggtctagtttttatccccagaccaagctgaacctcttagagctgtgcatttatattgtgtggaattgccttcagcgacgtgttctataacgtcgtgttcttgtcaccttttgagggacactggtgctgtggggaagatcctcaccaatacgcaacagcagggccctgttctctcacctgccatcccctctggaaagctcacagagagggtttcctgggttgctccttttccaagcaggacttctactgtagacttacagctccagttacaagcctgtgtgcttgtctgtttccccacaaggtgttctgacctgggagggaagggacggaatcctattcatctctgaatcctaaatgccaggcctagcacttggcacacagtgggttccagttgtggaatgaatttttttcagtcctgacaataaatgttggggttctttagtttgtttgttgttattgtctgttttatttgtattttggggttttttgctttttcccccagggaatgaaaatgccttctccatatgaaccagacatatcctggggctggggctgagtgtcctttgttgtttgctctaattataactaatgaacagttcagctctggtaattgtaggcttgctggacccagtgcctgccttctaactgaatcttgactctgctccattatgtattttccatgatcctgatttctgtcaatgtaatttttaaatttcattctaaggcaaacctgctcatgttcttcgctgaaatcaacctcccctttctggaatggacatatggaaaattggaggcaaaatataataatggtggtgactcagactgctttaaggcctgagagaccggccaggtactgtggctcacgtctgtaatcccaacattttgggaggctgaggtgggtggattgcttgagcccaggagtttgagaccagcctgggcaacataatgaaaactcatctctacaaaaagttactgggctcagtggtgtgcacctgtagtcccagctactcaggaggctggggtgggaccatcgcttgggcccaggaggtaaaggctgaagtgagctgtgattgcgccactgcactccagcctgggcaacagagtgagaccctgtcttaaaaaaacaaaaagacccatgagacctagactccccctgtcaaaaatactcacacacacacatatacgataagatagtatttctaccttttctttctcaaaacattccacagaacagtcttaccttcgaggagagccgtatgcatgaccttttgtttgtttgtttgagacggagtctggctctgtggcccaggctggagtgcagtggtgccatctcggctcactgcaacctccgcctcccaggctcaagtgattttcctgcctcagcctcccaagtagctgggattacaggcgcgtgccaccatgcccagctaatttttgtatttttagaagagacagtttcaccatattggccagactggtctcaaactcctgaccgcacattatctgcctgccaccacctcccaaagtgctaggatttcaggcataagccaccatgcccagctggaggccttatttttactgctattcagagaacctgtggcttatccatggagggcttaagctttgccttttctcttgctcatttccatacctagcaagagcttaagctggtttattgcactgacattctaatgaaatataaatagcttctcaacagagagataagaaagaggagtatctagtacagcaagaccctctgggtgggtcagggccagctggggccgtgccggggctctgagtggaggaggtggcgtgggagcactgatgctcgggctctgtcacatccgtttttggcatttgtcctggcaaaggctgcatttctgatctttcagaaagctgtgggtacactgtacagaaatgtgttttgcttgctttgaaggatgacctactggctgacagccagccagaattaattccatatacatttgcagattttcagtatgagagacggcaattagcctacagaaacccatttaacccccgaggtggagctgtatggtgaagactgttatttatgggagtctgtgtaatttgcctctgtgacaagggacagccatggctcaggagggcccacgccaccctccttttcaaggactcctgcccctgcctgagtggcttggcctggcctggccatgtgagtcttgtggacacgtgcacatcagtcagggacccctgtggtatggaccaaagggttgttttttactgttttaacttatttaatagcatctcatcagtattacaggcatgtgccgccacgccaggctaattttttttgtatttttaatagagacggggtttcaccatattggccaggctggtcttgaactcctgacctcaggtgatcaccccgtgtcagcttccaaagtgctgggagtacaggcgtgagccaccgcacctggcccacagagcttctaaaggaaatgtgttggttttttaatcaaagttgaggcagtgcctcagtgaggggcaggctggagcagtggtaagcgcgctgaaggagtcgggctctctgggcccaaagtcctgccctggccacagagtggctcccttccccctgaggtgggatgatgttctccagggccttttagctccaggctgctacagttctaaactggtggtggtggtggtggtggtggtggttgtggtggttgttttagatgcagtctcactcttttccccaggctgggatgcagtggcatgatctcggctcactgcaaccttcgcctcctgggttcaagcgattttcctgcctgcgccaccacgcacagctaatttttgtattagtagagttggggttttgccatgttggccaggctgctctcgaactcctgacctcaggtgatccgctcacctcagcctcccaaagtgctgggattacagatacgagccaccgcacctggccatgattgttgtttttataaaatcagaatataaaatttgaaaatgttcttttttggtgagaaatgagaactaccaaaggagtaaaatgctctaaaagccatcaggtccttcccacagtattgaggctctgctcttaccattttgttaaataagttttgttcctaacactctttgtgatatgaagtattcttgctaatcaagctgcccggagactggcgtttcccagagcagtttcgaaagtggaaatgatgctgcatttcctacccacagtctggagggtggctgtgctctctgcacggtgggtctgtgctgctcagttacgggatggtaagggaaggctctaactcggtgtcttacaccatgcactagggagtcgcccgctttatttacgagcgagttgatgctttcagtgggttttggctttgcctggttccagactcaagcccttcctctaatgtagggcgggtacaagagagacttgagcaaggatattgggatttaagggaagggcagtgcaggccaaggtcagcaagaggacatctctaagatgaacagcactgcatttgtgggaagcaaccctgccataaacaactcagttaacgtttacatagtaaataattgcattgccttgggctggaatagggacgccagaaggtataggaccatgtggaattcagaaaagggagccctgaagaatgagattttattgttcttaccaggagagtccaggtgctagagttctctccttgtaagtgactaaccttctcccttttggtacacaatcctcagatgaacggagatgattcattaggccattctagcttaatggatgcatcactgtgcaaccacgcaaatgcctcatttctgattcactcatttaatatttattgaggagtgctgggtactaggccattagaagaacaaacaacaacaacataggcctggaccttgcacttgcagagttcacaggctagagaggcacacaagttaaatatagagacagctgaaagagctgacgtctgggacagagggagccccctgctccaggagccagggagcagatgccatggggggctggcagggatagggaagtcaggccaggaatggggttacctaagccggatcatgaaggacgagaacagactcaccaggggtcgagggacaaggaggcagcaagtccgcagcatgaaggcaggagagaacattgctgtaagcctttaccatggccactgcatggggaggaaacaggagatttggaatgagctgtgacactgggcaggaaagcaagacccaggtcttgtgaggccttgagcgtcaagcttaggagtcaggacctggggattttaagtacagcaatatcataattacattcatgtttcagagagatcactcaggcagcagtctggaaggtggagtggaaaacggagaaattagtcatgaagacctatttagaaagtagtaggcaagaaatacccagggcctaacctgaggtgtaggcaggggatgggaatgagagcaattaccgaactagaatgaactaaactcaatgaacaggagcggggaagagggaatgcagaaatggctctcagatttctgacttgttcgcttaatgactggggttgtcatttgtttagataagcaataaagaacctagaaacaattttaggcggaagatagttgtgttgggagcccctaagaccatgatttattacagcacaaggatacaaagcaaaattagcaaaaggaaacagcacgtggggtcaagtccaggggagctcaggcgcaagcttccagagtactctccccatagagtcacacaagatacacttagttcctccagcattgaactatgacgacacctgaaatattgtctgcagaagaggctcattagagactcagtccccaaggtttttattgggtaatggtcacgtaccaaatttcagtctctcagaacaaaagcaaatgttcagcatagaccattttgtttgtgaaatttaggcacagtgagcccctcttgtcagttagaggatagttgaaaccctcccacaatccaagttctcagactcaggcctgctacattatttctttcctacacagtagtggatttggttactaacatgttggatctgaagcatttgttgtaatttacagtgaagatgtccactgcacagttccgtattgagtctgaggttcactggagacatctgtgctatcaatgaaagtttctggagtcattagcccctcaaagggtcattaaaaccaggtcttctagagagaaagtctaaccctgtattcctttaaaccaccatagagaccatctagttcttcacattataaaaatgagaaaactgagtccccagcgatgtggcttggttgcacatttttctatttcaagtctgttactccttccatcataccagactgcctcacaaaatgacaaagtcaggcattgttcataaaagaacaaaatggcatttaggttataaatcaggcccttgtaagtttggttaatacaacttatttcccaaagatcctggtcctcagaccctcaaaaggagagctgatcacatcaaggcctctacctggaaggaatttctaagcagcctctaagtcaactgttcatgttcagtccaccttgatttacaaagaacagtgaatcattaagacctttctctccaaggccgggtgcggtggctcacgcctgtaatcccagcactttggaaggccgaggcgagcggatcacgaggtcaggagatcgagaccattctagctaatacgatgaaaccccgtctctactaaaaatacaaaaaaaattagccaggcttggtggcgtgcacctgtagtcccagctactcgggaggctgaggtaggagaatggcgtgaatccggggggcagagcttgcagtgagccaagatcgcgccactgcactccagcctggagaacagagactccatctcaaaaaaaaagaccttttgctcctctttgctcttgtgtctgtttaacagatttttatgttaacaggcactctgtttgccactaggaataaaaagataaatgggacaaagtctttgccctcaagttacttatattctagagccaagaaagagatagatgaagaacacatcttatatattaggactgtgttgggggcaggagtaggcagagtaaccctttggatatgggaaatgaaaataaatcaaactcaaaacaagtttattatttgcttgaagctctggtaaaagataaagtgaaacctgcaaactgtaaaatgaagttgctgctacacatttctccagttttggatttcattcttggatggcctttaacttggatagaaggatacaagacagccatatatatatatatatacagctgttgctctttaagatatccacttcaccctgttgtggggtgggaggaggggggagggatagcattaggagatatacctaatgtaaatgtcgagttaatgggtgcagcacaccaacatggcacatgtatacatatgtaacaaacctgcaccttgtgcgcatgtaccctagaacttaaagtacaataaaaaaaaaaattaaagaaaagagatccacttcgctcagcacatgtgatttggctttggtctttggtgttaatttggatgcctaaagaactgactttccttgatgctcactccagcctttttaggactagattggatacatttacatgtttgctggctgttttttctacagtcacacatcctacccataataatattgcaatattctaagttgtcttggaggatatcatcaagtaggtgtcaagtaaaacttaatggtagactgtaaattttaaaacaagttacaggtcatttgtgtagtctctctctctatatatattaaaagaaacaaaacttttccctcttgaatctttattcctatctcagcttcatttattgcctcgtttgtcatctaaatggtctttgttctttcagctttcaaacatgattaattgacattgtgcagcatagcacagggaaaaggctgaatattttgtatgatgagtaatctagttaaacgcccatctttcttttcaactttaccaacaaatgtgtcttatgcagatgtaagggcggtttgcttatttccctgttcaaaattttatgctattagcctagcatagcatgtttcttttccattgagctagccaaaaataatattgacaaattcatgaagccttccatctgatactgttgcaaacttatgcaaatgtattttagactgttaagggaatgtaagaattaaataattaaacatccaaatgtcaagaatgggataggaagaagtaactggcctcatgttggaagttaatgaaatatttgaaaatatacctttaaaatcaaagacatgaatttgtgttttgggtttttttttttcagatttgaataaagcagagtataatattatagttgctgcaggaagttatgagcatttctggaagtgcttattttcagcacatgctacttagaattttaaaggacattcagtgtatctttgtcatgaatctttctactgggaccaggccactcctggatgaactcacagattgagagcttctcaaaatgtaaaatcaaattgtcttttaaaatatgctattttaaagttctggagaatcaatgaactttaaatgaaaatcggccaatacttggcaaaaagtcaatttgaagagttgtctctttataatctctgatttcacttatagagcttgcttccaaaaaaagtactacgtatgtcataaatctgaaatgttttgcttttatgccatttttaagtcctgataaatattcttgaagtgttaaattattattattattattatttgagatggagtcactctgtcgcccaggctggagtacagtggtgtgatcttggctcattgcaacctccgcccccccggattcgagtgattctcctgcctcagcctcccgagtatctgggattacaggtgcctgccactgcatccggctaatgttttgtatttttagtagagacagggttttaccatcttggccaggctgttcttgaactcctgaccttgtgatccgcctgcctcggcctcccaaagtgctggaattataggcatgagccgccgtgcccagccagtgttaaattatttttaacttgttagaaataattgtcccacaacttactgaaggttggtttaatattcactattgttcccaaaaaactcttaaaatattaaaccaactcatagctcataacttttcaaggtagcaagtgtttgctaatcttaaaatgtgttactattctttttttgttttttttttgtttttttgtttttttgttttgagatggagtctccctctgtcacccaggctggagtgcagtggtgtgatcttggatcactgcaacctccacctcctgggttcaagtgattctcctgcctcagcctccccaagtagctgggattacaggcgtgccactacgcccagctaatttgcttgtatttttagtagagatgaggtttcaccatgttggccagactggtctcgaacccttgacctcaggtgatccacccgccttggactcccaaagtgctgggattacaggtgtgagccaccatgcccggccactattcttaagtgaccttctgcacatctctgtagttttatgcctggtgatggcgtttaatttaggagtatctggcatgccactccagtctgacagctaggggcatgttagcaaagggggcatttttcaggtgagtgggtgagcatagccgtgctgaccatctttcctatccagagggaaggcctagcagggactcacgccatcttgacttgcctgccccaggctccctctcactgctcccctggcctcttcctcttctccagacaatggggccttatgctcgctgtgtttgtcagaactctcttgtggttgtggctgcaagtaagagaaactcaactcgagcttattcagaaagaggggatggattgacccagataacagaaaagtgctaggctagatctggccttagccacagctggatccagccttctggcatttgtgctccgttcctcagccctgccccactgggagtgatgccttctgttcacagtgtgatctgcttcatactcaaaactccctatccagaggaagaggaatcttttctctcccaccatctgcacagcagtattcaggaatcccctgccaggctctgttggcctcatgtgccctgtcctaatccaccactgtgcccagccagggtgtggccatacatgcccatcctgtgcatagggcaggagcagacccacctgcaccacatgcggtggccgccatgaccacaagaccaggataggagtgctgatcaggccagaccccaagggctgttgctcagaccatacctggcctgtagagtagaagaactaaatgtctcacacaggcaaagactactcttcaattcctttaattgcaggtgtatgttggagtccatgaaatacaaagttattgagaagcataactaaatttatagtagctcctcattatatattttcatgttgataggattctgcccccatgggaattaattttcttcatcaaaagtgatctccatactcacaaacactgaatagctttgggcttttaaaaacaatgttttggctttaaaagaaccacaggaggctgggcgcggtggcttacgcctgtaatcccagcactttgggaggccgaggcgggcggatcatgaggtcagaagattgagaccatcctagctaacatggtgaaaccctgtctctactaaaaatacaaaaaaatcagcctggcgtggtggcaggcacctgtagtcccagctattcaggaggctgaggcaggagaatggtgtgaacccaggaggcagagcttgcaagtgagctgagatcatgccactgcactccagcctgggcgacagagcaagactccatctcaaaaaaaaaaaaaaaaaaaaaaagaaccatggcaaaagtgtcctttagccgggtgcggtggctcacacctgtaatcccagcactttgggaggccgaggcgggtggatcacgaggtcaggagattgagaccatcctggctgatacagtgaaaccccgtctctactaaacatacaaaaaattagccaggcgtggtggcaggcgcctgttgtcccagctactcaggaggctgaggcaggagaatggcgtgaacccgggaggcggagcttgcagtgagccaagattgcgccattgcattccagcctgggcaatagagcaaaactccgtctcaaaaaaaaaaaaaaaagtgtcctttagtctactgttggttcttccaaagagccatcctttcgctgatgctttaggaactcccaacctgggtcctgtcaaggataagctctcatcttattcccacaaaattcctagagttactcatcattttcctttcatattcagctcattaaagcagtttgtaggtctctgtagtccatattagtaagtgttaaaaatgtatcaatttgattttttttttttttttgagacagagtcttgctctgtagcccaggctggagtgcagtgttgcaatcatggctcactgcaacctctgcctcccgggtttaagggattctcctgcctcagcctcctgagtagctgggattataggcgtgcaccaccacgcctggctaatttttgtatttttagtagaaacggggtttcaccacgttggtcaggctggtcatgaactcctgacctcatgagccaccgctcccggccatcgatttgattattataaaatcaggttatattggtttgaccagttaaaaacatcacaggttatttaatctttttatttatttatttatttattgagacagagtctggctctgtcacccaggctggtgtacagtggtgcaatctcagctcactgcagcttcgacctcctacgtccacgcaattatcgtgcctcagcctcctgtgtagctgggattccaggtgtgcgccaccacacccagctaatttttgtatttttagtagagaccaggcttcaccacgttggccaggctggtctcgaactcctggcctcaagtgatccacccgccttggcctcccaaagtgctgggattacaggtgtgagccactgtggccagctaatcacttttttaaatcacaatttgtgttacgttcatgagtaatgggtgccagaaataatgttgtgtgttaaacataaatgtagatgggtaaccatgtatacaaatgtatatctcctcaacccagagagtgaaatttccccaccccagtgaccctgcctcgctgtatggttcattcttctccaggaattgaaacatggtggcagcctgccagcttggcgttaccattaattcttattctcttcccctgccgatgtcatggggacaccagccaaatgaactctgatgtgtctcacgtaatgcatgtggacttctggtgcatgtaaacagagggtggttattcttgattgcacatttgtgatttttagtgaggctctaagggagaagcaagaggacttgaataacagatttattctcgggcactgctacatgaaagagatgagtaatgccaaacaaataacacaattctgattcacgccattggcaatggaggagacttctgggtaaacaaaccaaagtaacagctagaatgcagatctgatcacagcagtgtgttttgattcagtctaaagatgacaaagaaaagtttctgctggtcctatctgtagcaacaagggcctgcccgcctgaccacactgcagtggaacagccacattgtgattttgcgggcctgaagcctttcgtctggtgaccctttaagaggaacttgagccaagatcttatcagtgatggagatggagacacctcaggattttccagtatcgtttttcactttttgttcttggacatagttaataacgctgccaggtctttcaaatgctgaggcatttcctcatagctccaagtagctgctgcgggtcagattctgcttgaaccgagggttcaattacaacatccgtatgctttccagcccactctctgacctttgttctttttttcagtactttttcaggctcttaatgtttccatccactaatctcaggagactctgtaaatattctgagtatacatagcccaattacttttgaaaagctaatttaatagaaacttcttgatatgaattgaataaattttttaacttaaaaatcatttacttacaacttaagacagttaaacttgagagtatttgaaagctagtaaacttcagagctttcttcagtaggcacgaactttaccatttttctgacactcagcacggtcagcaatgacacattcattggaggactcatcaatatccctaaaaatagtagcagtactcgtgcacagcctgatttcttttgaacttggctcaatttcttggaagcattgatcatgggatcccgctttgattccttttctgtagactagtgccagtttgcccagtttcattacatttttggaaagagctaaaactatggtatcgttttattgcagtcctcacatcaatcataatttggagcagtcttggtgaaagatgaggaattcagactgggatcctgggcaaggcaggtccagggggcaagagggatggaatgcagtgagtacttattttatatcataagtacagccacctcagcctcatgactttttagccacggcttcattccaaagtgaccacagtcataaggcccaaaactatcttctctctctttctctctctctctctctctctctctctctctctctctccctccctctctctgtcatagggacctccctaatcctccaggttgtacagccaggaagggtaaggtattgtcaaaaacaagtgaggtacccccttgatagctcagtgggccagagggcctctggatgctggctgatcatggcaaaaactaaatacagaatccatacagtggattctctgtgctttttctcttcacccctccttacccttgaccaaatttctgactgtgttattttcttattgcagtcctccctgctagatatacaactttgactttcatcagaagaaagtgctcccattgcattattagctaaaccatgttgcagtggcaacgctccttcttccagcttgcctcggtgtttctgtagttagcatcaggtgtccttggttctgtttaccagcctgtccagggatcacttccctggtgggatctctctggtgaccctcatctcagagctcagcggtgcctttggggctacttgccagacaactccatgtgacagagggccaggtccaagtgctcgatcaccccagccaccatttcagagttctcggattatagatccctcaacgagtcccagtgagacaccgaacatgccatagaagctatgtttttctatttcagcacacagtaaaacactacctcttagatgtcgatgagtacatgctgcttttatgttgacgcagaggacctgtgttgactcttcatcggcaaggtgtcttttttttaagtttcaattgacacataccacctctggcccaagtggaccacacagttatgcatgccctttggtgcaagatacatcacgtctccaagaactcgggtgtttttctgatcatggagaattagattccacatatagcttgtatttaggatctgcagattaggttttataaattatgtttggcaaatgataatccacaaagtagattctaagttaaaatactataaagtactataatttatgtttaaatgtctttcaacctgagagttactctcccttagaagtccccaaaaatgctgaaaccacaccaggttgatatctgacctttcacttttggaaaatgtgtatattgttgaacctctaatctagattcggacaccatcaccaaccagcttctctctttcagttgccatctgcactttactgtttagtttttgttgtctttagggaaagttgtaaaatacccacattcttctcaagttcttcaagtcttttggtttttagtaaacccttttgtgaccttgtctttgagaacagaggtcaacaaacatttccttaatggactagatagtagatatatcaggacttgcagaccacatggtctctgtcctaactactcaactctgccgttatagcacaaaaccagccgtactcaatatataaatgaatgaccctgtggctgtgttccactaaaacttcataaaaataagcagctggccagatttgctgtgtgggtcttagtttgccaacccctgatctagaagaaaagagttttgtgtaatgtttgggtaataaaataaacataccaaaccatctcaggaatccctaaccttttcctcattgggaactattttcccagtatccccaagtactggtgggaatgagataaaaagggccaggcatgccattccctaaagcagatagccaaccctctttctttccctgtggaaatcccctctgcctacagggaggagaagcaactggtttggaagctgccagccagtccgtttatttagaaaattctaagcccagttccagatcactttgcgtcaactctaaaatacagccgcaaatgaaataaatgttgtttataatcctaccaagtctagtaggtgtgtatgtgcttgaggttaaacttttgtgtaagctccagacttactttaggtttatagaaaattacatcgcaattgatacaatggttgtgttgggtgatggagatagaaagagggagaagaagtgaaagtgaaattttggtcaaaattggataccaccctaataagccgggagataaggggtgctgcagaactgttttctgtgatacagtgcatctacattgataatttgtgttttatgtacttttaaaatgaggctttattggcttgatttctgtgagaaaaatcactaatgggctgatcgtactgctctacttcaacatgcaagagaattgctcagacgcttgtcagatgcctgaaccacatacttatttgagaatgtgccatcataggaagctttcattcaccaaggtcaccgagagggcagcccagggaagcacgttgaacttcacatggttctggccactcgtgtcagtagcaaagcaaggaaataaggagctgacttgcccaaaaattacaagttcagagaaaacggacttgttttgtttggaaaaggcagataacggagcagtaactaaagaatcctctttttttattattattgttgttgctcaatttataaacctaaacagaaaatgtgtgttgccttatttcctcttcttttctacagataactttcttttaaaacattctaaatattaagcaacattataagtacagatttttttttttttttttttttttgagttggagtctcactccgatcatccagcctggagtgcaatggcgcgatcttggctcactgcaacctctgcctcctgggttcaagcagttctcctgcctcggcctcctgagtagctgggattacaggcacccaccaccacatttggttaatttttgtatttttagtagagatggggtttccccatgttggccaggctagtctcgaactcctgactcacctcagcctcccaaagtgctgagattacaggcgtgagccaccacacccggctagtacagaattttttatggccccttttaaagactgcaaacctttttataccaaaaaaaattatttttcctgtatttattttacacattagtaaatgaatgaaattttggctctaggtttagaaagcaatttcattttaagctcattttactgtgtcattggactttttattaattttattcttgaactacttagctgaaaatcgaattctgtcattatatgtaatcatataatgcttctcataatgttacactttaattagatgcagttgaataataacctaaaaaatcttcatagtctataaaattcacacttatatttataagacaatattatctcacccattgatacataatgttatgttaaaagtacacaatatggccaggtgtggtggctcacgcctggaatcccagtactttgggaggctgaggcggcagatcacttgagcccaggagttcgacatcagcatgagcaacatgttgaaaccccgtctctaccaaaaatacaaaaattagccaggcatggtggcgcacatctgtaatcccagcaacttgggaggctgaggcaggaggatcacttgaacccaggggacagaggttgcagtgaacagaggttgcagtgagcggagattgtgcctcctctgcactccagcctggatgacagagtgatactctgtctcaaaaaataaaaagagtacacaatattatctcacccattgatacataatgttatgttaaaagcacactgcattctagagaaggtagagtaacagggtcttactttaccctcccacttgaaacaagtaaaaaactggacaaagtatatgaaaaatacatcactcagggcattggacaccaggcagcaaaaaacagtggcccctgagaaattggaaacaaagtgagtcctataattgtccttatctagaaaaagtttcctggctactgtgtagagagaaggaacccaggagaaagagctcaactgtctccctgagttgaagacagagctggggatacatcaagggaaaccaaggcagctagtttgcagaggtggaggaccggagaggagagaactgcatagagagagctttgcggatgtacagagtcctccttgagcatgcaagtgcgtactgatcaaagtgtggttgtgagaaaactacccatcaccagagaaaggatcacccgaaagaatgagggaacagtgcctgcctcccacacagtagccaagaagaggtgcctgttgccaacagctagagtgaaaacctctgaatgcaggggcactggttagaatactaagaagggtcttgccagacatccaatccaaaattagcaggcatgcaaagatctaggaaaataccacctaaaatgagaaaagtcaatcaaaactaacccattatacagatgatagaattcatagacacggacattaaagtagttgttgtgactgtagtttgcatgtttaagaaactagaagaaggatttaacatgttaaatagagacaaagaagatataacaaagatataaatcaaactgaagagatgaaaactgcagtgcctgaaatgataaaaaaaaaaaactgttaattaatagcagattagacattgcaaaagaaaagcctagttaacttaaagacatgcagtagaaactatctgaaatgaaacagaaaaaggctgaaaagaagcaagagagcaacattgagctttgggatcattttaagtagccaaaaatatgtaaaactagagtcccacaggagtggaaaaaaggaactgaaaaatatttgaagaaataatgggcaaaacgttttcaaatttgatagaaactataaactcatacattcaaaaaaatgagaacattttaaaaagagaggataaatgacacattatgtagagaggaacaaagataaattggctgatgatttcttgttggaaacaacacaaactagaaggtggtaggtcaatatttttaaagcagtgaaagaaaattcacagcctagagttttttacctggttaaaatatctttccaaaacaaagctgaaataaagactattttagacacgtaaaagctgaaaaaattcatcactagctaacctgaagtacaaaaagtgttacagaaattcctgctggcagaaagaaaatgataccagttggaaacctgaatctacccaaaggaatgaagaacaccaaaaatagtaaccgcatggatagaaagacttgttcttactgtttatcttaaaagctattactgtatacagtaattactgcataaagcaaaaataataaaaatgtagtatagcgttaaaaacatttagaagctaaatatatggcaacaataacacaaagtctaagaggagagaaatagaagcatgcttttgtaaaattcttaggctatatgtgaagtagtataactatatgtggtgtggtagtataattatatgtgaaggtagactgtgcaaagtgaaatgtgtatgtagtcatgtgctgtataataacgttttggtcaaaaacaaaccgtgtatacaacagcagttccatcagattataatactgtattttttactgtaccctttctattgtatgtttgcatgtataaatacttaccattctgttacagccacctactgtattcagaacaataacatgctatgcaggcttgtagccctggtgcagtaggctgtaccatacagccaaggtgtgtaggaggctataccatctaggtttgcaagtacactgtatgatgttcacacagtgacaaaatcacccagtgatgcgtttctcagaatgtacccgtctttaagcaacacaggactgtgctgtaaatgcaaggtaaccatttcagtaattcaacaacgttatagttaaagagttgtaaccttgttatagttaacaaagttaatatatagttatctacaaagtagataaaatgaaatcattaaaaataatccagaggaagcagaaaagggaaaaaggaacaaagaacagataggacaataagaaaaagaatagcaaaatagtagatttaaactcaactatatcgataatcacactagatataaatgtcctaaatacactaattaaaatgcaaagaatgtcagattggctaaaaatgcaagagccgactattactgtcaacaagaaaccctttttaaatctaaagacataagtaggttaaaggtaaaaggatggaaaagcgctaatactaatcaaaagaaaattgaattggtatatcaatatcaaagtagaactagagcaaagagtagtaccaaggatataaaagaggcttgtttcattatgacaaaggggccgtttcacgaacaggacatagcagttctaagtgtttaagcatataataacagagcatcaacataaatgaagaaaaaaaaagataaaattatagggaaaaatagaaaatccacaaatatagtcagaattttttaaacccctctcagaacaagtagagtaaaaatcaataaggatttagaagacttaaacaatgctacaattcagcttgactccacccaacaacagcagattacgcattcttttcaaacgtacacagaacatttgccaaaatagaccatattctgagtcacaaaatgtcttaataaatttgtaagggctcaaatcatacaaaatatgttctctaaccacagtgggattaaattagaaatcaacactgaaagacatctggaaacactccaaatatttggaaataagctacagagtgggagaaaatatttgcaagttatctatttgatataaggatttgtatatggaatactaaaactcaaaactcaatgagaaaataacgcttttaaaagatgactgaaagatttgaacacatatttcacccaagaaaatacatgaaaatatgcttaccatcacaggcattagggaaatggaaatttaaaccacagtgaataccgctgcatagctattagaatgtctacaattaaaaagattgaccagctaagcacagtagctcatgcctgtaatcccaacactttgacaggcagaggcaggaggatggcttgagcccagcctggacaacatagggaggagactctgtgtctacaataaaagaaaaagaaaattagccagttgtggtggcctgtagtctagctgctcacttgggaggatgaggtgggaggattgcttgagcccaggttgaggctgtagtaagctgtgattgcaccactgcactccagcctgcaagacagagcaagaccctgtcccaaagaaaaaaaagattgggctgggcacggtggctcacagctgtaattgcatcactttgggaggctgaggcaggtggatcacttgaggtcaggagttcaagaccagcctgggcaacatggggaaaccccaactctactaaaaatacaaaaaattaattgggcatggtggcacacgcctgtaatcccagctactcgggaggctgaggcccgagaattgcttgaacccaggaaacagaggttgcagtgagccaagattgtaccactgcactccagcctgggtgacagagtgatactctgtctaaaaaaaaaaaaaaaaaagactgaccataccaaatgttggcaaggatgtggaacaactggaaccctcatacactgctggtaggaatatataacagtaccacccccttggaaatcaatttggggtcgtttcttaaaaagttaaagtgcacctgccatatagtcaagacattctctttctaaatatttacccaagagaaatgcagtatatgtccatgtaaagatccgtgcatgaatgttcgtagcagcttttttgtaataatatacagtaagctttacactttgacatgtgcagtttattgtatgtaatttgcctcaataaaagttttaaataatacaattttatccaaaataaagttgtgaaaagtagaaaaatgaggaaaaagtttcaaaggttagaggggtcagtccaggagacctaacatctaactaatgggaattccaataagacagaagaaaccagaagggaagaaattatcagagaaataatcctcagccttccacccaaaattttctctcctagaactgaaggactcccaaatcaaaagggtcagcaaaataaatgtatagactcacaccaacacacttcatcataatagtaaaaagaacagtagagtcaaaaagaggatactaaaagctttcagagggggaaaaaacaaaacatgcaaataatctggaacccgaatggcatcagacttttcaacagtaatactgggctgggtgcagtggctcacgcctgtaatcccagcactttgggaggccaaggcaggtgaatcacctgaggtcaggaattcaagaccagcctggtcaacctgatgaaaccccatctctattaatagtacaaaaattagcttatttcttaaaagccagcaagggggatggttttttccttgggctggtggcacgcacctgtaatcctagctactcgggaagctgaggcatgagaattgcttgaacttgggaggtagaggttgcagtgagccaagatcgtgccactatactctagcctgggcggcagagtgaaactgtgtcttaaaagaaaaaaataaataaaagttatcaaaaaacaaaaacaaaaccgtaatactggaggctagattacaatagagcaatatcttcaaaattcaaggaaaatggccaggcgcggtggctcacgcttgtaatcccagcactttggaaggccgaggcgggcagagcacgaggtcaggagatccagaccacggtgaaaccctgtctctactaaaaatacaaaaaattagccgggcgtggtggcaggcgcctgtagccccagctactccggagaggctgaggcaggagaatggcatgaacccaggaggtggagcttgcagtgagccaagatcgcgccactgcactccagcctgggcgacagagcaagactctgtctcaaaaaaaaaaaaaaaaaaaaaatcaaggaaaataatatacccagctaaaccatcatgaagtgtgataagaataatgacgaagccagacattttagaaaaatctacccctagcgccctttttctcaagaagccactaggggagtatttcactcaaatgagcaagcagaggaaggaggattgcttgagcccagcctgggcaatgtacagagaccccatgtctacaaagaaataaaagaagaaaattagccaggtgtggtggcctgtagtcctagctactcactcaggaggatgaggtaggagaattgcaagtaaatgagcaagtaaaccacagaagaatattaattttctcttttttctgctgcataacaaatgagcacacatttagtggcttaaaacagctcacatgtattatcttccatttctctgggtcagcttagctgggttctctgcttcagactgcgaaaattgtctcatctgaggcctgggttcctcatcaaagctcatttggcagaattccattccttgaagttgtgggactgagggcccagctttttgctggctgtcagctggaggccacacccaggtcccagaggccatgtgggtttttgccatgagaccttctccttcgtccattcacagcatggcagcttatttcttgaaagccagcaggggggatgggttttctctggaatctgttagatggagtgacctcccttcactgtcactcgtgccatattctgctggtgagaagcaagtcacaggcctcacctgcactcagggagggactcactgggagtcgccgccacagtgtggctccaggaatggaaactaccacactgcagaggtgcagggaatccccaggattatggtcaagaaagagcccactaagtgttttgttcagtaggcctgcaggatgaagggtgccaggaggatggctccatgaaagactgagcctatacgtgaacgtactgaaagctgacttacagttcagccagtgtggtggtatgtgattgacagcgccctagcaagatgagcaacaaagatacaagactccagcagaaacaagctgcagaagaacaggagtgtaatcaataaatcagatggccttgctgtgaacggttacatagctctgataaatcctgatctaaccaaaagtcatgacagctcgatatttgggagctggagggggtggggagtaggggtagtaggatatgaaggagctaagtccccattgttgatattagaaatccagtgggtaacatctgaacggcaagaccaggacagcagcgaaaggcaaaaagacaccactgagtgttgacagtggctgcctttcaggagtgggaatgccactgggggcagggcagtggggggcagggaacaggtttttctgtttgttttttgtttgtttgtttgttttgttttgagatggagtttcactcttgttgcccaggctggagtgcaatggcatgatctcggctcacagctggagtgcgatggcgtgatctcggctcaccgcaacctccgccccccggattcaagcaattctcctgcttcagcctctcaagtagctaggattacaggcatgcaccaccacgcccagctaattttgtatttttagtagagacggagtttcaccatgttggtcacgctggtctcaaactcccgacctcatgtgatctgcccacctcggcctcccaaagtgctgggattacaggtgtgagccacttcgcctggccatgggaacagtcatgttgcatagtaagccctaaagagcagtgtgatctcttaagccagcacgtgatttactttggtaaaaattaaattaaaaaaaaagaaattaggccaggcgtggtggctcacacctgtaatcccaggactttggagagccgaggtaggcggttcacctaaggtcaggagttcaagaccagcctggccaacgtggtgaaaccccgtctctacttaaaatacaaaaaaaatagctgggcgtggtagtgcacatccataaatcccagccactcgggaggctgaggcaggagaattgcttgaacctgggaggtggagatttcagtgagccgagattgcgccattgcactccagcctggatgacggagtgagactctggcccaaaaaagaaaaaaataatcctattggtctcatagtgtttctctgtatttttaatatactgtgtatgtgcttatgagaaaccgaaagagaagtgatttgtgaacgatttgaggacttttggtccacgtttttttctcccacttatacttgtggcataatccagaggaagaagggcagctgcggagtcccagcagtgttgcgggtatcagggcagccagtgagaggatggaggagaaacccaggagagggcagaggaggagggacagctgtgcccacctggtcctttcattgttgtctgcctctgcccttgcagttagaaaaagagtgttctgtgtatagaagcctttgcaagtagcatagttaggagtctttcggtccaggaattgaaggtgctaaagcaggaggaaaacatacatagaagaaaggaaatgtccacataagtaagtgtattagtctgctagggctgccgtaacaaaagaccatagactgggtggcttcaacaacagaagtttattttattttctcacagttctggaggcgggaagtccaagatcagggtgctggcagggctggtttctgctgaggcctctcttcttggcttgcagacagctgtcttccctgtatgtcgtcttctctgtacacaaacatccctgtgacctcttcctcttcttttaaggacactcagtcctattggattagggccccatgcttatgacctttttgggttgttttttgtgtttgttttgagatggggtcttgctctgtcacccaggatggagtgcagtggcacgatcatggctccctacagcctcgacttcctgtctccaaatgtagtcgtattgggggattaggatgtcaatataggggttttgaggggatgcagttcagtccattatatacagtaagccacttctagacccagtctgaagtcctgagcattcagctggtatctggagtggatcacctaagaaacattacagaacaatataggcctctggtatttaaaatagtttaattacgtcacagggtagtcctgaattctttcctacttcagccagtcttggccagccgagtttcagggtagtgatgagcactgatgaggtgactcccccttctccaaactcttcctttgccactgtcccaagaaaaccataaaggggaagtttaaatgatggatgtaattttcctgacttgggctgggcgcagtggctcacacctgtaattccagcactttgggaggctgcggtgcgcagatcacctgaggtcaggagttccagaccaggctgggcaacatggtgaaacgctgcctctactaaaaatgcaaaaaaaataaaaaataaaataaaaaatagccaggcatggtggcacacgccagtaatcccagctacttgggaggctgaggcaggagaattacttgaacctgggaggcagaggttgcagtgagctgagatcttgccactgcaccccagcctgggtgacagagactgtctcaaaaataataatgatttccctgtcttatgtttttctactacacagcttattatctctgggcaggagctttcccagggtcggaggggcaagggtctagttgtgagggagagaggtgaaagcaaaagggaaatgctaaatgacatggcacagcaagcaaggtctaggcagctgcgcctttgataacaagctgcttgaagagaaagaccagatcggctaagtgaaagcactgtccatcctccccaccccttccttcctgcttcctcctcttcccatctcctccagcttctccttaaagggactaccgaatgatgatttccttgccagtaggaccttgacataaaacccaacccacaacatcacagttgattttcaagggatgagcttctcagaaaccagaatttaattacttaattttgagtttccaaacaataaaatatattattaaattgatttgttttccacacgtagtggagattttcatggtgtgctacctgtcggtcaaacggctgatgaatgagtatgtcgcaaaaactctaggtgggaatatgacacatgaggaatggaatttgtgcttcagctcttcccagcatcttcttgggctgcacaagagttggtagtctttcatctcctaaggactgaagggccatttagaatcacacctgttttgagtttatagtcacgcttctgaaactttctctcttacagccttatctgacctcaatcaagctacccctgttcatttaaatactttaggtcttggctattggtttagcttaacatttgattgccataaataagaactacagaaagcgtgacttgtaaaattgtagacccagaaaaattagggaacaatctcataatactaatgaaaccttttttcccataaaataaatacataattagatatagaagattttttttttggtttaagctatcttttcctatttctatcttaaataatttacaactctcctttaatccaggcaattatcaattctataataaaataacaacaatgggtactgtgtattaaactctaaactagggtccttcatctcatttgaattttgaaatgactccataatatattgttatactcatgctgtagttatagataaagaacgagggctgacctttgacaatcacaataaaaaaaaacaaaacaaaagaagtgaaggctgagcgaagtaactcacccagcaagatgcaattcgtatagggtagagtcccctgtctcccgataatgctttgccccacacctgaaagtcttgatctggttcccattacccctcagactttgggtccccagtagaacctttgcacttgcagttctccttcctaatgggctcagggaaactcacatgactgcctggaggctgtttctgcacctgtagatgggaatgggcaagtctctcccgactcacttgtctcatagtgttgttgaaaggctcaggtgtgatcattacagtgaaataaggaaaggcagggaagaatctccatcattctccaaatacgaagaatgaaatgcaattttttttttttctttttgagacgaagtctcactcttgtcacccaggctggagtgcagtggtgccatctcggctcactgcaacctctgcctcccaggttcaagcgattctcctgcctcaacctcccgagtagctgagattacaggcacctgccaccatgcccagctaatttgtgtatttttagtagagatggagtttcaccatgttggccaggatggtcttgatttcttgacctcgtgatctgcccacctcggcctctcaaagtgctgggattacaggcgtgagccacagcgcccggccacaaataagtttatacccttgtagtcatggcctttcttttatctttctggtaatgaataaaaatgaagcatataagtgacagagaaaccagctacttgatcaatagtggcattgtttcacaattgtctgtattggattttgccaacccactagagagttaccaaagcacatttctgacataactatgattgatttttttttaatttttgactaaatatgttactttgactaaattggttacttcattgcataatggtgaccatttacacttttcagataggtacaaaaaatctgtgtattctagctggccatgaaagagtagcaagcctgttatttttaagaaaaaagctcgagtagttactgtatttgtatcattttggaaatctctcatttttctaatcagcaaaatggggataatgtaaataacaataaccctgacctcacagggttcttgggattaaatgagatatggtgcatacaacgtgcttagcatggcgcctggagtatggtcagaacttaacaaacacaagttataaatgaggtcccgaaatacaagaaattcacttcctcagaaaccttccttgagcctggctacatctatagctacattttctacatgttaaatgcctccctcagaagtgtcactgttggagttgccagggcaccaatttattactttgaaaatagataaataaaagaatcaagacaaaagaaaaaggtgctaccaaagaagacattctgtcttacactggatcacacgagatgtggatatttggcccggaactgctcacatgggtcagcaagcctgagaatgaccgtggagagaaatggctggggctgcaggactcagccaagcctggcacgcgtgtcttccgggcaccggagcaggacgttgtctgaaaacatgaagaatgaaatggaagtaatgtaatacctggggtcggggctgggggaagctttctaagtacaggcagggtctttctatgttgcccagggtggtcttgaactcctggccccaagcgatcctcccacctcggcttcccaaagtgtggggattgcgagtgtgggccactgtgcctggcctaattactgattttaaatattaatctttctaaaagtcaaactccagaactgtgcatgtagaactatccaatttctgtatataactatagaaatatatattagacgggccgggcgtggtggctcatgcctgtaatcccagcactttgggaggctgaggcgggcagatcacgaggtcaggagatcgagaccatcctggctaacacacggtgaaaccccgtctctactaaaaatacaaaaaattagccaggcgtggtggcgggtgcctgtagtcccagctactcgggaggctgaggcaggagaatcgcttgaacccgggaggtggagcttgcagtgagccgagatcgcgccactgcactccagcctgggtgacagagtgagactccatctcaaagaaaaaaaaaaaaaatatatatatatatatatgtatatatttatatatgtatatacacacacacacacattagataagcacattgtttatataggaatcaaaaattacctgtgagtaatttttatttatgtaatttaataattacataaaaattatttgcagaggttacctctggaagcagtattagaagtggaggacttttttcttctatgttgaaaatattttaagtaaatttttaaaaacgaatagaaatttaatcaggaacaggctttctaccattaaaaaactttatagtcttctttacaaaagaagagaaataattgtacttgttcagtcattcaaggccactgaaataattggcatagcttgagctctgtagtactgtcacaatatgcaaacacagtgtggtaatttttatagtaattgaacatgacttacgtcttagaaagtcataagttaggaatttattctgttcgttcttttgaagtgaaaagtaaagaaagcaaaacattttttggccgggcgcgttgtctcacgcctgtaatcccagcactttgggaagccgaggcgggtggatcacctgaggtcaggagtttgagaccagcctggccaacatggcaaaaccccatctctactaaaaattcaaaaattacctggccatggtggtgggtgcctgtaatcccagctactcgggaggctgaagcaggagaatcacttgaggccaggaggcagaggttgcagtgagcagagattgtgctactacacttcagcctgggcgacagagcgagactctgtctcaaaaaaaaaacaatgactttgacctgaatgtcccaagggtctgctttgtgtagtctgcccctctacaagcagggaccaggtcttggtcacctggtgtccttgtagtaagctcttagcagggactgggtcctggtcacctgggtgtcctggtagtaagctcttagcagggactgggtcctggtcacctgggtgtccttgtagtaagctcttagcaaaggttgctgagtcgaatgaacttcaccgtttcggtcctttggtacagtaacaggcactcaagagagtccacgctgtagggttgatcagccaccatgagagagaagtatactctaagagcacacaccatcaaccccagagcatccctgccgaccaggaatgtagttacagcggtgcaggttcccagctaccccaaagaaatcccaggagagtccatctctactaagtcaagcaaatagaaattgcaactgtagcagcacaatctattttcattatatagtgtgtgtctctctctcccctcatctctctctctctctcctttcccctcggtcacttgacattgatactgggccatttatcctcgtgcatcatcttagagttacatttgtataattatcaacatggccatttgatataaacaattccgtccctcacatccaaagaaaagggaagagacagaaagaaaaggcctaatttctgagcaatttttgttgtttgtttcccattttgtaattgtcctccatctttactcatctgtttttttaaatattaattatttttttgagacagggtctggctctgttgctcaggctggagtacagtggtgcacatggcttactgtagcctcgacctcctgggctcaagagatcctcccacctcagccccctaagtaactgggaccacaattgtgtaccaccacacctggctaatttttgtttgttttttgtagagatggggctttgccatattgcccaggctggtcttgaactcctgggctcaatccatcctcctacctgagcctctcaaagtgtcaggattacaggcgtgaaccaccatgcctgaccaaaaatactttctgagggtctaatattgccaggcaccgtgttaacaattcagaaaatactcctgcttaataaataaagacttgaatttttttagttacttcattgaaaagaaaatctttttatttaaattgtatcgtcagccaggcgcaattgctcacccctataatcccagcactttgggaggccgaggcagacgaatcatttgagtcaggagttcaagactagtctggccaccgtggtgaaaccttgtctctaccaaaaatacaaaaattagccaggcatggcggcgggcacctgtaatcccagctatttgggaggctgagacaggagaattgcttgaacccacgaggcggaggctgcagtgagctgagatcacgctgctgcagtccagcctgggcgacagagccagaggccatctcaaaaataaataaataaataaataaataaataaataaataaataataaaattgtgatgtagttaactggtataatcttttcagttatttttaaatttttgaaacaacacgctgtatatcagccatccatcagagaaggaaagaaatatgtagaaggactgtcttctgcttcagatcatgaactgtaggaacaaaatagatatgtgtaaaaatgctgctccttttctgaaccaaaataaaattagatttttgttgttgtggttgttgttggaaaaggtagtagatttcaggcaaaatcagaaaataaattatttcagaaacacaacaaaactaagtacaacgatattttggttaagaaaattatggttagaaattatgattctatcactttatgaaacagaatctttaataatttttcagcttataccaaggatattcttttatttcttaatgactagttttaaatatatgactgttctctctgtacagatttttaattaatgctcataaaggctattgatagaactcattctttctccaaaatggagttaacccgaaatgggtagagattcagaagcttcattgtagttaaaattagggtcatgaagggcaaaagcccaggtatttcagcctttgtagaagaatccattaatgcagcattacaagtaagtgtaatttagtggctccttagttattttaagcaagaggcctccttaaagggcacacagataaagtcaacatagatctccactgaccccaggcgtgcggccagaggtcaactcccaacggctgtctgggctcctttttccctgcagtgctgtatgtctgggggggtgacaatcctttgataacagttttttttattgggagaaaatttgtgggaatgcataaggtcttgctaacataattccacattatgcttgctcaacaggagaagttttagtttaaatgtagacttattggagatggctgtatatctgcaggtcagggagtctcgcgtctgcagattctttgtggtttctcgtctgtcgtcgcttatcccaaataagtagctgcacttcttggaagagatgattgcgtcacttgaaggggtcatgggagtctactgattgaactcatttttctcccatctgaaagaaagaaaagttgaaaacaagaggaaagacatttcacactttctggcatttaatatttcggctagtttttgtttgtttgtttcttttttgagacagattctctctctgttgcccaggctggagtgcattggtgcactctcggctcactgcaacctctgcctcccgagttcaaacgattctccttcctcggcctcccaagtagctaaaacgacgggtgctcattaccacacccagctaatttttttttttttttttttgtatttgtagaagagacagagtttcgccatgttggccaggctgacttcaagtgatccgcccgcctcggcctcccaaaatgctgggattacaggcatgagccactgcgcccggcctggccaggtttagatcctggttttgtgaaagaatcagaatgactagaagattcatgttccgatccactgcagctaacaaatacagctccaggaaccgcacaaatcctgcatcgcctttcatcagcagatagttaaaggcggagaattgggttttcttgtttgtaaagatagtgcgtgtaaacaagcatgcagtaaattatgttatctgcagtagagtcttccattggtagctttggtcagacgagctgaaatacactgccttcagggttcttcttggtttgtcaccgtgagtagagatttgaatttacactgcctcatctgtactgaattctgcccttgctgtgaatcatgtcacagtctcagaagcagcagcagccatagagtccagtgacatccttaccagtaagatacctttgacctagagagttcatttcaggggtggggcagcatcagtgtggctaaatgtgaatattcatttctttttcttaaactataaaatgcttgttcttttccaaatccatagctaggcacagattatagaggcatcttaaaaagccttctatagctgggtgcagtggctcacgcctgtaatcccagcactttgggaggctgaggcgggtggatcacttgaggtcaggagtttgagaccagcctagccaacatggtcaaaccctgtctctaccaaaaatacaaaaaattagccgggcatggtggcaggtgcctataatcccagctactcgggaggccgaagcaggagaatcgcttgaacccgggaggtggagattgcagtgagccgagatcgtgccactgcactccagcctgggtgagagtgagactctgtctcaaaaacaaaaacctcctataaatgccataagatgccggcaaatgccatctcaaaatgcagttaggcaggaaaattacctggtatgagttgtaacctaggcaactggaaaaaaatatgtgtccaccagttacccttgtgtttgatgtttcaagtagtagaacagtataagtgtggttttctttctggggtctcccccattgtatgcactcactgtagtaaccagaggaaaatgttaccttcctgctgggaaccttaacttccgaggctgtgatacccatcttcatacctaaagttttaacatatagcaagtccccacctacaagcaggtcttatgtcaaaagtgtagttgcagtttattgcctggaacccggaatggattttcccataggcgtgttatgaacggcagctgtattccaggcagctgtggaagcctttttagcccatttatatacctgaagtgcagtcatgtgcaattagcaagacaagaaccagccatcatccatcacaatgttttatgtgttcccccagcctccccactcccactctcagttggcccagctaggcagggaagggggtgttaatgaggcctgcaggtgcacagatttactccccacctgctgcatctgcaggggttaaaccggcttttccctccccttcgctctcaccattccttctctccctctccccacccccagtctccctttccctgtgctgaaggggctgggcagtgaagtgaggaagggtggctggagctgttgggggctgaggccacattgtgcagttcacatcagaaccccctggggacttgctccagttgcagattcaaatgcagcaggtctggggtgggctctgaaattccgaatatctaacaggctcccaggtaatgcccatgcacaggcccacaggccccatttgagtaacaggagtctctaaacaccatgcagggaggagaggctggtgaagagggaaacctcgagtcacgactgaaaggcagtggagggtgagagctgagttctattctctaggccttagggaggtcccttttacactgagaactttttgccacatgggaagaagcaggcaaaccctggatgccatcaggtgctggcacatcgcagcctcatctcatgcaaggtgttcttggccagggcctgtggaggttctacatgatatggcattaaccctcgggagagcaggcacagtagaacctgaatgtctcctccaagcgactgggtgcagcatcgctccatgtgactgggtgcagcatcgccccatgcgactgggtgcagcattgccccatgcgactgggtgcagcatcgttccatgcgactgggtgcagcatcgttccatgcgactgggtgcagcatcgccccatgcgactgggtgcagcatcgttccatgcgactgggtgcagcatcgttccatgcgactgggtgcagcatcgccccatgcgactgggtgcagcatcgttccatgcgactgggtgcagcatcgttccatgcgactgggtacagcatcgttctatgtgactgggtgcagcatcgccccatgtgactgggtgcagcatcgttccatgcgactgggtgcagcatcgttccatgcgactgggtgcagcattgccccatgtgactgggtgcagcatcgttccatgcgactgggtgcagcattgctccatgtgactgggtgcatattgctccatgggcatggtttgtatgaaacactcactattaaagcacagtaggaaatgctgaaatggaaaaggaatgggtcatccgggagccccaggatctagaccctggagcagtgtttcagggcctgaggatccgtcaagggggccagcatcagaagccccagcacacagggggcttctgatgcaggaggagagtgtgcggtttgaagatctttcatcccaacacagcaaggcggtgaagaaccagttttcatcctgtctccaccactaactagccatgtgtccttgagctcataccctcatgcctaagtgtcctctgtcctcatccgtaaagtaaggctaaaatgagtacctacctcattagggtgctgggaagctcaatgagattatttctgtaaaacccttagactgtccattaagtgtcacaaaagcagtcgtaggggtggctgtggcggtatggtagtggtgaaatgagtaatttgagattataggcctaaagtcaaatttctggttttgcaactttttactagtgtgacctgggcaagtgacttagcctctccaaacctcagtttcttcccttgtaaaatggaaataataaaagttcctacctgctatattattgagaggataaaatgaggaaagcacgtagcacagtgcccatcacaaagcaagctctcagtagatatcagttactgttattgagggagaccggggtgacgactggcatctgaacaggagttttccagctgtgctccaggagctataggttttacaaaaatgtgtcttgggggtgagaaggaggccattattcaccctgcccacacctgctgcccccttcaacctgatgggcttgtctttgttggcgttcagcatgaagattttattgagaagaaaaggtttggagtttggaagatcactgttttgtagttcgggtgtgttatggggccacagggaaggtaaatggtctcaattttcaggaagttgacatttgccttttctacttcatttccttaaacaaaaattgaaatatcagatgacaaatttaaagagatatatcccatataaaacctaaagttctatgaggctgtattgaacgatagagttaatttgcatcatcagatgttgtggccgctttgtagcatttgctaatctgtaacgcttggttttctcccccagatgagcaccatgccaggactgcccacccggccctgcttttatgacatagatcttgataccgaaacagaacaagttaaaggcttgttctaagtggacaaggctctcacaggacccgatgcaggtaggctgatgtgcttcaactttttctctctttgtttttttccagttcatatcctttttttgtcattttttttttctgataccacagaagtgatctgataaatcctttccttcctttgttactcaaattcctaccaaatgattttccgtgactggagttcactcctgggtgtggctgtgagttacatgctcagatgctcagtacacaacccttagtgtcctgcgctcgagtccagtgaaagccaagttatgtcatccctgaatatagatgtgtttagagcatctctgaccataacagaactctgtaaactcattgttcttttccaggattaaaaccagcgtctgttataattttaaaagagtaacttcctaccttcctgccatgtatctcttggtacagagctagaatcatgtgaaagaggaatcttggtgtatccgtttcctggggctgccatgacaaagtatcgcaaactgggtggcttaaaacagtggaaagtttgaaacagttctggaggctagaagtccaaagtcaaggtgtcagccaggccatacgccacctcgagactctgggtggaatccttgctggcctcttcctagcatccagtggtggctgtcactccctggcgttcccaccttgcagctgcgtcactcccgtctcagcctctgtggtcccaccacgttctccctgtgtctgtgtcttcacatgatgttcacctcttataaggaccccagtcctattggattagggcccaccctaagaacctccttttaacttgattactctgcaaagaccctccttccaaataagatcactctcagccaagcactttgggaggccgaggtgggtggatcacgaagtcaggagttcaagaccagcctggccaagatggtgaaaccccgtctctactaaaaatacgaaaattagctgggcgtgttggtgggcacctgtaatcccagctactcgggaggctgaggcagagaattgcttgaacccgggaggcggaggttgcagtgagctgagattgcgccactgcactccagcctgggcgacagagcaagactctccttctaaaaaaaaaaaaatcactctcacaggtgctcagggttaggacttaagcatatcttttaggggacacagttcaacccagaacactcaactgtgtggcacaacaggtgtgttcggctctcttgtccctggacagacacatagccatgggacagaccatttaactagagggccccatgggttccaggaagggcagggcagcagaaagtaggccacttgatgacttcgggtttgcacagtctcaggttgggctttgactctgagctgtcttaggcagcccagacctggggactctcggtcttattcatgtccacgccacagcactgcagccatacctgctggcttctatcctgactccccatcgtgaagaaaaatgaccacattcctaaacctcttccctgggagacaactcctaatcagaagcttgaaaggctcagggctgcttctcctaccccagggatcaaacatgtcctcaccatattctaaagacacattctttccccgcaagcaccccgcctccttctccccactgactcctgttcctgagcccagaacctctccctcttgccagcatattctcggcctttgcagatgagcttttgtggcctaaagaccttcttcttcaaccatctctgagttacggctccaagccaggcacccaggattctcatttcatttgtttcactaccaggagtccacttgaggacttgttgttgttgttgttgtttgagacagagtctcgcgctatcacctaggctggagttcagtggcgtgatctctgctcactgcaacctccgcctcccgggttcaagcaattctcttgcctcaccctcccaagtagctgggattacaggtgtgtgccaccacgccccgctgatttttgtattttatttatgtatttatttatttgcgacagagtcttactctgttgccaaggctggagtgcagcggcactgtgtgggctcactacaacctctgtctcctgggttcaagcaattctcctgcctcagcctcccaagcagttgggattacaggcgtccaccaccatgcccagctagtttttttatttttagtagagacagggtttcaccatgttggccaggctggtctcgaactcctgacctcaggtgatccacccgcctcagcctcccaaagtgctgagattacaggcgggagccaccacgcccagcctaatttttgtattttaatagagatggggttttaccgtgttggccaggctggtctcaaactcctgacctcaagtgagccacctcgtctggccaagtttttttgttgaggctttgttgctaaaacactaaagacctaggctatggtgagaaagataagggaaccataaatgaaattacattaaaacaaagtgtgaaattgtttgttttgagttgtggatgttgtttgggggtgtttgtatgtgttttttgctgaggagcgggagctgtgttaagtttgagccataactgcatctttgatctttgttatttcagaaaaaataaaactctagaaaatgaagtaagggagactagtttaacaaagaaacccataaactcaagtgttgataaaatgttgtttcatcttttggtgtgagcttgtgtgttgccaatgtcttccattccccagtaaggctgtggggaaataattgctatttccccaattgctagttggcctagcaattctctttttatgtcaggaacccattatgttacatttctgccatttgtcatttttctccagaataagtgtgtttgattctcccatctctcttggacagtatttttccagcttttggtgagttttcacatgctctccaagtaggtcatataagtccaattataccttaatcactgtagttaggactcaggtcctactcagggatacatccttagcattattaatgcatacccttaaatcctttattacctactccctaacaagaattcctccagatcttatatacggggcctgcagggcaggacacaggcctatggtaattacttccaatgtatcgggcattgtgctaagcactttgcatgggtggtcacagcacctctggagccaagtgttgtcccataagggccacaaggcttcaagaggacggagcctaccccttggtcactgaggggtggccctggtctgcaaggctacagaactgccttgccaccctgtggcactgcctctcatttcatagctggcacatgtcattttgccacccccatcacatgtcatgctggcatcaacccagggaggtgggtagtatttttgttgaagagctgcaagaactctgcccagagaagtcgacaacctgctcaagttgtgcagctaataactacaaaagccaagactcaactcagatctgttgactctcagtattaccccaacctttatgccccaaaccaaaggatgcccttttcatttcagtcacgggtaaaatgaactttggcccattccgaaagatgataccagctatttgaacagacaggtacttgaggataatgaggtaattttttctaataagtaaagataattgtttgggtattaaaagctatgattttgtcataattctttttagtccaagtataatagagccagctctttcctaattctctaatggaatggcatttctaccccttacccaccccccaatccaaggcctctttcttctttgtgaattgctaaatacagttctgggctagtgggcagtggttcaaaacccatcgtttgaccctgcttgaacaatcaaaaacagatccagtgtcctaagataaaaccactatacaaagcaaacattccctctcagtggctcctcggtaatgacccagcaagtattgtctgtttcccgtgcctctcactatagccatcagggaccacttctactaataatcagaggtctgcggctattcaaaatgcataaaataaaaatgttaaagcttaggtgacagcttggacaaacgtgggcatctgaaaggaaatgtctggcttgctgacgttgctccttcagggatcacaccgtagatggtgtgcatacccaggtgcggagcagcacactcattattcccccaggaaagtgttgaaggcgcgttccactcaggaagaagattgtgcttggttgatgacaactttctgtccttcccttcctcacctttctagcctgtctcacctcctaggaaaccgtgtgaaaccaaaggtgaacattatatgccaaaaaacatcagaattggagctctccttgctccctcttcccaagacttctctgtagtgccttcactgtggttagaataagggcatgactcattcttttggatgtcactaaatagaactaattaaaatagattttttgtcccagtgaaattgatccggctgttgagtcttttgtttaaagattattggaatgaaggatttgatacttttccccccattcttttttctcacttggaaactttatcatatttctgagctttggcaagattcattcaaatgaacacacaataaagtctggcaaatttcctgaagaattcagggactcccttacttctttattgtactgtgcaaagttacgttgagtacggaatcagattcactccagtcctgctacaaatgtttgttatttacaaaagaattgctttttcttgaattacatacacagaaataagttcaggaaagaaattagtttctttcctaaactggctttagggcatctacagacaaatggttaaagaaaatgtggtatgtatagagagtggaatactacttagccattaaaaaagaatgaaataatgtcatttacagcagcatggatggaagtggaagttattatgtgaaataagctgggcacggaaagactaatgctgcatgttctcactctcatgtggaagctaaaaagcttaccctcatagacagaataaatggtagataccagaggctgggaaggatgggtggctgggaggaggttatgaagaaaggttggttatgggtacaaacatacagttagacgaagaaataagctctaatgtttgatagcaaactaggatgactatactcagcaacaatattttgtatacttcaaagtaacaggaagagagtggggtgtacttgaaatgataccaacatacagtagtaatgataaatactcaagataatggacaccccaggtaccctgacttgatcactacacattccaggcacataataaacactcatatataccccataagaatataaaatattaggccaggtgtggtggctcatgcttctaatctcagcagtttgggagtccgagtgggtggatcacttgagcccaggaattcgagaccagcctgggaaacatggcaaaaccctgtccctactaaaaatagaaaaattagccaggcgtcatggcacgcacctgtaatctcagctactcaggaggctgaggcaggcaaatctcttgaacccaggaggtggaggctgcagtgagctgagatcatgccactgcactctagcctgggtgacagagcaagactcggtctcaaaaatatatataatgtatcaatacaagggaaaaatgggcagaaattttcaatgatatttaataaccataaattaatcttgagttgggttgctgcctgccagcccttctgtgaacatgatttgttcagtcccaagtcacaaaccacagggttacaaagtaccctgggagggtgcctgagctctgtggttttagtcttgaaactttatcttttcacaaagcaattcaaaaattgctcatcaccattgtgttccgagaaaaggggcgccaaggcatcaccctgagccatccgaggagtgctgtgtgccttcttcctttctgcttccaagtaggatggaagctccagctttatacttaaataatcctcatcaacatctaaaagatagtgataattaaatctctcctatctaactaaaatggaatgttttaaagcttaggtaacaattctgaaattcttaattccccccaaaacaaactttttctgagcacattttgatttcttattcccatgccagaatagactgttttgtatatggtatcttccaagatattttcccactgagttaacttctgaaattgcttcttccaacgcataagcaataaacaacagattcgtttttacattctcaccttagctattgcatctctgattgttttcatctataatgagactttctatactttggccagtccttctgtttttcttaaaatgtgggaccacaggccaggcacggtagctcgcatctgtaatcccagcaatttgggaggccgaggcaggcggatcacctgaggtcaggagttcaagaccagcctggccaacatggtgaaaccccatctctactaaaaatacaaaaattagtcgggcatggtggcgggtacctgtaatcccagctacttgggaagctgaaccctgagaattgcttggacccaggaggcgaaggttgcagtgagctgatatcgcatcgctgcactccagtgtgggcaacagagcaagactccatctcaaaaaaaaaaaaaaaaagtgggaccacatactctaagcacctttagacaaaaccacaggatacaaatgtaatgtggctaatcagctggtcttccaccacccacctctggagcatggaaggccttgtccagccttgccttgccaagccaagggtcatctctagtccactgagcccaccctctaccctagcacccctcctgtcccaagagtcattgaccctcaggtcaagggataccagagccactacagtgaggctggccgtgtctctgaaatattttctttttttttttttgcccttctctcttcctcggcgctgcctatggaggtggcagccatctcctcctcggcatcttggccgccctcagaccccttgtgaagcccaagatcgtcaaaaagagaaccaagaagttcatccggcaccagtcagaccattatgtcaaaattaagcgtaactggtggaaacccagaggcattgacaacagggttcgtagaagattcagggtccagatcttgatgcccaacactggttatgggagcaacaaaaaaacaaagcacatgctgcccagtggcttccggaagttcctggtccacaacgtcaaggagctggaagtgctgctgatgtgcaacaatcgtacttgtgccgagatcgctcacaatgtttcctccaagaaccgcaaagccatcgtggaaagagctgcccaactggccatcacagtcaccaaccccaatgccaggctgtgcagcgaagaaaatgagtagacagctcgtgtgcacattttctgtttaaataaatgtaaaaacagccatctggcatcttcctttaaaaaaaaagaaaagaaagaaatattttctttcttttctttttttttttttttttgagacgcagtctcgctctgtcacccaggctgaagtgcagtggcacgatctcggctcactgcaagctccgcctcccgggttcacgccattctcctgcctcaacctccagagtagctgggactacaggcacctgccaccacgcccagctaatttttttgtatttttttaatagacacggggtttcaccgtgttagacaggatggtcttgatctcctgacctcgtgatccacccgtgagccaccgcgcctggcctgaaatattttatttttgttcatctttgttgtgcttataatactcctgttttctgtttattcccctgacttgaaccagatgttaggggagtatttgaagctcctcgttccctctcttcatcaatatcttctgtctagaaactaaccaagcaccttatctggctccagacctctcagtgatctgtgggaggccaactcgcaggatttcagcagagtttgcactttctaggcctaaaagataagtccttccatgtgtaagttcagattaaaggcaacatattgcatttacattttagagaggtgaacacattattttctgggacttaagtgttgttttgtttcttttttttttttttaatgtagtttatttctctttctaagagattacaggattcaagaatggcaatgaatcttaatagcctttgggagaaagcagcaaagctttaatactaagttccaggaccatgaacttccatgttgtcctaaatgcatttttcaaacattgctttctgtgcctactctataaaacctaaaaatccaaggtgacagtattccttatctaaaatcctaaacaaggctgggcgtggtggttcatacctgtaatcccagcactttgggaggacaaggcaggcggatcacttgagcccaggagttcaagaccagcctggccaacgtggtgaaacctcgtctttactaaaaatacaaaaattagccgggcatggtggtgcacacttgtaatcccagctactccggaggctgtggcgggaggattgcttgaacccgggagacggaggttgcagtgagccgagatctcgccactacactccagcctgggcgacaaagtgagactctgtctcaaaaaattaaaaaaaaatttttttaaatcctaaatattctcattccacaggatcctgcaaactgtagatcccaaacttggaagttctgggaattctgccagtatccccaagtaaatctccttgggaagtttagaatgctgcatggcgtagctgtgcctgctcttatagagtggtgcagactctgcttctccacgtctgctaagtaaaatattccaaacacagatcagccttatctagcgaaccatcactctgctcttgaattttcttttggcctcaaactctagagctataacatgttaacggtttaacaccagaggagaaagctattcttaaactactcaaacatggtttttttttctatttttcagactcctgaaacagactactctttgcctttttgctgcagttggagaagaaactgaatttgaaaaatgtctgttatgcaatgctggagacatggtgaaataggccaaagatttcttcttcgttcaagatgaattctgttcacagtggagtatggtgttcggcaaaaggacctccaccaagactgaaagaaactaatttatttctgtttctgtggagtttccattatttctactgcttacactttagaatgtttattttatggggactaagggattaggagtgtgaactaaaaggtaacattttccactctcaagttttctactttgtctttgaactgaaaataaacatggatctagaaaaccaaccagcaagttttcagtgccagataaaactctgcgctctagaggtaactcctcatgggaggcagctaggagtgttacctgacaccagtttcctagaaaactgtgacaagcaaagcaataacacacgtcgagaaatatctgatcaagcgggaaatcttctgactgtcggggatctctagtaagatctcttggaatgaagtgcactgtgtatccaaaactattttccagcgccagtgaagttgctcttacctaaaacaaatgggtttatgctagtttccaccaaggaatgagtctcgatggccattaaactttctaaggcccacagggctaggaaaagtcgctcttaaaggtcaggtgtttggaaaatgtttttccttttgcccaacccttaattagtagtagagaatgttctgtggcctattcccctctctgggagttcctgacccttctttgttttccagtttttcctacaataatataaaattacgtaaaagttaaaacaaaaccaaggattcaggaagaaacaagcagtgattgtcctctaggcagcgtaaggaaaatagtcaccataaatatcttagatgccccccaggcacatcctgcaggatcttttctgcatcctcttgtcctacaccctccagtgaccctgctcagccattgctcagcccataatgcacctttatgcacaatttgtcccaaaacactgtttagtaactcaaaagcctcccactcaaaagctgtctgtcccaagaataatttcacttggcaattctgaagtgtccttccccatccctgccctttatttgggagtacacctctccaaatatacagttaactgatgttttactgtttatttggagaggtgtactcccaaataaagggcataccctctccctttacagtaaatttgtaaacccttataatcttccaatagatttatacattgaaaaccctatatattccactcagaaagctgtctttttttttttttttttttttttttttttttttttttttttaagataggggctcactctgttgcctaggtggagtgcagtggtacaatcatggcccactacagccttgacctcccaggctcaggtgaagcccccacctcagcctcctgagaagctgggactataggcacgcaccaccccacccagctaatttttgtattttggtagggacagggtttcaccatgttacccaggctggtctcaaagtccgggactcaagcgatccgcccgcctcagcctcccatagtgctgcgattagaggcgtgagccaccgtgcctggccgtgaattgatttttaagcagttgtcttctgctactcatgtttttattcttttcctctgcattgaaaggttaagtttctatttttgaaaacattttttaaataaatattttaggagtctccattcaaaaagctttagcctagggactcctttccttacctacttttaccagacaactcctcaactcaaaatgtaagtaaacatcctgcacaccagtgtgggagagttttccactgctcactttggaaggactatcatccaggtgctgctggaaaccgcaaactgtttcccatcatgtaggctcattcgaagtcctctgggtgtcataactcgggctctgatggagttgtttttgctcattcactaccctactgatggtagagtgtatttgactccagctgagtgatatgcagtctccactaagaagaaacgttaattaatgggctcatcaactcctgatgacttgaggcattcatagagaaaaagaagtattattatggggagtactgggaggagccagttatcaaccatcttttctgaggccacagcatgagaaaagaaaaatcacataacctttggcatggtgggtttcagttagaaatcttcccaagaagagtggatattgatttctttctgcctttaattgaaatgtaaaaaacgaataggccagagatggtgagtggctccaattacccactgtggcacagaaatgtgtgatcatgccccctctctgcttgaggactggcagtagtgacacctgccaaggtgaagtcccagaccagaagaatcctctgtgaaagctgcctgaagaacacactataggaattaactggagaagagatgcataggaacttcggaaagcatcagcaaggcaatgagccaacccattcattcgtatttttttttttttttgtctttttttttttttttttccgagaccgagtcttgctctgtcgcccaggctggaatgcagtggtatgatctcggctcactgcaacctccacctcccaggttcaaatgattctcctgcctcagcctccgaagtagctgggattataggcatgcaccaccacacccagctaatgtttgcatttttagtagagactaggtttcgccatgttggccaggctggtctcaaactcctggcctcaagccatccacctgccttggcctcccaaagtgctgggattacaggcgtgagccaccactcccagcctcattaatattctttttattcctctattgtcaaggttattttgtttaactagagtgtgtatgtttaatacacttaaagctataaggagtatttttcacaatagatatttaaagagaatcctagttccctcccatctgagagtagccacggtttcgtttgtttaactacaatgtgcccagcctgtttttaatcataatttacacatgcccacaaataagattgtggcatgtgtaaattatgataatttaccgtatatattcccagaaaatccacatactacatatttgtagattgctttttcataaatgtgttcgcacaagggaataaaaattcagtaacaagtgcattctttttttttttttttttttttgaggagtctcgctctgtcgccaggctggagtgcaatggtgggatctcggctcactgtaacctccacctcccgagttcaagcaattctctgcctcagcctcctgagtagctgggattacaggtgcctgccaccatgcccggctaatttttatatttttagtagagacgggttttcaccatcttggccaggctggtcttgaactcctgatctcgtgatccacccacctcagcctcccaaagtgctgggattacaggcatgagccaccacacctggccaacaagtgcattcttacagcatttgttacaaacctataatccatatcctctgaaaaagtcaagcattatgacaaaaccactggtcaatcaacagatcttcatgtagcaccgtaaactctaatgcagccagagacagacccaaaactctaacagcgacttcagaacagcagaatggactagaattcaggggtctgaatttgagggaaaaaatgtaacatctttatggctataatgtagcatttccttccctatgagtgtcagcaacaaaacacagcactatcgacagtgctgtgtcttttttgtttgttttgagataggggtctcattctgttgcccagactggagcgcagtggcacaatcacagctcactgcagcctccacctcccaggctcaagcaatcctcccacctcagcttccccagtagctgggaccacaggcacaccaccacacacagctaattttttattttttgtagatacaaagtcttgccacgttgtccaggctggtttcgaactcctgggctcaagtgatcatcccacttcagcctcccaaagtgttgggattacaagcatgagccaccgtgtgtggcttttttttcttccctagccactagacctccagggaaacagtagctatgtctttgtcgtagatattttaatattacatgacagtttctacaaatacagtagcatttatgcttctcactgcatcaaaattatagtagttattagatctcccactgtctttgtatccatgtaaataaagaggcacctacattgctataaccaaatgtggtaccttttctatactttaataattgcatttcaggctgggcacggtggctcatgcctgtaatcaaggcgggtggatcacttgaggttaggggttcgagaccagcctggccaacatggtgaaatccaatctttactaaaaatacaaaaattagccgggcgtggtggcacacacctgtagttccaactactcgggaggttgaggcaggagaatcgcttgagccagggaggcggaggtggcagtgagccaagatcatgccattgcactccagctgtgcaacaagagcaaaactccatctcaaagaaaaaaacaagcattttactatcattggtttgttttataatcataagtgttttcatttaagcatttaaaaaatattattctaagaagggggtccatgggcttcaccactttgtccatgggcatccaaggcacataaaaggttagaatcccctggactagatgagatgctaacagcctaggtcctggttctgtggcagcattacctggtctccgatgttgctacctctacatctgcgcctcagtctgtccctacaggtcccctgatccagggtgcctagtgtgcctataatagagtcttggtatgtatgtaatggtaacacaggcagcggctgtcaccaaagtttctccagcctgattcagaggatacacaagaagctctggacgctggagtgcctaagccttggttagcaactccacccccgagccagcccctgagctcccaccccaccctgatctaaggccaggcttctgcacgtggttttagatgctgcccagcaatggagttctcacctgacctggttcctccccgtagctcacacagggccacagcttgcatattggtggtcagatgccattgctcacggtagatgggacagagctgaatagccagtgtccattcctgaaaggctagagtccaactacttggcaactgtgggtggaatgctgcctacgagagcaccatgtcctaaacatgcatgtacataaccatggagtcagtggattgtccagggaactgcaattgataagtgctgggccttcctaaaggtcttggtaaaacagttggtttctaggacaaaaggcatatcatgaaccacaaaggatggggaaaatacttcacgaattggagtaggaccatatagttaagccttcaatatgagtaagaaagaatgaatttcttttattattattatctttttttttttgagatggagtctctgtcacccaggctggagtgcagtggcgcgatcttgggtcactgcaacctctgcctcccaggttcaagtgattctcctgcctcagcctcccgagtagctgggattacaggcatgtgccaccacacccggctaattttcatatttttagtagagacggggttttaccatgttggtcaggctggtctcgaactcctgacttccggtgatctgccttcctcggcctcccagagtgctgggattacaggcatgagccactgcacctggccaaagaatgaaattcttaactgcaccaccctcctgtgatctcagccttgtcaatgtaggtcatcaccttaggtattttttattgttcttttttggggggtgttgggggaccaggtctcactttgtcactcaggctggagtgcagtggcataatcttgactcactgcaacctccgccatccagactcaagtgatcctcccacttcagccccctgagtagctgggactacaggcaggcaccatcacacctggctagttttttatattttttgtagagacagggttttgccatgctgccgaggctggtctcgaaatcctcagcccaagcaatcctccacctctgcctcccaaagtgctgggattacaggcatgagccaccacacccagccaccctaggtattttaatccttattcttttgtgctacttaagctctgggatagcaacctccccaggtccaaagtgtggccacctaacttaggtgctttcctgtgtccgaggctgtaggtgccctgtttcaactacaatggacagttttcatgaggcagcacccgtaactggccacatccagcgtattcaagttaagcaaaaccacaggaggcaggtgcccatagaaatcctctctgggcaattaatagcaggtccccaggcatttagggtagcttttactcataggttttagaattgcaactttaaaaaaaaaaaaaaagtcccaggagctggacatggtggcacgtgcctgtagtcccagctactctggagctgaagcaggaggatcgcttgtggccaggagttcaaggctgcagtgaactgtgattgtgccattgcactccagcctgggtaacagagcaagaccctgtgtcttaaaacaaatcaaaaacaaacaaaccaacaaaaaactggccctgggatcatcttcattagaatcacccgagagagttgtttacaaaatgcagcttcctgtctccatttagatctaatcaattggactctctggcgataatcctgggaatctgtgttttaacaaattcacaaggtcattctgcatactgaagtttaggagttaacctaaactccacttttgtatcaccatttgcctagcacaatgctaaacacatgggaggtgctagagaaatcctcctggaaaggatgaagagatgttgagagctgtcaactttccggcccagtgtgccccacccactgcgtatttatgcaccgcatcccaacccccccccccattaacgccccttcaattccttgtattcctttggagacaagtcgtttaaattttttctcatggcatttcgcccctacctttctcagctaaggctttgctaggctcccaagctccccaactttaattcttacgccagctcagcaaccacagtcctcttaggaaggtgcaattggcagcagaggagggaagtgtcatctgagctcagaagctcccattccaggatcttgtctaacaatcctttaagagttgagtgcctcccaggccaggcatcacactaggctcagtggatgaagaaagatgaacaagtttgggaaggggtgcttctaaaatggtctcagaacccactgagaggatcagtgggtgggggtcggagggggtggcggtgagactgggctggcaggagctcctgcaagcagcctgaggccagccctgggggatggcttttcacctgcctgccagaggccttgtatccacgctttgattcttttttttttttttttttttttttttgagatggagtctcactctgtcaccagactggagtgcagtggtgcaatcttggctcactgcaacctccgcctcccgggttcaagcgattcccctgcctcagcctccagagtagctaggattacaggtgcaccaccagcatgcccagctaatttttgtatttttagtagtgacgggttttcaccatgttggccaggatggtctcgatctcttgaccttgtgatccgcccgcctcctcctcccaaagtgctgggattacaggcgtgagtcaccgcattcagccgattcattttataaaatcacaagcagtggttaggcttctcttctccttagcgccctaggtttgcattttagtctcctgaaatgctttaaaaatacaaactttccgatacattattaactatatttcatcccaggattaaaaggagactccagacaggtttgtgcctgtgcccctctgttttggtgtggcgggcctccgaggagggcagtgtaattgcagagactgagtttgaggttagagtgtttatgtaagaaatcagctcaacttaaatatttcttgtggtgcggtcagggctgcaaacattcgcccagcacagcagcatgaatgtcatctgtttattcaaccctgtgtgggcatcgatgtttatgtgaaaggaccctgatcgtttaaagccagttaatattttcaatcatacatcgtgttgcttacgcatcttacaatcgggattgtgaagagacaagttttccaaaaaatcagactggttgcatttgtatatgtgcttatgagcagacacatttaatgaatgttcatttggcaaagtcttacaattaaggatttttttcttccagagataattacatgagccctgataattttcctctaagtcagcctctgattacctccccgcttgatagagacaacatgtaccagacaaacagcggagacagactccctgaaagaactgcaagcgctctctggggttcagaacaagccaactatatgagaagtgatactttccaacttcatgtcttcatggagttggacaccaaaggattttggggaccaggggaaagtaaatggtgaatagcttccctactcctcccaagacattttagattgtggcttcattacttagtttgaaatttaaattcccggaatatcggacacccccaaactcaaatgtgagtacagaaatgcattccaaagccaaatgtaaattctttttaaattattcattcacctagctccccattagaacagataattgaagtagctataaatatgcataaacagaagtgacagaaacagaaacatccacatcaaattacagatggacagaaaaatccacttaagcgctaaataattagggaggagagaagccaaggaaggcgggaggcgatagctccggagtgatgggcgagttgggactattctgcaaacagccagagagatgggagccaatttggaggggagggaggggacctggctgagaggaaggggcttggcgagggctgaggggcaaagcttgtatagggaaagataaatccgtggtgggttctggtttctgacaagtctgaactcagagaggcaaaagtgacagatggaaccctggtcaacatgaaaaaaagaaagcacgctacagatgagatggtgggagtcttctgggaaccaacaatcagagcacagggaagtgacatcacatctgcagcttcccaccccagggctgggccccttcgcttctctgcggatgagcagggggtcaaaatgttcttagaagcaactctcctgtagtggatggcaatttgggaataagaatatgctaactggaggtgggcagatcacccgaggtcaggagtttgagactagcctggccaacatggtgaaaccctgtctctactaaaaatataaaaattagctgggcatggtggcacacacctgtaatcccagctactcaggaggctgagacatatttatagaatctcttgaacctgggaggcagaggttgcagtgagctgagatcacaccaccgcactccagcctgggggacaaagggagactctgtctcaaaaaaaaaaaaaaaaaaaaaagaatatgctaattggcaaatggtttgaggttcccctatttaaaaaaaaataggggttcaaagcagctatttagaacccagaaggttttaagggttaaggaatatgatgttctcccaggcccccccagtccttatttgccaccgcagtgtgttccctttcaattgctcaaaggtaaccgacaaaaagaaactctatggaaaccctaatgaagtcagcaaagcaacctgagaatgaaagtccaatactggctgcaatattgatcattcctaagttaacgtacctaagttactcatgaaaagttcagctcttagcataatttttttttcttttgagacagtctctattgcctaagctggaatgcagtggtgcgatcatggctcactgcagcttcgaccttcctgggctcaggtgatccttcccactgagcctcctgagtagctgggactacaggcatgcactaccatgcccagttacaatttttaaaattgtttgtagagatgggatttcactatgttgcccagggtggtcccaaactcctgaactaaagcgatcctcccaaccttggcctcccaaagtgctgggattgcaggcatgagccaccgtcccagcctcttagcagagtttgaaatgggagcagagatttgagcacgtgtcccccgtatgtacagacatctggtggcggctggcagcttctgttccaagcccaggtcagctgcctggtgaggactgagagtggagactagattcttcaaaaagccatctaaatgaaggctcacagcaatcagataacagtagcaacaggaagtaagccagtcaagatgggcatccagttatttaacatctgattctaacagtgaacattgactgaaagattaacatttgccagggactatcccaatcatcttgcacagattcttttatttaatcctacaacaaccttagaaagtaggtacgtagttgctttttaaaattttccttccccattttgtaattaaggaaacagagactcaacaaggtaagggaacatgccccagatgccaccatccacaagtgacggctgggactcagcctggtccgcctgactgcagagccatgcgcaatgcactgagcacttctgcctgaatccagtgggggctgtccaggttgggatgaagctgtatgcagaggaatgaaagctttgagaggctctgagggttcttggactagagccaacccagctgtatggtgggaattcgaaagctcaaagagtgaagaagccacttctgtagcaggtgatttgggaagagtaagtaaagaaacatagagtctgcatacccctgagtggggatgacagtactaacccagacagactgcctggaacctccagattgtgtccaacatgtgtaagaagacagggactttaacatggagcttgtgtcctctcatacatgagcaccagccttgtcacacgggggcttacctccatgtcaccatggggcaagtgtcctgggaggccagcctcccctcagcctcacagtgaccaatggacccacaccaggcactggcgtgcagtgagcctaccccacacaccccacctagaaaccacagccccaatgctggtcctagaactgaggcgtgggatcaaagcagaaaaatcagtcaactttaaaattgctaatattgccatccagacattttttttaggagaatcttgtttaaaaatctggcagaggccaggcgcagtggctcatgtctgtaatcccagcactttgggaggccaagacaggtggatcacttgaggccaggagttcaagaccagcctggccaacagggtaaaaccctgtgtctactaaaaatacaaaaattagccaagtgtggtgacgcattcctgtaatcctaactactggggaggctaaggcatgagaatcacttgagccctggaggcggaagttggttgcagtgagccgagattacatcactgcactccagcctgggcagcagagcaagaccctgtctcaaaaaaataaatgaataaataaaaattaaaatgtggtggtattatgaaatcatctctgagttattacatctgagagatgaatagatgtcttatggggtgtgtgattcaaattatgacacttttaagcacttgccctatgtatgatactgagcctggttctaggagtaaggactcctcgctgcaggcagataagcacacaacttccatggaatgcagaatggtgattcctcctgtctttgtttccacagtttatagagcaccacgatgtggcagaccctgcacccagccctgagaatgcaaagatgatgggcgaggtgtctgctctcaggaggttcactattgagtaggcaaaagagcgtcataggacccaagacagaggtggaggcagggaggtagcagaagggaggagcctggagcagagtcagaaaaagcttctcaaaggaagtgatgctgcagaaatgtgcaagaaccagactggagggtgagggaggtggtggatggagagaccgtgaccatgtggattagggaaagattcacacagctgggttcaatcgacactgggacgctaggtaaatcaccaccttccttcttcgtgatggagtgtagtatagaataatggatcagagttcaggttgaatcctggctctaaccttcactagctgtgtgacattgggcaaaatacttaacctctctgggccttatttgccttatctgtacaatggggataacaacagcaccagcctcacagcgttgttatgaaggaagaactttgtgaataaagtgctcagtactgggtttcagatatggtactcattgagtgttagtatcatcattatcatgattactaatagtagtgttatttatattcctgcttagcagcctttaggagctgctcaataattctttcatgggatgaatgagttcaccaattcattatcaacatggacattaccgttgcccaagatggcagcaggaaacagcacaaagagaacccatgagccaggtgccattaaggaaagtgaaactttgtcctgaggttggtagaaaatggcaatgaaggatgggtatggtcacttcacatttgctgaaacaggcccagggttcaatagtaatgcagaattaacaatctataaagtgaaaggaataaggttttttccttaaagacttgttccacctgcttgaatgcagttgagacttgcaagcccaaggggctgaatccaacaagctccaaagtcttcaaggtggggagaagggagttgggtggtgaaaccgagcccagaaagctgtaaaaacttcctgcctggtctgggggtctccaccaaaagctcccaggagctatgagtacaggcgtgagccaaggcctcggtgggcaggacacccccatgcgcacaatgattgtgaggaaaaacccatggcggctcccacagaggccccaccctgcggactcgaagcccaacatgagggccaggcctgggctccgtggaacactgatgagcatggcgccctgcctgagggcaccctgactctagaacaatctcttcctctttctccacccaaggtgcccttagaaaagagttggagagaaaactcattccctggggtactttattaagaaattgaatccagtgtaactctattattcatttgcttaggatgcttctgttttaatgggaccccgtagcagtcactctagggcagaggggaggtcatcaggccggccaggagagcaatgtcaaagtcacagccattcccccacggcccacaccaccagcctccctcctcagagagacactcccacccaggcactgaccctgccgtggtgcaagcagaaaaaggtgtattgaacttagcaaaaagaacagccaggcgcggtggctcacgcctgtaatcccagcactttgggaggccgaggcaggcggatcacgaggtcaggagatcgagaccatcctggctaacacagtgaaacctcgtctctactaaaagtacaaaaaattagccgggtgtggtggcgggcgcctgtagtcccagctactcgggaggctgaggcaggagaatggcgtgaacccgggaggcggagcttgcagtgagccaagatgacgccactgcactccagcttgggcgacagagcgagactccatctcaacaacaacaacaacaacaacaacaacaacaacaacaacagctctgacgaggtgttccagaggaaacgaggaatgtgaggcacctttcgccttcctggtttggccaagacttctcttagtcgccttcagagtgaaactcagggttttcataacagctttgctctctcaaaccctagaccacctgcaactctgaactatgtctcctctgatccactggtggccaaggagtaaattccgacagaagctggtgtttctgctgctccaaacccccaaccccaaattggcatctggaagtgccccttcccgcggctctctctgcccagcaccgtgccctccctcagccgggcccctggcctcccaagcataaaggtcccatgccagacccagcacctccgtatagacactgctcatggcagaggtggccagctcttccagcctgtgtttcaaacatcaccccaagaatgcagagactctgatccttggaatgcaagcacaaattcactctcattaggctgaatttgtattatggttttcacaattcaagtgtttcttgcgtttgtgttataaaattaaaaatatattgtcaagaatatcattatcagctgagcacagtgggccacgcctgtagttctagctactcaggagactgagctgggaggatcacttgagcccaggaattcgaggctgcagtgagctatgatgacgacgtctgtgaataaccactgcactccagcctgagcaacatagtgagatcctgttgcttaaaaaaaagtaagtaaaataatacaataaaataagaatatcattgtcattctcaaccacaaatggaatcatttatttggatttcaattgtatcaatgaagtttacttcatacaattgcagtctagctccttttttaaaagctctttatttccatagcaaaaaaaaatgtgtaaaaagttaaatatagaattaccatatgacccagcaattctactcctaggtatataccccaaagaattgaaaacagggactcaaacagacacttgaacactcgcgttcatagcaacattactcacagtagccaaaagctagaaacaactcaggtgtccctcaacagatgaatggataaaccaaacgggggacagatagacaatgggtaaaattctgacatgtattacaatgtagatgggccttgaaaacatgctcagtgaaataagccagatacaaatggacaaatagaatatgattccacttacataaaacgtctataatttaggcaaatgaatagagataaaaaggagattgaaagttatcagagggggctaatggggagttattgcttaaagggtacagagtttctgtttagggagatgaaaaggttttgggattacatggtggtgatggctatgcaatgtcatgaatgtatttaaatactttgggttgggccgggacggaggctcacgcctgtaatcccagtgctttgggaggccaaggtgggtggatcgcttgaggtcgggagttcaagaccagccgggccaacatggtgaaaccacatatctattaaaaatacaaaaattaaccaggtgtggtggcaggtgcctgtaatcccagctactagggaggctgaggcagaattgcttgaacctgggaggcagaggttgcagtgcgctgaatcgtgccattgcactcctacctgggcaacggaacaaaactccatctcaaaaaaaagaaaaatactttgagtcgtacatttaaaaatggttaaaacaagctgagcatggtggcatgtgcctgtacttccagctacacaggaggctgaggcaggagggtgtcttgagcccaggagtttgatgctacagtgtgctatgattatgccactgcactctagcctgggtgacagagtgagaccctgtctctaaaaataaataaacaaataaataaataatgttttaaactggttaaaacagtgcattttatgttacatatatttttgctcaaaaattgaaaaaataaggatttttgttagtatttcaatttttggctactagaatgattaacatttttattggctatgtttaaaggcattataatatcatttattttcaacatactgccccaaatttgaacatctttcaaacgtagctgggcaatggcagactggctagaattgccctttttggggagagcagattcagaaggagtgagggtagagcctcaacagcctggccttctagccaactctctgcttcctgcccatacaacctcagtcacttatcctcacgatgccttggtttccatgtcatataataataattgtggccgggtgcagtggctcatgcctgtaatcccagcactttgggcagcaaagatgggaggatcacttgagcccaggagttcaaaaccagcctgggcaacaaagcaagacactatttctgcaaaaaaataaaaaaattagctggacgtggtagcacacacctgcggtcccagttactcaggaggctgaaatgggaggatcatgtgagcccaggaatttgaggctacagtgagctatgaccacgccactgcactccaacctgaatgaaagggggagaccctgtcttcttaataataatagtaatagtaataataatatagttttatagggttaccatgaacatattaataaaatgtgttacaaatgtaatgtgtttaatacagtgcctggcaggtattaagtgcttatagttaagctattcttaatattattattacagaatttagtttttttagtgagtgattgggatttttttttttttttagatggagtctccctctgtcacccaggctggagtgaagtggcatgatctcggctcattgcaacctccacttcccaggttcaagggattctcctgcctcagcctcccaagtagctgggattacaggtacgtgccaccacgcccagctaatttttgtatttttagtagagacagggtttcaccatattggccaggctggtctcgaactcctgacctcaagtgatccacctgtctcggcctcccaaagtgctgggattacaggtatgaaccaccgctcctggcctgatttaacagagaaaaaatgattaagaagcactgataattccaaaggaaagaactatagggaatggcttaaaggcctacaaggaaactctgtactgggaagtgagaaagagcatgaggctctcctgaatataccccagtggcatgttgaaggtgtcaggtctgagatgaaatcattctgcgagagaagagtgtgctgagcatagaaacggtctctccacatgaacagacctctcagcctgtgcagcttctgcttcccaggagctcagcccgtggcagaagttttcctgatgcaaagatttcactttcactattaggctgtcactatgccctgacagcttcccaggtgtgagttacagctactggtttgaggttattttttttttttctctacgtatcgtataggactcggcccattcctgtgaagagagcacatttcttgcttcccttagtcactacattggtgtcaatgtcagacactctgtattagggaccaaggttcctgaagaatcctggaaaaatggggtgggggtggagaaggcagtggctgggagtgagaatacatgctctaaggccaagagtccaagaggacacggacgtcctctccagccaggccctggtcagaccaaggacacatccaggggtggagagtggaagaccaagagctccccatgagccaaaaatgaataaattgtttctaagtaaaagtgataaaaaatgatgtgatgatacactgatcattgaaggcgaagaggagaacttaggagatttttaagtcataactatatgctaggacaccctggaaattaattttccaattcaaaatattttaattctggtataaacgttcatgaattattatttactgggtacagagtttcagttggaaaggatggaaaaagttctggagatggatggtggtgacggtcacacaacagtgtaaatgagcttaatgccactgaactgtgcacttaaaaatggttaaaatggtaaattttatgttgcatatattttgccatattacagttttgggtctcgttctcttggcctgggctcaaatgacccttccgcctcagcctcctgagtagctgggaccgcaggtgtgcaccaccttgcccagctaatttttaaaattttttgtagagatggggtcttattatgttgcccaagctggtctcgaactcctgggtttaaatgatcttcgcaccttggcctcccaaagtgctgggattacagatgggagccaccgcaccttgccaaaaaaaaaaaaatgtttttaagtacattcgttagcacacctacaaaacttttgactcatctgacacaaatttgtcacttcattcttaaccatattatctctgctgcttaagtgagccctggttctgacgacctgaattctactcaaactagttatgcgaccttgaataagtcatctcacctttcgctaatctttgtatttttagtagaaacagggtttcaccatgtaggccaggctggtgtcgaactcctgacctcaagtgatccacccacctcagcctcccaaagtgatgggattacaggcatgagccaccacgcctggcctacaaaatgaaacttttgaaaaaaaaaaaaaaaaagtctgttaccatcttttgcagttctgatattctaggtttaataacaactgccatttatgagagcttacaggctctctgctgcacatcttataagcattacctcattcactactcttgaggaggccatgagggtggtgtgattaccctcatctgagagagagactgagccttacagagatccagggacttgtccttgaccagtgagcaagtgggtggagtgggctatggactctggactggaggagccccgagcccgtgctctcagccgctgctcagccctgcagcaggaagaacatctgaagcaaactacaaagaacttttctccctgaaaaagcgattagcccataatagaagacctaagtccagcaaaaagagccgccgtttctgctgcactttgtttcctactgggtgacggatggcgctgtcatctcttcagggagggaggcttacagacaggccagctcgtcagcctgctggctccttcaaagtcaggtcttcacagtaggttcctttatttctgtctcaacaagttgaaatcccctcaaattagacacacacttttcttatgtaattaaagtacagtgagaagacaggcatcattttagattatgctgactcctatttctcatcattaatacaatcaagagttgactctcctgcgcttccagaccttgaagcagacatcagctaactctcaggatgcaatgaaggttcactgaccttcaaatattctctaagtctgtttttaaccactattcgttctgtctctctaagccacggcaaaaatcagggctctgcccagtgaccgtcagccagagaagcaggaagaaatgcaagaagaggcagcaagagtacaattgagccttggctgcccatggggtatttaccttccttgactaaaattgttgaaaatcaacctagatattgataacaacaacaataaaaccaccttagaacattcgtacaatgacattatgtggccattaagaatgaaggagatcgctaatggaataaatcattgtctaaatcaatgacagagctttgcaacttgaagccaaatagagcaatcatcttgcagagatagagatggatttgaaaataatattaggtctttaaacaaggagcatccaatgccacaactaacaacctgggaaaataatggcgtaggactcaataggggagtagctcaagtgcaaataacagaaatctaaacccaagcgcacctttccgctcaatgccacattggctaaagctccttaccagaactcacagaggtggaactgatagttgtaatcagaactccactgactagcattcgtatcattatgtatttatgcataagatacacacacgcacatgcacacatgtatagccttcattttctcatcaggattcaaatattcactctcttttttccctataaattccaattttttttttttgagacggagtcttgctctgtcgcccaggctagagtgcagtggtgccatcttagctcactgcaacctctgccttccgggttcaagagatcctcctgcctcagcttcctgagtaggtgggattacaggcacgtgccaccatgcctggctaatttctgtatttctggtagagacagggttgcacaatgttggccgggctggtcttgaacacctaacctcaagtgattcacccacattggcctcccaaagtgctgggattacaggcgtgagccaccacgcccggccaaaatccaaaatttgaaaggccttttgctggtaacgttaaacgtagatttctgcattggatactatctattgataacgaagatctgttacctggagtgggtaaaaccaggtaagtaacactgtatcggttagctattactgcaggacaaattactccaaaccttggtgacttacagcagcaacagtcacttattatttttcatagtttctgtagatcagaaatttggagaggcccagagggagaacagttttatttctgcgccacaatgtctgggggctcagctggaagtctgacaggtgggaactggaatcctctgaaggctcattccctcacttgtctgaccactgatgccatctgtcaactgagagactaatagggttgttggttggaacactcacatatggcttctccatgtggtctggtggctgggatccaagggcaagcatccaaagatggagagagccagacagaagctgtatccttgttatgacctaacctggaggtcacccagcactgtttccaccaaacttcactgaccaagctgatcacaagcctctactcagttttaaagggaaggaacatcaacccacatctttgtgggatgaacatcaatcacaccctaagaagagcacatagatggggatacatctataggtaagaccttctttggaaaatacaaccttcccatacagaaagctgccttctgtagggatgtccatgatgcaataagttataaacaagagtcttaggtggatcctaacagatgaatggaagaatatttggtttctggtaacgtggtgggagacgagattagaaaggtatgtaagaggccaggagcagtggcttaggcctgtgatcccagcaatttgggaggccaaggtggggggatcgcacaagctcagcttgggcaacatggcaaggccctgtctttaccaaaaattaaaaaattagctgggcatggtagcatgctcctatagtcctagctacttgggaggctgaggcagaaggattgcttgagcccaggagtttgaggctacagtgagctataatcataccactgccctccagcctgggcggcagagccagacccggtctctaaaaaaagaaaaagaaaaatattacgatatgaatgtggatcatgaaaaaaaaaatttaagaaaagaaaaatacggtagcaccaggtttcagaaagtccagaatgacacattagaagtgtgggctttattccgggggcactagcgatccataaaagtgtttctagcaaagattgcctcatggccctagagaaaatggattagagaaaggagaaccaagagtcagggaaaccaattgggagttatttaaagtggtctaggtgagggccgggtgccgtggctcgtgcctctaataccaacagtttgggaggccgaggtggacggatcatttgaggccaggagtttgagaccagcctggccaacatggcaaaacctcatctctactaaaaatacaaaaatcagccaggcgcggtggctcacacctgttatcccagcactttgggaggctgaggtgggcggattacgaggtcaggagatcgagaccatcctggctaacatggtgaaaccccgtctctactaaaaattaaaaaaaaattagctgggcatgctggtgggcacctgtagtcccagctactagggaggctgaggcaggagaatggcgtgaacccgagaggtggagcttgaagggagccaagatcgcaccactgcactccagcctgggcaacagagcaagactctgtctcaaaaaaaaaaaaaaaatttaaaaatagaaaacagtttataaaataaggagttaaagatagaaaatgtttttgtacagctgtacagtgtgttcatattttaaactaagcgttactacaaaagggtcaagaagttaaaaaaattaaaagtttatagaggccaactctgggcatgctgcctatgggttagccctgctctgcaaggagcagtaccagaaaaaaaaaaaaagtttatagagttaaaaaggtacagtaaggtaaggttaatttattgcaaaagaaagaaaatatttttaataaacttattgcggcctaagtgtacagtgtttatgaagtctccggtagtgtacggtcacgtcctaggccctcacattcactccccactcatcactgactcacccaggcaacttccagtcctgcaagctccattcatggtgagtgccatgtacaggtggaccatattttaccttttttttttttttttgagatggcgtttcactcctcttgcccaggctggagtaccgtggtgcaatcccggctcactgcaacctccacctcccgagttcaagtgattctcctgcctcagcctcctaggtagctgggattacaggtgtgcaccaccacacccggctaatttttgtatttttagtagagatggggtttcacaatgttagccaggctggtcttgaactcctgacctcaggtgatctgtccatctcggcctcccgaaatgctgggattactggtgtgagccaccatgcctggccttattttaccttttatattgtatttttactgtaccttttctatgtttagatacacaagtacttaccattgtgttccgattgcctacagtattcagttcagtcacacgctgtgtaggtgtgtagcctaggagcaatagactatactgtatagcctaggtgtttagtaggttatactgtctgggattgtgtaagtacatcctacggtgtttgcacagaaatgcctagcgatgtgtttctccgaacatatccctgtcattaagtgatatatgattgtatagttttgtatctgtaaccgtacacatacagtataaagcagtttgccttaaaattacacttacttaacacatggctatacaattttataaagcattgattttgcttataaaccccacaagcggtcgggcgtggtggctcacgcctgtaatcccagcactttgggaggccaaggcaggcagatcacaaggtcaggaaatcgagaccatcctggctaacatggtgaaaccctgcctctactaaaaatacaaaaaattagccgggcatgggggcgggcacctgtaatcccagctactcgggaggctgaggcaggagaatggagtgaacccgggaggtggagcttacagtgagctgagattgcaccactgcactccagcctgggcgaagggcaagactccgtctcaaataaataaataaataaataaaaataaaccccacaaacttcctccttcagcttcttcttcgactggttttgagtatattgcttgaatatattactttggtccctctgtttttcttttctgactgacttaacccttagcataagccaaaatcactgagcaaattatatccctggttctctagaaaacttgattgatagttgaactatgattcaagagttctaaatattgatgggaggagaaggcagaaagtcgcaggcatctctaagaatctgatgaaaattcacagctagtatggcactctcaggtgagatttttgtctcattaaatgggaaatagctttggggtactggcttgagtcaccagggtcatatgaatcagctgtaaattgtcacctggattaggtcagaggggtcataggtatccctggcccttgaaataagggctctgtctgacttagggcagtcacccatctctttgaacttcagtttctcaaaatgagaatgacaatgatgaaaactgccctctggaagcagtgtcctgaggtgctagccatccgtttggaaatcagtattcccttgtgtgcacaatcaaaacaagtgtaacctgtctgttccactgactcttcagaggttgcttttaccactaggacttgtagtttagtttaccgttgaattgctttatttaaactctaatctagttatataaacacacttcagcacaatttataggcttgcgattctttctatcatggctggctcttttttttcttcctgaaacaaactcttgagtctagactttgtcaggttgatacatgagtttggggactgtttatacggaaaccatatacacattccagaaacctgccttgttactgatctgcaataaagatgataagcctttgactcataaaaagacacccacgatatcctttgaagtgcaaaccctgatctactactgaaaaggggcacaaagagattcctcaaaactggccttgttgctttaagaagaggtgactattaacgagagagcaactctatgggcgagaactttctcatgatacaaactgttagcaatgcaaggggctggggaatctgtaaatagtgattttcctcctgggggaagttcttaagcaagactgattgaccatcctcaagaaacagtatgaaagggattcaatcaatcagtggcaaagaagatggatttgtaggtacctttcaattcaaatatcctgtcttcgatttctctaataagcctaggaagacaggattgtgctaatgactcagtcctaaacaatagatccttgtaaacagtggatgtggccaccctaccattggtgacgtagggcaagtggtgggggtatatgtgtggtaatccactgggtgttttaggccaagtgtgtagtccaaagaacacatttctaaacttttaaaacacagacaaattatactcaataaatcaatgttcagtgactgtttcttgccagtgcagaaaaaaacaaacatagaaatggccaaagtttactttgccaatctgtcgtagactacagactattaggagggggatctcagtaaaggtcaggcctaaagcaatgaggagagaaggggagctcttggtccttcagagaggaccgatgtcacagagtgatgacagtcagactagtaccaatgcgcatgagaagcaaatcagttcctgaagctcggtgctatatattcatcacaaataaacctgaaatgcattacctggtctcttctgaatctcatatggatcagtatctaaagagcaataaagttcaggagctgtatcttctaatacaaatgactatatgactatagatatagttatagatagacatagatatagatctaaggatatatgtatgtatattattttggccaacaatttcttctctttcaactaccagaaagtaaaaatacagagatgaaacagtagtgcttttgttacttctttctgggtttttttgttgttatcatttttcttttcttttgtttttttgagacagggtctcactttgtcacccaggccagagtgcagtggcatgatcacgactcactgcagccttgacctccctgggctcaagcaatcctcccacctcagcctcctgagtagctgggactacaggtgtacgccaccatgcccagctgatttttgtattgtttttgtagagacaaggccttgccatgttgcccacgctggtcttgaattcctggactcaagcaatccacctgccttggcctcccaaaatgctgggattacaggtgtcagccactgctcctagccttcttactacctcctgtgtactgatgactcacatcctactgtggaatagatatactgcttttgccttcctagcattgaatcctctttgtctagaaatgacaccttagttttcctttggggaacctcatcactctacgcttgagtgattctggtgggacaaacgccatcgctggctccggatatgagctagtaacctaggtatgctgatatggtttggctgtgtccccacccaaatctcatcctgaattgcaatccccttaatccccatatgttgaggaaaggacctggtgggaggtgagtggatcatgggggcagtttcctcatgctgttctcatcagactgggtgagttctcatgaaatctaatagttttataaccatctggcatttcccctgcttgctcctctctctcgcttgctgccatgtaagatgtgcctgcttccccttctgccatgattgtaagtttcctgaggtgtccccagccatgccaaactgagtcaattaaatctctcttctttataaattacccagtctcaggcatttcttgatagcagtgtgaaaatgaactaatacagtaaattggtaccaggcatagggtactgtataaagatacttgaaaatgtggaagcaactttggaactgggtaacaggcagagggtggaatagtttggagggctcagaagaagaaggaagatgtgggaaagtttattgcttcctagagacttgttgaatggttttgatcaaaatgctgatagtgatatgaacaatgaagtccaggctgaggtggtctcagaaggagatgaggaacttgttgggaaatggagcaaaggtcactcttgctatactttgcaaagagatgtgttagataggagttctaaatttcttttcaaagaatcaatgtcagtatgttcaattctttgcattctacttttaaacttaactaccttgtaaggcaaccttttttgattacctgctccaccctgactcatttcaatcacctgctccaccctgattcattcagattacctgctctgtcataaccatttttcccaccaaaccactcacccgtcactctctttaaattagccaatcagaatcagtttagcctgtgcggtctaaccctagccaataggggaacgacacagcagcaggggccacgtgggtcagggataagaaccccttcccctcccttgtccaagtgtgcgctcatcattgcttcatctgtaaggacacacccctctatagaagtaacttgccttgctgagaattaaaaagaaaattttatatttgagtggtatttcttttgtggcacttttatttataacagatgggtggcattttgcccctgccctagagatctgtgaaactttgaacttgagagagatgatttaagatatctggcggaagaaatttctaggtagcaaagcatttaagatgtgatctgggtgctcttacaatcattcagttatatgcattcgcaaagagatggtttgaatttagaacttgcgtttaaaagggaggcagagcatcaaagtttagaaaatgttcagcctgataatgcaatagaaaagaaaaactcattttctagaaagaaattcaagccagctgcagaaatttgcataagtaacaaggagccaaatgttaatcaccaagacaatggggaaaatgtctccagggcatgtcagaggtcttcacagcagcccctcccattgcaggcccagaggcctagcaggaggaaaaaacaaacaaacaaacaaacaaaccagggccttgctgctttgtgcagtctggagacttggtgccctgcatcccagctgtgactaaaaggagctgatgtacagtgcagaccattgcttcaaagggtgcaagccccaagccttggcagcttccacatggtgttggtcctgtgggtgcacagaagacaagaatcgacgtttggaaacctccacccagatttcagaggatacatggaagtgcctggatgacccggcagaggtgtgctgcaggagcggaaccttcatgaataacctttgctagggcagtgcagaagggaaaaggggggttggagcccccagactgagtccccactggggcactgcctagtgaaggtgtgagaagagggccactgtcctccacaccccagaatagtaggtccgctgatagtttgcaccatgtgtcaggcctctgagcccaagctaagccatcatatcccctgtgacctgcacatatacatccagatggcctgaagcaactgaagatccacaaaggaagtgaaaatagccttaactgatgacattccaccattgtgatttgtttctgccccaccctaactgatcaatgtactttgtaatctcccccacccttaagaaggttctttgtaattctccccacccttgagaatgtactttgtgagatccacccctgcccgcaaaacattgctcctaactccaccgcctatcccaaaacctatatgaactaatgataatcccaccaccctttgctgactctcttttcggacttagcccgcctgcacccaggtgaaataaacagccttgttgctcacacaaagcctgtttggtagtctcttcactcggacgccatgtgcctggaaaagccacagacactgaacaccagccatgaaagcagccagggtgggaggctgccttctgcaaagccacaggggtggagatgcccaaggccatgggagcccacctttgcatcagcatgacctggatgtgagacatggaatcaaaggagattattttggcgctaagatttaatgatttccctgctgcattttggacttgcacggggcctgtagtccctttgttctggccaatttctctcatcgggaatgggagcatttattcaatgcctgtacccccattgcatctaggaagtaactaacttgcttttgattttacaggctcctaggtggaagggacttgccttgtctcaaatgagattttggacttggacttttgggtgaatgctggagtgacttaagactttgggggactgttgggaaggcatgattgtgttttgaaatgtgaggacatgagatttgggaggggccagggaatgatatggtttgcctgtgttcccacccaaatctcatcttgaattgcaatcttcataatccccacatgtcaagggagggggacccagtgggaggtgattgaatcatgggggctgtttcccccatgctgttctcatcgtagtgagtgagttctcgtgagtctgatggttttataagtgtctggcatcatccctgcttgctcttctctctcacttgccgcttgccgccattgtaacatgagccggcttcccctttcactatgattgtaagtttcctgaggcctctcaagccatgccgaactgtgaatcaaacctctttcctttataaattactcagtcttgggcagttctttatagcattgtgaaaatgaactaatacatatgccaatggtttatggatggaaatgtaacccaaattaggctggtggaagccaatcctaggacttttctggggatagcaggaggttttggagaaacaaagtactagttcttcaactcaagttgctgagttagtaggaagtaagcctggacctactacggtaccacctagagagagatgtcttgagaatgaagccgacaaaaaagaaaggatagtgaatgatgaagaaaggaaccacgtcctgatgacatttgttaagcccctggattcagtgatgactcaagccaaaccattccccaaactcttcagtctgagccaatagaaacacttttttatgttacacccatttgcgttaaatttctgtcatttgctctctcaagtgacaagaaatcaaagcaaaagccaagctgtgatggcacattataaagaacccaatcctaatccatatagtggcacatgcaaggggtctggctgggctgccttgaatagacccagtgagaacagctcaacttagtgacacttttgagacctaatcatgtcttaaacctgtattgtctagacttcggagataaattttttttttttaatatgatttgtgttccaatggggaaggctcataagtcattaggagtttagactgtgtagtgattttggaaatctaagtgctcctgcgggtgactcccagtgcgttcttggagattagcattttataaggagcaccaagacatctttaaatagttttgtccattttaacttgacttttttgcatgtgttgaagtaaagcagatttgcaaggtctcaagggaattaggttggggcctgcgctcaccatttcttcatcctttgctagctcatgtgtaatgggaattctatgttctcaattcatgatgaagtgtgagatgcttaagaaaattatcttatgctaagtctaagggaactggttggccatactgaacatttgtaagtttgtttcctctgaaggactgtggagtttccaaattcactttactaagtatgcatatttaatttgcatccaattagataaagcagctgggcagaaactacagcccctatattaatgcactcatttgggcatcagactgggagctttatatgcaggcatcatccagatgaatgcatttaaattgttctaatttacaaattgaagcaaagtctctgcagtttgaaatcttggcaatgcttccattacaacatattttctgaagcattcagaattatagtgctgatgcagtctcactttctagaagcatgctttttaagcaggagaatgatgtgatcagtttcccattatagggaagatcattttgatgctaaccagaggagggcctagaagagagcaggtggccgggcgtggtggctcatgcgtataatcccagcactttgggaggccgaggcgggcagatcacctgaggtcaggagttcgagaccagcctggccaacatggtgaaaccccatctctacaaaaatacgaaaattagctgggcatgatggcaggtgcctgtaatcccagctactcagggtgctgaggcgggagagtctcttgaacccgggaggcagaggttgcagtgagttgagatcatgccactgcactccagcctgggcgacagagcaagactccatctaaaaaaaaaaaaaaaaaaaaaaaaaaaaagaccgcttgtgggcaggaaggcaacttttatgataagctggccaagaaatgaccaggaggtgatccaagacagtgtcagacagtttccaaggcacattagtagggtgcctgtggtggatagaatcgtgcctttccccacaaaaggtatgaccacccagaacctgtgaatgtgaacttatttggataaaggtctttgcagatgcaatgaaggatctcaacattagatcatccctggattaaccaggtcagacttgagtccaatgatagatgtccttataagacacagaaggggagaagacacagagacacacgcaaagaagaagccaggaaaggatggaggcagagattggagtgatgcagccacaagccaaggaatgcctggagccaccagcagcagaagaggcaagtgtggattctctgctagaacatttggaggaaacttagccatgtccacaagctccatttcagacttctggcctccaggtctatgagaaaatgcattcttgctatttgaagcctgatatggtttgtctgtgtcctcaccaagatctcatcttgaatcgcagctcccataattctcacatgttgtgagagggatctggtgggagataattgaatcatgggggtggtttcccccagactgttctcatggtagtgaataagtctcatgagatctgacggttttataaggggaaaccccttttgcttggctctcattccctctttgcgggctgccgtgtaagatgtgcctttcgccttccgccataactgtgaggcctccccagtcacgtggaagtatgagtccattaaacctctttcctttataaattacccagtcgcaggtaggcctttatcagcagcatgaaaaatggacgaatacaaagccactaaatgtgttgcttaaattcctgttgcagcagccagaggaaactcagatggcccctgccaagaggcactcccagcaatcacgttttgttttttctcatctcaccacctgttttagggactaaagatgaccaccttaaagcaaatatgccttcttctataaagaattactctaagctaaagctcctcccactgacctagaagaagaaagcaatacaacttttagggggtgcggggagaatagctttaataaaaatgcctctcttggccaggcatgatggctcacacctataaccccagcactctgggaggctgacgtgggtggattgcttgagcccaggagtttgacaccagcctgggcaacatggcaaaaacctcatctctataaaaaaatacaaaaaaattgctggatgttgtggcacatacctatagtcccagctacttgggaggctgaggcgggaggatcacctgagctggggagatcaagactgcagtgagctgtgatcacaccactgcactccagcctgagcaataaaggaagaccctcgtctcaataataataataataattaataataaataaaaagaaaaatgcctctcccctttaggagcaggaaggatgggaatgcagagattaggaaagacagggagatggtggttctgagttacatgtagaacacaaaattaactagactaggtcagtgtatcaagacgcttggctacaagacacagaaagctcattttaaacaggccgaaacaacaaagggaactgattggcttacgtatttgaaaagacccaaggaagggctgatgtgatccagcagctcaggcctgaagaccctgcttccctccacgtctctgccctgccttgcaccatatagggggtagttctaactgtgggtatgagattgcccacaagactatagactggaaagaaaaagggtgaaaccacgagaaacaccagcatggaattatagatagaggtagacgaatcagcaaaggaaactaggataaaccaggcgtgtgtctccgaggcgaagaaaggaagggttccagaagaagggaatggttagcaaaggcaaatgccactgggagtccagtaagagaaccacagcaaatgttcgttgggtttggtagtttggtgtttactgatgaccttggcagtagccggttgctgaagcaatgaagacagaagacagatcatatgggatgcagactgcatggaaggggctagagggacagagcatttatgaactgagaaataagccagggagagacagagagagagactgaaagagtaaggccttgggaggagctggaaaggccacttgagaataacagaagggaaggattaaccttgaataggaaaaatgtctcttcctcccagtccctgagaccggagagaaattgtaaggatgatgtggatgtaaacaagttggcccaggtgtggtggctcacgcctgtaatcccagcactctgggaggccaagacaggtggatcacttgaggtcaggagttcaagaccagcctagccaacatggtgaaaccccatctctactaaaaatacaaaaattagccaggcgtggtggcccatgcctgtagtcccagttactctggaggctgaggtgggaggatcgcttgaactcaggagatggaggctgcagtgagccaagatcgcaccaccatactccagcctgagtgacagaataagactccacctcagaaaaaaaagttagggagtgtgcttatgggtaagtgtaagaggacactgtgggaaattgagagaattcacaaccaatggtctctattttcacccactgaataagaatgtattcgtttcctgtggctgcagtaaaaaaatagcacaaacacactgggtggcttaaaacaagacacttatcctctcacagttctaaaggctcaaagacagaaatcagggctatgcaccctttgcaaccagcaagggagagtcagtccttcctcgtctctttcagcctctggcggcctcaggcattccttggcttgtggctgcatcactccaatacctgcctccttctcatatgaccacctatcctctgtgtctctctgtcttctcttcttttaaattgaccagtctttctttcttttcttttttctttttcttttttttttttgagatggagtcttactctgttccccgggctggagtgcaatggcgagatctcagctcactacaatctctgcctccctggttcaagcgattctcctgcctcagcctcctgagtagctgggattacaggcccctgccatcatgcccggctaatttttgtatttttagtagagacagggttttgccatattggccaggcaggtctccaactcctgacctcaggcgatctgcctgccttggcctcccccaaaagttgacatgcttaaatgctaatcccaggacttgtgaatgtgactttttatggagacaaagttttggagatataatcaagttaacataaggtcattagggtgactggtgtccttataaaaagggaaaaattggccggcgtggtggcttatgcctgtaatcccagcactttgggaggccgaggtgggtggatcacctgaggtcgggagttcgagaccagcctgaccaacatggagaaaccacgtctctactaaaaatacaaaattagctgggcatggtggtgcatgcctgtaatcccagctactcgggaggctgagggaggagaatcgcttgaacctggtaggtggaggttgcagtgagccgagattgtgccactgcactccagcctgggcaacaagagcgaaactccatctcaaaaaaaaaaaaaaaaaaaaaaaaaaaaaggaaaatttggaaacagacacgaagggaaaaaggaaaatttggaaacagacacgaagggaagaagtgaagagacacaaggagaagacggcctctacacaccttggagagaggctggagcagagctttcccttacagccctgagaagacaccgaccttgccagcagctggatttttggactcctagcctctagaactgtgagacaatacatttctgttgtttaagtcatctagtttgtttaaggctgccctcgcaaactaatacagggaccacagagccgtcctctgtctatccctgggattctcttactaacagggcgctgctgctcacagagttaaaagaattcactccaggctaaccattgatctggttctcacacttcaacgtttcctttcttccacctggcacataaagaatcgtttgccagcagccagcagtctaatcattaagcggctgggaagggagacatcaaagcagtaaacaacacacagaacagtgttacttgagcaatttgcctaagaaaccactttatcttctcggagagctagatgcataaattgtctgcagttgtctttggggagagttgacgaggtccgcaggggaggagttactggtatggccagtgagtgtactgaatactgattccaggaaaattaggaaaacacttctggtgtgtttgctcctgtaaccccggctgctgcaccaagcttctagtgtgttgtttttcttctattctctgaccccctcctctcaagtaagccatattttgtgcagatcttcggtctttggggaatgtgtctcttccattttctccctcccagccctgcccctcctctctttccgacctttgggtcctccacttcagctgagggaccctaaaaacttggctaccactttcccaaatctcaaaggaagataacagtgatggccattaaaatactgttcagctgggcatagtggctcctgcctgtaatcccagcactgtgggaggtccaggcgggtggatccattgaggccaggagttcgagaccagcctgggcaacatggcgaaaccccgtctctattaaaaatacaaacattagccaggcatggtggcccatgcttgtaatcccagcttctcacgaggctgaggcaggagaatcacttgaactcaggagacagaggttgcagtgagctgagatcctgccattgcactctagcctgggcggcagagcaagtgaaactctgtctcgaaaaaaaaaatactgttcaattacctctagaggaaagcaggaatagttaaaattggtattgctatgacaccagaaaacaaattttagactgacagatcacagcctagtgtctacttagactattatttttgcattgatttgtctacagttaacatcatacagaccatctaggagttactgcaaaattgataccagggaattaaaatacactttaaaatacaaagttctatataaattgtaaatcatctttcctagcggaggttgctcttctatatcagctttcttcctctgagcctctcatcatgtctcattaccttttgctgaatgcagcaggctgttcaatgctgttctcactgtcaacttttaagccgtgggtgccatgattatatagctgaaggagcttattttccggaagatttatgaaacctttgggagtcatctgctttgacagaaccctttgtggaatgagggaggggataaataaatatacagtcatgcatcacttaacctaaaaaatgcgttcagagaaatgcaacattagacaattttgtcattgtgtgaacatcatagagcaaacccacgcaaacctagatggaataaccggctacacacctaggctacaagcctgaacagcatgttactgcactgaatactgtaggcaactataacatggtggtaagatttaataagatttaatatctgtgtatgaaaacatagaaaaggtagagtgaaaatgtggtactataatcttctgaggccactgtcatacatgcagtctgttgttgaccaaaacattgttgtgtggcacatgactgtagagataaatgctaggatttcaggcccaaaggttttatatatatgtatacatacatatatgtatagacatgcaaaggttttatatatatgtgtacacatatataacctttgggttatatatacatatgtatgtatgtacatatacctttgtatataccccaaaggttatatatgtatatatgtgtatataaaacctttgtatgtctatacatatatataaaacctttgggccagaaatatacgcatatatatgtacacatatatacagatatctatctatcacagatagatagagatagagagagagagagatctgtatcatgtgtacacatttgaatacagaccagggctcaacaaactctttcagtaaatattttaggctttgcaagccacatatcgtctctgtggtatattcttcatttttattataatcttgtaaacgtaataaccaggccaggcatggtggctcaccccgtgctgtaatcccaacactttggaaagccaaggtttccaagtgttggaaggttccaagccaaggttccaagccaaggaggatctcttgagaccagaagtttgagaccaccctgggtaatatagtgagaccttgcctctaagaaaaaaatttttttttaaattagcgcacctgtaatcccagctaacaggctgaggtgggagaatcacttgagttagggaagttgaggctgcagtgagcagtgagcatgccattgtactccaacctgggtgacacagtgagactgtctctaaaaaacataaacattaaaaatgaatacatgtagggctgggcgcggtggctcacgcctgtaatcccagcactttgggaggccgaggagggtggattgcctgaggttaggagtttgagaccaatctggccaacatgttgaaaccctgtctctactaaaaatacaaaaaaattagctgagtgtggtggcgtgcgcctgtaatcccagcaactcaggaggctgaggcaggggaattgcttgaaccagggaggtggaggttgcagtgagccgagatcaccccactgcactcattattttatttgaatttcaccacaagtttgttaattccttgtattatcctcatttaaaagctgaaaaagcccagacactttggtttacacctgtaatcccagcactttgggaggccaacgcaggaggatcacttgagcctgggagtttgagaccagcctgggcaacagagcaagattccatctctacaaaaaatttaaaaattggccgggcatggtggcatgtacctttagtcccagctactcaggaggctgaagcagaaggatcgcttgagcccaggaggctgaggctgcaatgagctgtgattgcaccactgcactccagcctgggcactctttctttaaatagccaggttgttgagtgatagcggagtgatcatgggtgaaataaaatggagtcccagctttgatcctttgtctttagtcactgtcatctcctcttcctcctttccttttcatggaactgatatttactgagtgactgtgacatgctgaggccctgtgcgaagctggagatccggtggagcgccacaggcacggtccagcctgcctgatggcgccccgttagctggcaggcaggcaggaagctagcaatcagagcaccgtgtgctcaggggtgtgacggggtgagcgcagggggccgagggggcaccaggcagcgcagccaacccaaacctggacaggcagaaaaggcttccatgagaagtattgtctgcattgaagggtcaacaatgaggagtgtcagctggggggagagctttgcagagcctcagacacccctgtttcaggaccccacagcgcagatctgcaggggcagggttttatccagcctctgcctcaggcagctcgtctcccaggctccggactcatgaaccacttcttaggggagtatgcaaaccaggagaaccagaggcccagatctgtagtacctgtgtggttggttatttagtgcatctctacctgcccagaagggcagaaacaagaggtttggagagcatgtgccttgttcacggctgcatccccagtgcctagaacagtgcctggctgagacaaaattccaattatttagagggtagaggaaacaggtggatgcacggtccttttcacactgaccattgctacttgcgggcagggagaccagggaggagcccagggcaagggaggcccccacacctaggagatttttgaagtcagaaacacaccctaaagatgctcatggcctctcatctgcctttctccaccagccctcacgttgtacttggtgaatacgctgctccgactttaaagtttcttcctaataagagagatctaggtttaattaaacccaagtaatagaaaacaagggcatttgggcacattcggctcacacaacaggattccctacttagcctgtccactaaagggagtttctactgtcaaagttattattgccctctgtgtgaaagaagaaatgtgtacaaagcactatgagttaattaataattgttgattgacagtgattggcatgtaatattggtgccccaaaagaaattttaaaaacaggtttctttaatctttgaaaaatgccacgtgaagagggtcttcattctcggtgttactctccccaccatgccagctccccctatattcctgttgatttgagggattgttcttaacagaaataagttgatttattcctgttgattacagggattcctgtaatccctgatgtattcctattggttttgtcccaagttcagtgccaaaattgctctggttgggagaaaacttgaaaatggccattatccaaacctaaagctgttcccagctggtcctaaggctacagatgtttctctacaacagcccaaatcacagagacaggggattggcctacacacggtgcttcagaggctcccctgaagccgacccaaggggagtctactctacatgcttgggaccctgcaggaaccagataaagatgtagtctttggaccatcgcatctagtggcagtaatatttattgagcacttactatgtgccgggcacagttactcatttaatactcacatgatccccaaggaagaagttaccatcatcatccccatattatagatgcaaaaactgaagcccagaaagattaagtcacttgtgaaaaatatggcagggcccagacttgctgccaggcaggcaggcagcagaggcggcatgcttagctgcaaggctatgttgcttttgtccaactcttgccttttttgctgttgtagccatttttgttttgccaacatacaaaaagagtttaatacatgaaagttatctaaagccattcagtctcttctttccctctagaagccaaagctggagagattccaatcacggcagcactgcgcatagacattctccttttaaatgcaaacacctttgataagagtaactcaggcctgaaaagagagctcccagaggaccaggaccttctttatctgcatgcccaggactaagcagggtatcgggtagtgggtgctcagtaagtatttcttgaatgaaccttggtgagtatttaatggtttcatgtaccttgttttatgagaacaaacttttgttgagtgattgctttagcctcctagtctgttaggctctaaatatagcaaagaatgtaatctagttcctgtcctaaaggagcttccggcctactgggagaagaaagagactagtaagcaaataattacagaaaaataaagccacagtgggtgtgtatagcattgccctatgggaacacggggcaggacagcctaagacaatctgggcgtgtgcgtgggaggattaaaggaatttccagtagtgcggggaggctggaatctacagtagtcccaggaatggccccaggaggagtgccttcagtggaggctgggaagggaaggaggccagatcacagagggtttgtatacagacagggtccaggtgggccaggccacgccctacattttggcatagctattaatagtctcccattactcactagagcatcccaatcaattatgcagacatcctatttatatttatgtaatatgtaccatatatatacatatatatatgtatatatatatagactaaggacttgaacttcatccaaccacttgcattgcaaatgtagaggaatgttaagataataagataggccaggcgcggtggttcatgcctgtaatcccagcactttgggaggccgaggccggtggatcacgaggtcaggagattgagaccattctggctaacatggtgaaacaccatctctactaaaaatacaaaaaattagccgggtgtggtggcgggcgcctgtagtcccagctactcgggaggctgaggcaggagaatggtgtgaacccgggaggcggagcttgcagtgagccaagatcctgccactgcactccagcctgggcgataaaacgagactccatctcagaaaaaaaaaaagatgataagatcaatagaatgtagatttgacctgggaagaggaggaataatcagagtccagttgtgcacatatgtaactgcccacacccggcttcaggggttctgcgtcagaatcacttggggtttcataaaatggacagtcaccctaactcagtcagactctctagaggagaagctgcggaaactgtagggttaacaagccacccagatcattttcatgcgctccaaagtatggaaaccacagactgaaacatcaccaagctaacaggtgcctgaatgaggtaggaggaggggggcatagcagctctgctccaatgctgtgtctgctgagggacaggcccgcaggccccacagagtctgctctgagtatccaggggcagaggaggacatctgctcctgggagtggggagagaaaataaagtaagaactataactaatcaccaggccaggcaaggtggctcatgcctgtaatgccagcactttgggagggcgaggtgggtggattgcttgaggccaggagttcaagaccaaccgggccaacatggtgaaaccctgtctctacgaaaaatacaaaaattagctgggcatgatggtgtgtgcctttagtcccagctacataggaggctgaggcaggagaatcccttgaaccgaggagatggaggttgcagtgagccatgattgtgccactgcactccagcctgggcaacagagtgagacactgtcccccctccaaaaaaacgaaacaaaaaaccacacacacacaaaaactaatcaccaccttcataaaagcatccagggctgccctcatattcaaggcttgtgcagagatagagaaagaacaggcagtagaggaaaggacggcaggaagaaggagccagcaaagccaggactctgctgggaacagagggcattgggctgtggggcaggaagttaaaatccaggagtgtcctacccgtgcaggatgtcccatcacattcttttcgtaaagggccccctgcgtcctgtgcaggctgtgaattgacatcagcccctgcctgacctccacccccagcaagcttgcagccaagctgcaaacagaattcatgtctcctgattcctaaaggttcattctgaaaaaagaaggaaataaagagagagaaaaagaaagagaaagaaagagagaggggctggatgtggtggctcatgcctgtaatcccagcactttgggaagctgaggtgggcagattgcttgagccaagtaggtcaaggctgcagtgagccgtaatcgtgccaccgtactccagtctgggtgacagattgagatcctgtctcaaaaaaaagaaaaggaaagacagaagaaaggaagaaaacagagaaagagagggaaaaatagagagagaagagagtagaaaagatagaaagaaaaggaaggaaggaaaagaaaaaggaagaaagaaagagagaaagaaaaaaggaccaaacttagaactgttgtgagtttgggcaggaaagagaaggccagctgagtcaccgtcatcaagcaacgacacttggaacatctcctggcatcagggttttcaggaaagggcccattttctaacctaccagcgagcacaaggaagatacctgttggcaggtagctttcatgtacactgacactttccaccgtgttcaaactatcagctaaacctgtcaatattttccttctcctcagctctccctctcctctttggccgcctatccttttttttttttttttttttttttttttttttttttgagatggagtcttgctctgtcacccaggctggagtgcagtggtgccatctcagctcactgcaagctctgcctcccgggttcacaccattctcctgcctcagcctcccgagtagctgggactacaggcacctgccaccacgcccagctaattttttgttttctcttttttttttttagtagagacggggtttcaccatgttggccaggatggtctcgatctcctgacctcgtgatctgcccgcctcggcctcccaaagtgttgggattataggcgtgagccaccgcacctagcctgctcctatccttattgattgccacccttctcaagaccctctgtaaaatttctgcattccttctaaacacagagcccaaacagcaaaaaggatctaatcaacaacaaactccctgttcttatttgccagacttttaatattgttttaagacacagttaacttgcattcagtttacagctcactgttgcttatgttcacttcagagaagtctgtctttctcagcaatataaaaactgaaaacattcttccttaatttgtatctgggtagttttactcttaactcagttgagctgctttaggtcaaatggtatcccaaaatttcctaaagtatgtttctcagagcaggagtattagattatgttcctggcttagggatcaaattaggtggaagggaggtggtaatgcagacatctcttggagatttacaatgatggtagcatgtagaaggctgcgagaagtctgcatttttctaattaagtattgccctgcttactagcctactcctgacactgcaacctctagcatctctttctgacttcccgggagcaagggctttcctggtgctggaccaacatgtctccctaaatcctccacgtggcaaaatgatattcctcactatgttgctgatgacaagtttcagggttttttctttccccaaatgaaataaatgtctttgattgctttttattattattacaactatttttcatattactatatattatataatttattattatattatatattaataacaagcaatacagagcagcaaaagaatgtaaaacatctactctctcaacaaaaaccaccgtcaacatttctttctagatttttcttttttttttttttgagacagagtctggctctatcgcccaggctggagtgcagtggcgctatctcagctcactgccagctccacctcccaggttcatgccattctcctgcctccgtctcccaagtagctgggactacaggcacccgccaccacgcctggctattttttgtatttttagtagacacggggtttcaccgtgttagccaggatggtctcaatctcctgacctcgtgatccgcccgcctcggcctcccaaagtgctgggattacaggcgtgagccaccgcgcccggccgttctttctagatttttctaggtataatgtgtaatacatgtgcttacgtatttttttatgagttcataccgtaatgtatttttttaacttatcagtgatttgaagctcaccataatgtatttttatacaagtaaattagtaacatctttccacatcgagagttccatttctgtaatgttattttaacagctacataggattgttttgtatgactgcagcataattaattaattgatcccctatggtgagacatgtggattgttttcagccttcctttattccaagcagaactgtgatgaacatttttagagttacagccttgcacgttttctcagttatttcctcagggtagattcccggaagtagaattacaatgttccttttgacatggtgctgagatcacgggtaagcaccaagtgtgtgcaggtaggtcccagtggtgggttaggaacaggcaggatcccctgttcccttctcacagggacggcacattcacgtgccccacaatgcttctgctagtctccttgacaaattaccaccaacgtggtggcttcaaacaacagaaatttctcttagttctggaggccagaagtttgaaatcagactgggcatggtggcttatgcctgtaatcccagcactttgggcggccaaggccagtggatagcctgaagtcaggagtttgagaccagcctggccaacatggcaaaaccccatctctactaaaaatacaaaaaattagctgggcatggtggccagcgcctgtaattccagctactcaagaggctgaggcaggagaatcgcttgagcccaggaggcggaggttgcagtgagctgagattgggccactgcactccagcctgggcaacagagcgagactccatccaaaaaaaaaaaaaaaaaaaagttagaaatcaaaggattggcagggccacactccctctgaaggctccacgggagaatcctacctcatctcttccagcttctggtggtcccaggcattccttggcttgtggctgcatcactccaatctctgcctctgtcttcacaagacttcctcctcttctctctcgatctgtgttttcttctcttctctctcttataaggactcttgtcattggatttacagcccaccacataagtcaggatgatctcagctcaagatctttaacttaattacatctgcaaagatcctttttccaaagaacatcaccttatgggctccagggattaaggcaaggcatgtctttgcaggggccaccatgaaacccattgagatgtgcttccaggctagaaagagtggccttcaaactggtacacacatgcatacatatgtgagcaggggacattcttaccaagtacaatcttatgtgacaccccaatatataaagggggtaagtggagctgtttggctgaggtggaatgcagggagagcagcatcactccatcaaggacacactggattgtaggggacgcaaggactccaagccctcgatgtctttcaaaggaggtcagagggagggccacattgtacttgctgtccttgggagaacgccccaaaccctccctctctggctctgcgccttggcccacacaggccccgtctctttgccaccacagagagaatcaggcacccagagaagttctgcacatgataagaaggacttgggtgagaatcacacggaggtcctgacttacagtttttttgaaaagcaaatcattcgcatatctcagcaaaagtcctcaaaggacattcctgagtttcagtgggaggaaaaatgagttgctttctgagccctctcagcacctttctggactggtgaatgttacaatatgctgtgttgctacaactttatctacaaactgggcccgagcgtccgacacagactgttcctgcactcacaaatgacggtgtattccagaagttcatttgtaggtgagttgtttgcatctcagaaagccttttccctctgtcgggggctagagatctcaatgtctattgattgttacagacagcaagacagagctcttgtagctggctggcctccaccgtgggcctcgcagagcccccagactcagagccctgggcaacactgggcttgaaagcagggctagaagggaagggcaaaatggggcacagggtctcccaggcactcagcagtcatgggcattgctgagggggtgccaaggacaagagggttgaggggcaagacggtcaccatgggggtggctgcagaaggccggagcaatctgtatgtcagataacttggtggggcaggcctgcctgtattgttgccatctggctaataaggatttgaaggctgtgaaagggaaggggttttgctgtaatcgtttcctagggctgctaggaaaaccaagtgccaccaactgagtggcttaaagcaacagaaatgtattctctcgcagttctggaggctgcaagtctgagatcaaggtgtcagcagagctgtgctctctctcctgccttctggttgttgccagcaatgcttggcgttcctggcctgcggctgcatgacacatttctctgcctccggtgctccatggccacctcccctctgcacgcctgtctccacatggccttctccctgtccatgtgtctcttctcataaggacaccagtcttactggatcctaatgaccctatcgtaatatgatcacatctgcaaagcacctatttccaaataaagttacatttacaggtactagaggttaggacttcaacctatctttttttggagaaacaatttaacccgtaacagaggcatataatctgtcatcccacctaaaataaaaatacaatctataatggccatgatgtgtagccacagagcctctgctaaatactgccagcaacaggcagggaatccattccatttttaggtagccccagtcatgagctacctcattccttaaaatggcccaaaatacgcttctccagactttcacctgttgaactgttttcctttattgaactacatagaataaatccaatcactcttgacaaaatcttttcaaatatgtgaagccctcccagccagcctccaaatattttcttaaagctaaaaattctccagatctttatatgattgacatgagggttttttgttttgttttttgttttgttttgtttgagacagagtctcgctctgttgcacaggctggagtgcagtggcacgatctcagctcactacaacctccgcctcccaggctcaagcgattcttgtgcctcagccactggagtagctggaattacaggtgtgagccaacacacccagctaatttttgtatttctagtagagacagggttttgctatgttggccaggctgatctcgaactcctagcctcaagtgatctgcccgccttggcctcccaaagtgctgtgattacaggtgtgagccactgtgcccagccatggttttaagatctctcaggattctagtcactgaactctggacatggtcaatggtctaggcccatcctaagaagaggcttccatgactgaaagcctacaatgtagatatgatctgatggatgaagaaatcaatgggtgtatttatttctaggatttgagcattaccccactacagaaacctaaccttgtattgagatttctgttttggtttggttacagtttgggtttatccgcttgcttgttttgcagagggtcgcagagtttagtggcaaagctgggctgttgactcagattacgtttgcgtcagttaaaatctctgagctttttcataattcctcttaaatcacatcttccactcattacttgtgctgtttctttttgaacctcctgcatgttggttcctattaaatttcatcttactgctctttgtacttcaatgtaacagcacattccacctcttgcaaatgttggcatgtcattcctgcattagccatccaacccagctctggtaatctgcttccaacaggaaaaaacaaggaggaaagagaaccaatatctagaacatttattaagacgccagcaagctagacaattgttaattgacatctttttaattgacatcaacacacaaacagaaaagtgcacaaaaaaacatacaattcaatgaattctcacaaagcagatgcctgtgtagccacccatgtcaagaaagagaacattaggctgggaatgttttaataagcatttttctctttaaatcctcaagcctacttggtaattattattaaacctggtttacaagatgataaaacagattcagaaaggttaagtggcttgcctagctgactgccacagctgggagttgtaaagcacggaatgggccccatgtggtggctcattcctgtaatcccagcactttgggaggccaaggcgggtggatcacttgaggtcaggagttcgagaccagccaggccaacatggtaaaaccccatctttttttttttttttttttttttaaggcagagtctcactctgttgcccaggctggagtgcaatggcttgatctcggctcactgcaagctccgcctcctgggttcatgccattctcctgcctcagcctcctgagtagctgggactacagacgcctaccaccacgcctggctagttttttgtatttttagtagagatggggtttcaccgtgttagccaggatggtctcgatctcctgaccttgtgatccgcccacctgggcctcccaaagtgctgggattacaggtgtgagccactgcgctaggactgaaaccccatctctactaaaaatacaaaaattagctgggcatggtggcacacacctggtagtcccaggtacttgggaggctgaggcaggggaatcgcttgaacctgggaggcggagactgcagtgagctgagattgcaccactgcactccagcctgggcgatggagtaagaccctgtctcaaaaaaaaatctaatataccccataaaaatatagacctattatgtatccacaaaaacaaaaagaaaaagaaagaaggaacccaacatttgcctataagaacagaaactacgcttactacaagtcaacaaagaaaaaaaaccagtgtagtcctattacccccatgcttagcactgtctgaaatgtcctctccctccctcccatccttactttttttctgatcaacacctcttcatccccacttcagcattccttccgctgtgaagctttgggagactttctcaggttgagctaatcagctcctcttttgtgaccttctggtacttcctattcttctagttagagcagcggtctcatgaatagactcctatttcctgggttatctccctcacgaaagagttgtcttgaggggaggagtatggtttgttcatctttgtacttccactggttaacaaagtacctggaaaaaaataggcattcaatgtgtgtgctgtggtattgttgaatgcggtagaggatggctgagagaatgcagagcctgagtgcagaagcggggctgcaggtgctgggggctgaaccagggcagcagtagtggggatggagatgcttaggacagctggtcctaaatcctggtcattattaaatcgccttaggaggctggggaggactttaaaatgcagatgctcaggctacttccagatgtactgactcagtctctagggaggggactccacatctgaattcattagaagtcctttagcagggccgggtgcggtggctcacacctgtaatcccagcattttgggaggctgagcgtgtggatcacctgaggtcaggagttcaagaccagtctggccaacatggtgaaaccccatctctacaaaaaatacaaaaattagccaggcatggtggcatgtgcctgtaatcccagctgctcgggaggctgaggcaggagaattgcttgaacccaggaggcggaggttgcagtgagccaacgtcacagctctgcactccagctatctcaagaaaaaaaaaaaagtctttcaggggattcggatcctcagacaagtttggaaaccactgacataggtagtgtcctgagtcaaacttggaggacacatgggaggcagggaaaggggggaaaagaaagaggagtctgggtcctaggtttgcccagcatggatgatgatgatggcattgacggagcgagtgctggaggagccttggggtgaagttgttctgcacgagctgagtgtgcggtgtccgcacatatcccgatgaagatggccttttggcaactgggagccaagccggggactcaggagagcaatctgtcatttaggaccttgagaatttgccgttttgctaggaaaaaggtcatcttcccatactcactctgtcctctagtttagcagaaagaggtaaaaattacttttactttctaactgattaagcctgacaatcagtagtgataatccagaaataagtacatttaattcatttatgacagtcctagggtttgcatagttacctgtttctcataaacaaatgctttaaaagaaattaaaagaaggatatttttgagaaaatatgcactttaaaaatggtcatgtttaaactccagtggatgttagtaattgacttgaaagtctgtttttacaaataaatcctggacccataaatggatatttgaccccctatagcataaaagggcaaaaacatgtctgtagaaacatctgacctaatcaattttcaaattaatctaaaattactatttgaattcaaatgtagtaaatgtcatgggtcctttccctggggcacagacataaacctgatctcctaaatgacataaaatagagaacggagcaatttctttggtgaatatgaataagcattggagcccatctggataatttacataaaaattggattttcgcccttgaattatctttttatagtggacatctctcatattgtctcctcagcctcctgttccccttgtcttcccctgtgagactcctgcagaaactgccctttttttaatttgtttatttttgagacagagcctcgctcagtcgcccaggctggagtgcagtgacgccatctcggctcactgcaacctccacctcctgggttcaagtgattctcctgcctcagcctcccgagtagctgggattacaggtatgcaccaccatgcctggctactttttgtatttttggtagagacagggtttcaccatgttgtccaggctggtctcaaattcctgacctcaagtgatccgcccgcctcatcctcccaaagtactgggattacaggcgtgagccactgtgcctggtcagaaactggcctgtttttatggtgctcccttcctctggtggaagttcactggtccaagatcaagctcgcctatccccatgggccaccagctctctccccaagggcatctgcctttgggatccagccttgaaggcaatccttttctagaactaagaactcccaggataaaacttgggaactgactacgttacctaccattaaaagaaatcctttcaaaagagaatgaagcccaaataagagaataagaaacatcctgacccactggcgcccctagttctagtagcttcggaagccaggctggaatgaggacctctcacagtcggatggttcattcttctttaggttctgtgatccaagaactcctttcagcctactctagagcaagatgggtttccagtctcctgaaactaggactgccaagaataataatgtaccatttcatacagattgactctccaactcaacctctgagatcctaactttcctcaaaaccaaacgaaaaggaatgagcggaagaagatgctctctcttaccggttgaattgtgtcccctccctgcaagagatatattaaaagttctggccctggtgcagtggctcacgcctataatcccggcactttgggagcccgaggtgggcagatcacttgagctcaggagttcaagaccagcctggccaacatagcgaaaccctgtctctaagaaaaacacaaaaattagctgggcgtggtggcgcacgcttgtaatcccagcgactcgggagtctgaggcaggagaatcgcttgaaccctggaggcggaggttgcagcaagctgtgatcacaccactgcactccagcctgggtggcagagcaagactctgcctcaaaaaaaaaaaaaaaaaaaaaaagaagaagaagaagagaagagacacagagacagagacagggaaacaagagagaagatgaccatgtggtgacaggtgcagagagtggagtgatacagctgcaagccgaaaaacatcaaggattgctggaaaacaccagaaactagaagaggcaaggaaaggtttttccctacaggtttcagagagaacatgggtaaaaccttgacttcagtcttctggcctccagagctctgagacaatgtgtttgtgttattttaagccacccagtttggcatacattatttggtagccctggcaaactagtagtttctaagatactttctatccctacattgtcctgctttggtgcttttatatggttgagaaggggccaaaggtaccaagttcttttccttgtgaagttcagatggatgccctgataaatggggcaagagggatgagggaggggattacagactgtgggattatagacttttagcctaaggctttgtatccaacagttgtcaaattgaggttacacactgagacttggttaggggggcacttcagacatacagcagaccctcaaaaaaggttgcttttctttatatcttatattaatacaaagaagagctgaaaaaataccttcaaaagctgtttgctgtgagctcaactgctgactccaccccccagcccagttccatgctgctcctgtccactccttcttttttttttttttttttttttggatttttgccaaagttccaggccaaagtttgtaaaagtcccctcttcaaggaacatttatttagaatgtcttgctacacgggaaaacacaaatctctcttggtttgtaccatgcggtcttaaccagagcaaaatctagttggtaaacaaaccaaaaaaaaaacccactttggcctccacagctgccaccccttacctccatctctcacacattttctagtatgtaaagaacttgtgactgtgaggacgagtagattttcacacagatagaaactgagagtacagccattcatcactctgtggacaaatcttcaaatccatgccttttcactcactggaatataagaagttaactgtattttcacaggataaatctggatgtttcagtaaatcttaagttgttcatgctaaccacgagtgtgtctgtcagtaatacatgaaatctccaaaagatttaggagcgacattgatgaaggtgtttatttttatttattttttttatttatatattttatttattattattttgagttaaattaaattaaattttcatagagatagagtcttgctgtgttgcccaggctggtcctgttgtttctttttcccttccttccttcctttttctttctctctctctctttctttctttctttctttcttctctctctctttctttctttctctctttctctctttctttctttgtgtttctctctttctttctctttctttctttcttcttaagacagagtctcactctgttgcccaggctggagtgcaggctggagggctcactgcagcctctacctctgcaggatcaggcaatcctcctgcctcagcctcccaaatagctggggatatgtagatttggagtgggtatccacttcaggtaggaggaagaacaatattagcaaaggcagaggcaagaaagcaccctgcattttggagacaatagaatcaagcttttctgagtggaagggattttaacacattggttagtccagtgatttttcacatcatgttaaattgcataactctaaaagatgatttagagacaatatataaagcagacaaaagtggagctgatctgagtagatcagggtggatctagtgggacccagccatgatggtatgagagacccatgtgtaaccttcataagagaaatgtaaactgaaatcaagataaggtttggttaacaaatatagataggaggagaattgaataaatagagacattcatgtccctgggtggagaagtgtccattgttatctaattaatgtatacctttactgctattccaactcaaatccccatggaagttttgtagaacttaatatttttttcagaaagaagactctagaattaggagaattactctaacatttaacagtatattgtaaaactgtaataatttgcattctgtatactttatcatataatactataatactttctaatactatgctattagatttcataataaagaacagtgtgataatggtatacaaggcttatccaaagataagccttattatacaataaaattaaatacatgagaaaaagccattataaaagtcaaagggaaagaaagaaaaatgcagttttctttgggaataatatataggtcatctggaataaaaatcctattgctattcactacaaacctataccaaaataagttccagatgatttaaggttttaatatattttaaaatataaaaaagaataaaataaattaaataggtggtaaacatctagatagaaaaatgacattctatactaagaaacacttgaaatcaaaagatgaacagattttaatagatacaatgttaaattgccctaagtaaaaaataaaaataaaatcaataaccaaaaataaggcaccaataggctgaaaagtgcaaaaataaatattatacaaacttaatagcctttttatatgatttcataaagtaagaaacatcaccaagaccttccccacaaaatgagtagacaacccgccaaataaaatttgtgaacacatatatggaaagataattaaacgtatttgcaggcaaagaaatatagactttggccggatgcagtggctcacgtctgtaatcccaacactctgggaggatgaggtgggtggattgcttcagcccaggagtttgagaatagcctggcaacacggtgaaaccctgtctctaccaaaaatacaaaaaaactatccaggtgtggtggcgcacacctgtagtcccagctacttgggaggctgaggcaggaggatcacttgagcctggggggctgaggctgcagtgagccaagatggcacctgcactccagcctgggcaatagaatgagaccttgtctcaaaaaaataaaataaaaataaaaataaagtaaaaggaaatatataggctttgattctttttgtcattctggccaattaaccttttctaaagaaattattatgaaattccaactagcctaaaaataattttttttttttttttaattttcttgagacaatctcactcttgcccaggctggagtgcagtggtgcaatcttggctcaatgcaacctccacctcctgggttcatgatgcaattctcctgcctcagcctcctgagtagctgggattacaggcatgcgccaccacgccaggctaatttttgtatttttagtagagacggggtttcaccatgttgtccaggctggtctcgaactcctgacctcaggcgatccagctgcctccccatcccaaagtgccaggattacaggtgtgagccactgtgccccgcctaaaatagtatttttaagtgtctatccttaaaataaaataattcaaaaacatgagaaaactcgatgtacaaatccattcagggcactattatttacaacagcaaaaagctaatatgcaaacaaatgaataaattaagccacaatggaagattggttaagtaaaatggaatataataacttgatagcagattatgcatccatttaaagtttttaatgcaaaaactgtgcaaaatgattttatgttgagtagaggcaacagcaaacctgtgttactcctactgtatccccagtgcttagcacagcgcctggtccccaatagggaaccaatatgacttgttaagtgaatgaaaactgcacacacaaggtatgactccagaccatgtaaaacctacttacagagaaaagaatgagaagaaatataaataatggtagaagtgtagaagaagttatactcctactttacatttcttttcattttttggagaaaaaaaaaagaggcaatgcccaaaatattatatggggccatacttacaattgtttatcaaactttaactaggtgtcctgtattgttatttgctaagtctagaaaacctactagacaacagatttcaaatccttatggttaatgtttgcttgttttatatagatatatatttttgagacaggatctggctatatgacccaggctagatggcagtggcacaaacacagctcactgcagcctcacctcctgggctcaagtaatccttctgcctcagcctcccaagtagctgggactgcagatgtgtgccaccacgcctggctaattttgaaattttttgtagaggtagggggtagcactttgttgcccaggccggtcttgaactcctgggctcaagtgatcttctcgccttagcctcccaaaatgctgggattacaggcgtcagccactgcgcccagccccttacagttaatttttgaagtctattgaacaaatcagttcccttgatgcatgattatttttttcttcctcatatataatcatgtgtattttttctgtatagaaaaagtataaacaaagagaaaaaactgcactaaatcccactaccaaagataactaccatttgtatttgaagacattccctacgtatatgcatataagatttatatatgtagttttacatgcatatgaaatcataccataaatgctttcttgtaatcgtgttttttgctgtttatgttttccatgactgccaatttcactgcctgttcagaggtctgacttccataaaaatcccatttacttaccattcccgggggccagcagtacatgggccacatatgcagatgattaactggtagtttgtttgttgtttttatggcaaatcacatagcacaggcttacagagggtcctcccttgagagcacaagcccagaacctgttatctaagccctccacagtcttgaaaaagagacacaattttgtgagggatatgttcatgtgaattggtacttactaggctttatttcatctcataccaattttgttccagaaacttcctagaaagctatgaaaacatgagacaatgaccatggatatggtatctgggagaagtactgattacgtaatgcagtctttattttttattttttatttttttttgaggcagagtgtcactcttgtcacccaggctggagtgcagtggtgcaatcttggctcactgcaagctccacctctcaggttcaagcaattctcctgcctcagtctcctgagtagctgggattacaggcgtgcgccaccacgcccaggtaatttttgtattttttgtagagacggggtttcaccgcgttggttaggctggtctcaaattcctgagctcaagtgatccacccacctcagcctcccaaagtgctgggaattataggcatgagccaccacacctggcccatgcaatgcaatcttagcagctgagttcaacatttattgagcagctactatcagccagacacagggttaagcacacaaagcataggaagaccaagaaaatgtaccccagccaggggaagcttcaatttaccaaacataatatgaagtagacattcatctatgattctaccactcagaaatactattattaacatcgatccagatataagaattataatacccagcacttacagagtttttcttctttctttcttttttttttaatagagacagcctctcactaggttgtccaggttggtctcaaagtcctgggctcaaataatcctcccacctcggcctctcaaagtgctgggattacaagagtgagccaccacacccagcctgcagctcttattttatagagactttaagagtttaaatagtcacttatgaaatcctcaaaatattattgcaatgtacaatttgtatttctattgcacagatgaagaaactgaggcaaagaaagattatttaacctgccttaaattgcatagttgcaatgtggtagggcctcgattcaaaaccaatgtctctccatagatgagacagagagagagagagagagagagaagaggagagagatgacattgctttggaaaccagactttgaaacaaatagcatacaacactatgtgtcaatcactatcctgagtattttaaatattatgatttattttatccataaagttagcaggtactgcttatttcatccagacaacttagtgaccacaagtgactttaagaactttaacaagagctagactgccacgacaaccggggttgccctgcatttcatcagagcttctctacattagggggttctgcctcacctgaaaatcaagatccctgaaatgaaacttttcaagtctgctttcccagccttgaatgtcatggtcacacctgaagtcgtttatctctggacccatctcctggaaggtttaggcatgattgataaatgcctatgcacaggtgagcaacagccccagattgttagctgtataattgcatccatacacctgaaaaacgtgagcaatttcgctccgagctctgaggtggtttcgtatgagcagattttcaagtgatgcctgggaaactttgagaacacaattgtcagccccgggagaactgagcaccacccaaagggaggtagtcccgggaaggggcgctgtgcagacctccaggacccagcggtatcagctgccttgagcgggtgaagctccatggtgagtgtgccagagcacagctttaatttcctctcatccgtccctttctcttgggcaaaatgaaccataaagtttatattcactttagtgtatacattttaaatataccctataaaccacaggagtaatgaattcaagatgcccacatcatagtaattctgcatgcaagctgtgttttatgatttgtatccagcctttttaggatttttcaataggaccagactccagactgcagggaaatgaaaagaaggataatgatgtgaagtttcacgtcaccgctaagtttccagcactgttgtcctgtagtcaccaagcgggtgcattttttgtgtgcggtgaagtgagtggattgtcccaggctgagagatgcccaggtaggagggacacttggccttcctgtgctccttccattggctctaggtgtcccctgtgggttgcgattggtcatgtgagcaagcgagcacgtgggcttgtgtacatttctgcatttctgggatagccctgccttgcaggtgccagagaaacacgtgcttcagaagggtcagattggtcatgcatctgtgctcagattgaaggagtggcctccctgaagaattccagcttgcagaggcactttcaaaatgcagtgagctcaggttccaggagctgttacggcagtttttgtctcgacactccgttcccctgaattccactttgggaagaagggaagaagccaccatgggccaggcaggcgacagagcaagccctagccagatcgcaagccatcagagccctgttccttctctccaaagtgggcttcatttacccctcttcaagcagcaggacagtctgttcaatgcaggggaggctttaagacatgggggcagggaggggtcatatttttggcctcgctcctgctctgcgggctttctcatgaatgcagaccagtgtgcacgaatgtggccaggacacatgcttttcgctcagaatgctcacttgaaatgtaaggatctcttgttccctgtaactttagatgaggtttcaaaacacagaatccatgctggaaccgccaggccagcagcgggaggtgggctgtcttcagagcagatggaacaaaggattgggttcccaagttcttatggtaagacaaaagggcaagatgtcaacccaggaccacccaaggaaaattaaatacagatcgacttttgatggtttatgttaacagaggggagatggggttttgatcttgagaaaaacaaacatcacaaactctaccgtaatcactgtttctcacaccctacaatagagtagcaagaactgctaggtagccacaaacacacaagtggggtgggagcttctgtttcttctgctgtttagtgtgccttccatgggctagcgagcgcggggcaacatcaagaaaaggcaccccaggtttcccagccagccactgatataagagaaaaaaatgggtcctccagcagtcaactcccctttctcaactccagatctgggatcagaggccctcctggctcagtcctggatcaggggcagcccacccaccgacacctctctctcagccacagcagcgtccatcacatcggagctcctacgcagcctgggattacaggtggaatgaacatcgctaactctattctcaacccaaatctttttctagctttttaaaaaaatgcattatgaggctggcacagtggcccacgcctgtgatcccagcactttgggaggccgaggcggatggatcacctgaggtcaggaccagcctggctaatatggtgaaaccccatctctactaaaaatacaacaaaattagctgggctcaggggtgggcgcctgtaatctcagctactcagggggctgagacaggagaatcacttgaacctgggagacggaggttgcagtgagccgagatcaagccattacactccagcctgggtgacagagcaagactctgtctcaaaaaaaaagaaatgcgctaatgaaaaatttcaagcatcctcagaagcagaggacattctacaatgaacccgagattcagcagttaccaagatttgccacacttcttcatctatcccaattttcccctttctttacagcaaattccagatatcatgtcattttagcccctcatccttcgggacgcatctctaaaaatatagacattttcttaatttcaatgtcattgtcactcctaaaaaattaacagtaattccttgatattatctagatcacagtccatatcagatttcctgtatttcataaaattgtctcgattagttggttaagtttccttagtagccaagaaagatctgcacatttcatgtagttgtgatgcctccaggttcatctttcctgccccactccttgaatcagccatttctctaagagtccttggttccttttattggaaaatggtgttagaaactgagccactgtgtctggctctttcatttttataatcccagcactttgggaggctgaggcagacggatcacctgaggtcaggggttcgagaccagcctggccaaaatggcaaaacctcgtctctagtaaaaacacaaaaaattagacagacatggtggtaggcgcctgtacttggaagcctgagatgggagaattgcttgaacctgggaggcagaggttgcattgagccgagatcgtgccattgctctccaacctgggcaacagagagaaactctgtcttaagaaaaaaagaaaagaaaagaaaagaaagaaactaagatctagtcctgttgctattgctcagttattggggtgcttgttgctattggggtgttattgcctctaagcctttcagctgagagagcaaggaaatatatgtccatgtactatatttgcctatgtatatccatatatctaaaaatagttctgtatgtacatctatatcagtattaagctaaacatgagttatactgatgtctccaatgctaatccagtgccatctggatcattctaacaccctcccttgcttacctgtaatctcccactccaacagtgagaaaactggcttccaacaaccgtatttacccttgacttttttttttttttttaagatggggtatcgctctgtctcccaggctagagtgcagtggtgtgatatagctcactatagcctccaacttctgggctgaagtgatcctcccagctcagcctcccaagtagctgagactactactacacaccatcaagcccagcaaatttttattttttgtagagatgaagtgtttctttgttgcccaggctgcttgatgtctttctaacctacatccgccctccaaaaaaaatcactacaaaatccattgtaagttatttaaaacaaaaaaggaatttattgagtttctttttttttttttttttgcagtggagtctcacttcgttgcctaggctggagtgcagtggcgtgatcttggctcactgcaatctccacctcctgagttcaagggattctcctgcctcagactcctgaatagctgggaatacaggtgcccaccaccacacccagctaattttttttttggaatttttagcagacatgggtttcaccatgttggtcaggctggtctcgatcttctgacctcaggtgattcacccacctcggcctcccaaagtgctgggattacaggcgtgagccaccacctgtatattttaaaatatactaccaagatttccgtgggagtccaagaatcaggtgtggggctttgcagctagcaccactccggaccaattatgcacaaatgtggcaggccacgtgtttttcattcagaatgcttagatgaaatgccgtgccaggcccgggcactgccagtgtgtgccagaatctccaccgccactgccccaaagccaggcacccacaccaccctctcacaagagctgtttccttgcattaccctctttctaaatgaagtctcggctgggctcgtctcattgacagagcctgtgtcaatgacaaagccctaaccccaagggaaagtgagtttcctgtttcctccaagggaagtcaagattcacagtgcatgaaattccccaaagagaggaaaactgtccaaaagatgttgggtggctattttaaaaattgtacagccagagggctgggtgcggtggcttatgcctataatcccagcactttgggaggccgaggtgggcagatcacctgaggtcaggagttcgagaccagcctggccaacatggtgaaaccctgtctctactaaaaatacaaaaattagctgggcatggtggtgcatgcctgtaatcccagctacttgggaggctgaggcaggggaattgcttgaacccgggtggtggaggttgcagtgagccgagattgtgccactgtactccagcctgggtgacagagcgagactctgtctcaaaaataagtaaataaataagtaataaaaataaaaattacagagtaggattttgtgtcaaccaaaatcattcctaagaatctgcacgggaatcaccaagcccagagggtactcttcaggctttatcctcttggcctcattgtgctatctatgggtgggctcagggttcctacaggaaacttgttggaagtctcacccctgactacagctacaattctctcgcctttcctcttactttgcaggtcattgtttctcagcctctcatggacccttcttcttacacaccttttatatatattttttcaattatttattaattgaataggtaatacacacatggtacaaaacaaaaggtaaaaaggggtgtataggccgggcatggtggctcacacctgtaatcccagcactttgggaggttgaggcgggcggctcaagaggtcaggagatcgagatcaacctgaccgacatagtgaaaccttgtctctactaaaaatacaaaaaattagctgggcgtggtagcgggcgtctgtagtcccagctactcaggaggctgaggcaggagaatggcgtgaacccaggaggtggagcttgcagtgagccaagatcgcgtcactgcaatccagcctgggtgacagagcaagactctgtctcaaaaaaaaaacaaacaaaagggtttatagtaaaagttaagactctcttccttaccatccatgttatttctctccccaaagactgttactttcctatattttcttccagagatattttatgcatatataatcaaaaatattcggctgggtgcggtggctcatgtctgtaatcccagcactttgggaggccaaggcaggcagatcacgaggtcaggagattgagaccatcctggccaacatggtgaaaccccgtctctactaaaaatacaaaaattagctgggcctggtggcatgtgcctgtaatcccagctactcgggaggctgaggcaggagagtcacttgaaccagggagtcggaggttgcagtgagccgagattgtaccactgcactccagcctggcaacagagcaagactccatgtcaaaaaaaaaaaaaaaaattcataatttttccatccagcttccagaatgaaggtatatcatgctttacaccttcagtctgtattttgcttcttttatttaattatatatcctggagatgttttaatagcaaagcatgtagaacagcttagtttttgtaaagactgccttgtagtccattgtattattaattagttatgaattaaactagtcctatattaatggatgattgtttcaaatcttttacttattacaaacaaagctgcaatgaagaaacttgtatatccacaatcttgtacatgtgccagcacatctgcaggaaaattcctagaaataacatttctggggcaaggggtatgcacattgcaaattttgatgaataccatcaattactttccataaatgtactaatgtgtattcccactaacaaaacatgtgatagtgtctcttccccaacctcttgccaacacagtcgttaccagctttttacctttgccaatctaataggtaacccatgtgacctcattttagttttgtgcctttgtatatcttgtgttataaatcaggtaaagcgtcatgttaggccaggcatggtggcttaacgcctgtaatcccagcacttttggaggccgaggtgggtggatcacttgaggtcaggagtttgagaccagcctgaccgacgtggtgaaaccccgtctctactaaaaatacaaaaattggcggggtgtggtggcgggcgcctgtaatcccagctacttgggaggctgaggcaggagaatcacttgaacccaggaggcggaggttgcattgagcccagatcacaccactgctctccagcctgggcaacagagcaagtcttcgtctcaaaaataaataaataaataaataaataaaaagcatcattttacctgacttcagccacagaagaggagatacactggttttcctcttctgtggtttgtctctttgtatcctttgccaccttttcactgggaagttagtaatttatattgatttataagaattctttataaattaaggagattgtgctaggtgaagatctggaaaaagggccttccggggaggggagacagccagcacaaacccaggaccaagcaaaatgtgttctgggagcaggaaagactcatgatgtagcacaccgagagaagccaaatgacgtcccagggtggaggccacgtcacactgtgcctgatcacaccgtgctgtttttctaactgcaatgggaagctgttagagaattttaagcagaatccgctcaggaggatttggatctggccacctgccagatggtaacatttattaagatggggaagatgaagaagaggatgattatgacgggaaagcctagggagggataaaaagttctactttcaatgttttaacctggagatgcctgtcaatctgccttggagaagtccagcagactggtggatttctgagtttcgcattcaagagaatggtcagtgctacagataaaatttggagtcatcagcatctgaatggcattgacagccttgaggcaggatgaaatcaccaagggtgaaagtactgagacaagggacttcaaccagaggaggaaccagcaaaagaggcaatgagataggagtaaagccgggagagagtggtgcccacggagccaagaaaaggtcatgcgtctagaggaaggggtcagccactgaatgccatagtgaaaccaagtcgatgaggattgaccactggtttaggcaaatggggatcagtggtaaccttgacgatggtaatttcagttctctggtggagatggaagccaaagggcagtgagttgaggatggagttgagtagaaacagcacagataattctcaagaactcttgctgtgcagaagagcaagggcaaaggattggggcagttgctacaggggaatatgggttcagggctttttggtttttgtttggttggtttctttttgtcttttttttttttttttttttttttttgagacaaagtctcactctgttacccaggccggaatgcaatggcgcaatctcggcttactgcaacctttgctgcccgggttcaagcaattctcctgtctcagccgcccgagtagctgggattacaggcacctgcctccatgcctggctaatttttgtacttttagtagaaactgggtttcgccatgttggccaggatggtcttgaactcctaacctcaggtgatctacctgcctcagcctgttggttggcccaaagtgctgggattacaggcgtgagccaccacacccggccggttggttgtttttaattatgggatactcatgggtctatcgatcagaatgacccagtggagagggaaaaattgatgacaccagatacaggaaggaaattgctggaatgaagtcctgtaataacttgcaacctctttcagggatgttaagcgcagcctcctctgaagtaagaagtgagtgagtagggtgtggagtggcccggagtcctaatggcacactgaaagctgaatgtgatgaatgtggagtggttagggaaggtgggaggagaagcagcaagataaaaggaagaggaactaggatgtattgggcagtaaccctgtgccaggcagacataggaactttgaagtaccttttgaggaacgttttgaatatttatatcctttgttttggtttttcattgtggtaaactatacaaaatctaaaatttcagagtgggagacaatcttcacaatctatacatctgacacaggacttatatccagaatctgcaacgaactcaaacaaattagcaagaaaaaaatgaacaatcccatcgaaaagcgggctaaggatatgaatagacaattctcaaaagaagatacacaaatgaccaacaagcatgtggaaaaatgctcaacatcattaatgatcagggaaatgcaaatcaaaaccacaatgcgatatcaccttactcctgcaagaacggccataatcaaaaaatcaaaaaataatagatgttggcatggatgcagtgaaaagggaacacttctacactgctgttgggaatgtaaactagcacaaccactctggaaaacagtgtagagattccttgaagaactagaagtagaactaccatttgattcagcaatcccactactgggtatctacccagaggaaaataagtcattacacgaaaaagatactttcacacacatgcttatagcagcacaattcacaattgcacaaatgtggaaccaacccaaatcccagttaatcaatgagtggataaagaaactgtggtatatacatatgatggaatactactcagccataaaagggaatgaattaatggcattcacagcaacctggatgggattggagactattactctaagtgaagtcactcaggaatgggaaaccaaacatcgtatgttctcactcataagagggagctaagctatgaggatgcaaaggcataagaatgacacagtagactttggggactcagggggaaagggtaggacgggggtgagggataaaagactacaaattgggttcagtgtatactgctcaggtgatggacgcaccataatctcacaaatcaccactgaagaacttactcatataaccaaatagacctgttccccaaaaacctgtggaaataaaaagttaaagaaaaaaacaaaataaagtgaagaagtataaaataaaataaaaaaacacaaaaactctaaaatttaccatttttaggtacacaactcagtggcggtaaatacggccacagtgttgtacgaccatcaccactatccacctccagaactttatcatcccaaactgaaaccgtatccattaaacaatattcccctttcccctcctcctagcccctactaagctctattctactttctgccactatgaatttgcctattataggtacctcatgtaagtgaaatcatacaatattttgtgcctggcttatttcacttagcataatattttcaaggttcatccatgttgcggcttgtatcagaatttcattcccttttattatggctgaataatatcccactatctgtatagaccacacttcgtttatgcattcctctgctgatgaacacttgggtgtttccacctttggctattgtgaatgatactgctacgaacatggctgtttgagtacctgtttgagtccttgttttcaattatttggggcatgtatctaaaagtggcaccctttatttttttggttaatgctcacagcagccctcagacagatgttcttcaggctggggccccttctttattccttcagtgggaggccgtatgctcccaggtcccaacacaattcctcagactgaattccccttctttattccttcagtgggagcttccaacacaattcctcaaactggatattgtccattggttttgttctcaaacagattgaggttcctcaccagcctctggtcctcagcctcttagtcctacagctcctgtgtttgcggaagagaatcccatcacaggctctcgtggggaaggtaggccacacctcttggtcccatggctgtctgcggtgagaaaagggtgggcgtgaggaggctgccttattgatataaggtgcttggttatagacgcctcatgtatatgtctgtaggtagacttctgcctcattttttggatccttttgagttgcaaaagagctttctctcctgaagtcacgctgcttctgggaagagctaaaacctgacttttccaggcaaaaaacagtcacctgaaagcaagtcatgataacgtcatcacttgaatattttggccgtgctaaaacataacactttaaacactagaagataagttatcatgatagtagattgagctaggaaagttatttatagaaaacaagtaaaacaatagaattgcaacaatttttaacgctaagatttcctgtaaaccgctatagtcacaggatagtctctcccttaagatacaaaattatcttgtgatccaaaaatagctggtgtcagcattgtttcagcaaagtttcccttaaaatataattttgctttccttttatgatgttatgatctgcacgattctatagaacttccttgtctttacaaagacattcctggaataaaaaccaatttcgtggcccgtggggggaaaaaaggtaagttctgagtgaatatttctggctcctttctggattgcaagaagccagtgagttgagtaccccaaaataaatcccgttggtgggtggggcaagggtcagaattggggacttgaattacagaatgacaggatatccaggatcatagctttttttttttttttagacagagtctcactctgcaacctctgcctcctgggttcgagcaaaccgggatcatagctcttgcactgccatgcgtagataattgcagcacacttgtctgtgatgtatgtacaagtcattattttttggatggtggggtgcatttttcttattttctctatctttcctctttctttctttttctttctttcttctgtcttttctttctctctttttctttcactctcttttccttctcccttccttcttttcttttcttttctttctctccctatgctgcccaggctagtcttgagctcctgggctcaagtgatcctccctcctcagcctccgcctcccaagtatctgggattacaggcacaaacgaccgctcctggttgtctttctttctttctttctctctctctttccttctttccccctttctctctctttccttctttccccctttctctctccctctctctttctttccttccctctttctctctttccttctttccctctttctctttctttccttctttccctttctctctctctctttcccttcccctcccttcccctcccttcccctcccttcccctcccttcctcccttcctctctctttttctctctttctctctttctttccttctttccttctttccttctttctttctttctttctttctgatggggtctccctatgctgcccaggctagtcttcagctcctgggctcaagtgatcctccctcctcagcctccgcctcccaagtatctgggattacagacacaaacgaccatgcctggttgtctgtctttctttctttctttctttctttctttctttctttctttctttctttctctctttctttctttctctctttctctccttccttccttcctcccttccctccctccctccctccccctccttcgttccttccttccttcctttctttctttctctttctttttttttttttttcaagatggagtcttgctctgtcgcccaggctggagtgcagtggcgcgatctcggctcattgtaacctctgcctcccaggttcaagcgattctcctgtctcagcctcccgagtagcttttcaatttggtcttatcaactttaaactgatctcagatgtgtcttacttccctaatacagttttcatatctgttccttagtcattaatacctaagatatttttccagctgggtgcggtggctcacgcctgtaatcccagcactttgggaggttgaggtgggtggatcacctgaggtcaggagtttgagaccagcctggccaacaaggtgaaaccccgcctctactaaaaatacaaaaattagctgggcatggtggtgggcgcctgtagtcccagctactcaggaggctgaggcaggagaatcacttgaacccaggaagcagaggttgccagtcttggagccaggattgtgccactgcattctagcctaggcaacagagcgagattctgtctcaaaaaaaaaaaaaaaaaaaaaaaaaaagatatttttcctagagctttttgtttgttttgtgctttttggcttggtttttggtgactcttgtttgactctgtctagatctttttccacttcagagttttgttgttgttttacgatttcccagttctctttctggagtacattattgcagctatttgctttttttttttttttccccattccttttagacacgtgtcttcattttagctttcagattatattttcttgaatttacttgaaaaaatacttcttcaatatatagttaaataaagaataaatcagtgtttggatgactactgacctatttccatttttaattttcaatcctctagagaatcagtgataaagattgtatttgtagggatagcattcggagatatacctaatgctaaatgacgagttaatgggtgcagcacaccagcatggcacatgtatacatacgtaactaacctgcgcattgtgcacatgtaccctaaaacttaaagtataataataaaaaaaaaaagattgtatttgtgaaattccttatggcacacacttgtttggatccttttatgtgaaaagatcctttttctattccatttatatttcttatatggtataaatcaaaattatgaaagcttttaaaaatgatgtttatttaatagttaattctggcccagtgcagtggctcacacctgtaatcccagcactttgggaggccaaggtgggaggatcatttgaggccaggagttccagactagcttgggcaacacagcaagacactgtttctatttttaaaaaattgttaactctaaaaatatgttctttcctatttaagtcaggaataagaaaagaatagtccctgtcacattactcctgaatatccttctggaatcttggccaataaaatcagactaggaaaacaaagacacacaagtattaggaaggaaggaacaaaaaagcaatttaaagatggtatgtttgactacctagaaaatccaagagaagcattctattttaaaaagacatgcttaaggggaaaacatcaaaaacacagaacatcagtaagaaaataatgcgaatcatccataatccctctagccagaggaaaccactgttaaaaatgaacaatttggagccagtcacggtagcatgcacttgtaattctagctactcaggaggctgagacaggaggatctcttgaggccaggagttcaagaccagcctgggcaacatagtgagacccccccccagcccccatctcttaaaaatttttaaagtaaaaaaaatgacaatttggtctatatctttccttatgtttttgcacatatgtgtgtatgtttatgtgtttgtacacataatatatttattccaaacatcttacatctaattatatggccattgactgttatgtaaagtgatcctacagagggaattcctgtattactgtggcagaagtttagtccctgctgtgagaatggtgatagagcatttcacctgggtcagaggacagagactcaagcctgaccataaaaagttccaaaacacaaaaatgttttaaaactaatttggtaacaaaccttaacctaaaatgatataaggctattcagcctttattcaccccaattaggattaacattcatatcatatgaaaatatgttattgcattacattacagggatcttccagaggacccctgggttttggtttttgttttttttttgagatgaagtttcattcactcttgtcacccaggctggagtgcaatggcgccatctcagctcactgcaacctccgccttccaggttcaagcaattctcctgcctcagcctcccaagtagctgggattacaggcatgtgccaccacacctacctaatttttgtatttttagtagagatggggtttcaccatgttggccaggatggtctcaaactcctgacctcagctgatccacccaccttggtctcccaaagtgctgggattacaggcgtgagccaccgctcccggccactcctggtggttttatgctctgtgttacctttcaaaaatccaaaatattatgaattctgaaacagtccccaaggctttgggcaagagattatgtatctgtaatatactgagcagcagccagggatgccaaaaatatagaaatatgtgtgctacagcacaggaactcacaaccaaagttgaaatggcaagatatgtgcacaggaaaagctttaaacctttcaaatacaccattaagccaatatgcatatagtcctagtctatattgacgtgaatggctctacagcactgcctatgaatgtttacttaatatgcgagtgccccaaatcatacagaatcacgtttgatggatagcgtcctgacctaaaatacagaagagatgtgtctgaccagaggggaggaaaagattcttttttttttttttttttttgagacagatggagtctcgccctctggcccaggctggagtgcagtggtgcaatctcagctcagcgcaacctctgcctcccgggttcaagcgattttcctccctcagcctcccgagtagctgggattacaggtgggtgccaccacacccggctaatttttgtagttttagtagagatggggttttgccatgttggccaggatgatcaggaggaaaatattctttatcatccctgtgtatttgagtcttctagtggcaagcatcagaaacctgacttcaaatgaatgaagcaaaaaaggaaactcttggctcctgcttggatgaagcccctgtgttgatcaccaccaccccctcagtcccactttcttctctgttgtttctttctctgtcaggcactttccacatcgtgggaaagatggccactgccggtgctcagtctccagtccctgcagactgcaatcccaggagggaaaaaaaagaaaagtctcttgccctgtatccatctcagtctctcagaatgacccagcctggccttgccggtgtcttggcccctagctggtctgatgactgtaccttgaggggatgggggacgctgacccacacgagtcacatcttggtgggagggaatgcaggactttgtaattgacagccatgctctagtcacatggaaaggagatgggcgatttcaaatccaaagggtgctgggacaattaaaaaaaaaaaaaaaaagagggccctctttgcagaagtggtcacagggtgagagcagaggatgacgacagtcgaaaggaccccagttgctctttggtcacagtgctgacgttcctgcatatgcaataggcacggcattcacaggagagcagtggcataagaaagctttggaagtgccttgtgctaaattagatgagtcttaagaagatgcttaaaggaaagacgggaagtgcgttggtgggaggaatggaagagagtatcataggtaggagtgcagcatttatctgcttaaatgattttgctcctggctgagtctaaataagaatattcttgtgagtagtttttttttccttctatacatgagaaatttctgactcctttctgcattgagacaaacttgtgaggacaggctcatgtttgatggatggagccctgacctaaaatacagaagagatgtgcttgacaagggaaaaaaagagatcagttataatccctatgcattagatttttccagttgcaagcactggcaacctgacttaatatgaatttaacaaaatttatgctgggcgcagtggctcatgcctataatcccagcactttgggaggctgaggctggtggatcacctgaggtcaggagttcgagaccaacctgaccagcatggtgaaactccatctctatggaaaatacaaaaattagcccggtgtggtagtgcaggcctgtaatccctgctacccaggagactgatgcagaattatcactggaacccaggaggcagaggctgaagtgaaccaagatcatgccactgcactccagcctgggtgacagagcgagacacttttgcaaataataataataataataataataaatctgttggctcttttggagaaatgttaaggagcagcagacaacaattttatgactggggctggttctattataattctgatattatatatcagagtctcctacattcaagctgcaataactttctaaacagcttgctgaaagtcacccagggaattatttgttgatgttccagaagagggagatacaaaggcaaagggattgttcccggaatttttctgagtaattaagttacagttgctatttgcaagtcactgcaaaggaaatcttccagtagatgctacttattcagccatgtgtgcaaaactagatatttcttacattaacattgtaattatatttggcatcattttttgttttgctttagatggacaaagattaagtcttaagtgtacaagtcagagaaggagaagacacatttctgatgcctttgagtaattctgatctgctaaattagacacacagcctggcatagaccaaccccagtccattatcacagactgaagaccaaagaaaggaataaatgaaacctgtaatgtgctgagcattttacataaatcatctttggaattctcacaatgcaaggaagataccattatccctatcttagcagataaagaaagcaaatctcagagagcttttactcacttttccaggaccagtcagctcttaagatgtaaagccaggattctagaactgaatcatctgatttcaaagcctgagcaagggggaagtggtgcacgcctgtagtcccagctactaaagaggctgaggtgggaggatcccttaatcctaggagtttgagtccagcctgggcaacatagcaagaaccaatctcaagaaaaaaattagcaatgcaagaccatgagcccagcttcatactggtggtatttttgggggataattaagctgtgtaacatgtagcttttgatttccttttacaacttctctccttaacacctatagatttattatcatcaaaatacaatgtagtctgggcacagcggctcacgcctataatcccagcactctgggaggccgaggcaggtggatcacctgaggtcaagagttcgagaccagcctggccaacatggtgaaaccctgtctctacctgaaaatacaaaaattagtcaggcatggtggcaggcgcctgtaatcccagctactcggtaggctgaggcatgagaatcacttgaaccagggaggtggagattgcagtgagccaagatcatgccattgcactccagcctgggcgacagagcaagactcagtcccaaagaaaaggaaaaacatacaatgtaaaaagcacaatccaaggagctgaaaacgcaagagagaactgcctaccacctttgcttgccaggaattcacagactattgggagagagaacacaaatatgaaacaataaacaacctatgggtggaattgggctgagcaaccaggaccagaagcttctagtgatgccccaatgcccatttcccttcttcagtaagacaaccctcctgcctccttccactagataagactgtagccatgtggaacagagactgtacttatggaatcctttatggcagtttcatgtaagtaaattctgtctagtgggatgaaagcagaaaggacaagtgcagtttctgacagggagtcttaaaggaaaaggacaatccattcctcttccctgcctgttagagccttggcagccatcttgaatcaggaggtgagtttggaagtggaagtcgctcgtggcagaactacccatgggagaatcccggggatctgactctgaggggtgcagctcctaccctggactgcccacctccattcttttatgtgaaagagaagtaaacttcaatctaacttaagccattgttattttgggtttttgtcattgtaagcaagtttaatcctaactattaaaaaggtacagttctataagcactcgccacctcccccaaatcctaccaggtgaccttcattcagcaagtgacttaaccttccccagggtggctgtgagaacccagtgagatcaacccatgagagaccaggaaaaagctcgcggggttttgagttggcctgtgtgatgcagtgtgactggaggaaacaaaggaagaaaactaatacccaggactcatcaattcacaatttcctgaagtgcttcacggtcagcatgtgcagaataatttctaaaactgtgtagccttagtcccagggaggctgagctgggaggatcacctgagcccaggaggtcgaggctgcagtgagccgtgatcatgccactgcactccagcctggatgacagggtgagaccctgtctcaaaaatttatttatttatttgtttgtttatttatttatttaattaaataaaaccatgtagcacagacattaagttctttgtagattcagagctgataaaatttgtgtgctgcagtaaatgattaaaggtttgatgagggagatgaagtatgagtggggtgttaagaaatgaatccgatttggtatgcaagtcatgactcctaactacaagttatggaaaatcaaccctgtttggaaaaacaaaaaaaaagtgggtggggaggaggttggtggttgaatcatgtaattaaaaaggcaagaagtaagctcagggaaggctggatggagaccaaatgatgtcattaggatgcggtctcagctctgctttcctgagttcattgcattttcataaggcaaggagtggtgtctggcagctgtggatgtacatcctatcagctcagcaacccaggtggaaaataccttcttccttagggctgcagagaaaccctcaacctacctgactccctgtgcctctgattctgcagacctgggtcatgttcccacccctggagtggataggggcagaagaatgtagcctcagccccatccaaactgcaagaattaagagttccaaaagggtggttttccaaaaggaaaagtgaggtgctattggcaggagaaggggagttgatgctgggaggaatgttattcgagtgttatggcagagaagagaaaaagcaaagaaagaaagtctagaatgagtggaataacatgagctgaatggaagagaaaactcaagtaggcaagacaagtgctggcaagggaccaccttcctttgtattatttctctctctctctctcgttttttttttttttttgagccggagtctcactctgtcacccaagctggagtgaagtggcgcaatatcggctcactttaacctctgcctcccgggttcaagtgattctcctgcctcaacctcccgagtagctaggattaccacatggtgggagtagccaccatgcccggctaatttttgtattttttgtagagacgtggtttaatcatgttgaccaggctggtcttgaactcctgacctcaggtgatccacccgcctcggcctcccagagtgctgagatgacaggcatgagccccgccaggggatccccttcttctttgctgcactagtttgcttggactctcataacaaaataagcggcatcaacaacggaaatttatcgtggagactggaattctggagttccaagtttcctctgaggccgctctccttggcttgcagatggcctccctcttgctgccctgctctgctcatgtgtccccggtatcacttcctcttttttataaggacaccagtcacattggattagggcccacccataggaccgtatttaatcttgattacctctacaaaggccctatctctaactatagtaacagtctgaggtactggggattaggacttcaacatgtgaattaggtggggggacccagttcagcccatgtcactcactgttgtccaaagggcagtaatgaaatgcatggattggggatttcttatacatttataaaaaatgcagtagttacagctggatggtgtgagcagccagttctcagcaaatcttccttatgatccttgtcaaaagacaaaattacaacaaatttagtttaaagatctctagtggctttatttgcgattcgagaatcgtgcaacacttcattccataaaatagaatgagtgttctgatgagctgagcagagaagggtggatttataggcagaaaaagtgctgaagaaagcagaaacaaagaacaaaaagcagattggtcatttcaaagttatttcccttgtaaggtggggacagaacaatagaaaaattactgactgggtatgatcagtttacttcagattaagggttaaaagaggggcattcattatcatgccgatcgaagacagaaactggcctggttgggagggagattgccagttatctctctctcctgatttctcagaagatcagcttgacagttttagtttggtgcctgggaacctcagcattagtgacatcattttgatctttagtctggtctggtgggggcttttgcaggagctcagtccaaaacaatggactccgataattttttttttttttttttgagacggagtcttgctctctcgcccaggctggagtgcaatggcaggatctggactcactgtaacctccgcctcctgggttcaagtgattctcctgcctcagcttcccaagtagctgggattacaggcacctgccaccacacacagctaatttctatatttttagtagagacgggctggtctcatgttggccaggctcgtctcaaactcccgacctcaggtgatccacctgcctcggcctcccaaagtgctgggattacaggagtgagccaccgcgcccggcctgctaatttttatataacactctaaatcagtgaaacctgccatcatgaaaattaaatccgtcttctagagaaactaggcttccagaaagctcagcccactggaatggcagtgcatagccaaaaccaagcaaataaacaaaaggaagaattgcaaccaaggaacccacaaatcaaaggtgcagttacacaaaggctctgcaacttgtcagttatctatgggaaggccagtgacactccaagtagccagccttattgggcaaagctaagacatgtagggtcaggatggatggaaggcacattgcctaatgcagtgttctgttctgttcatagcagacacacaggaagcagtggctagatgaatttatcaaaaatgagcagaaggaagaagaaagaatctctgtggtattggtgagttgtttgttctgacaatagacatagagcaaaaaactcctgacttccagggcagggagatgagagtggagaggcaaaggccacttgagctttgattcagaagcacttgaagccttaagtatgagataagttacctccagaatgtgtgtgtggaagggaggggaggtaagaggaggggcaagcaacgtgttacgttcctggatcacctaaccaaaaatagagacactccccacccccagcactagagacacccccatccccagcactagagacatcccccacccccagcactagagacaccccccacccccagcactttgggaggccaagacgggaggattgtttgaacctaggagttcaagaccagcctgggcaagatggtgagatcctgtctctacaaaaaaaaaaattttttattagccagggagggtggcacgtgactgtagtcccaactacttgggatgctaaagaggactgcttgagcctcggaattcaaggcaacatcgagctatgatgatgccactgccctccagcttcggcagcaaagtgagaccctgtctctaagaaaaaagagagattccctctagcccccaccagcctcatcctatgtcatctaccatctgtccactctatttcctagcacttatcaatatatgaaatcatcttatataattgtttaattactttaatattccatccccaccacctccagattataagtgctatgaaggggccttcaggtggttcctcaccatgtcttagtagccagaacaggacctacctagcatatactcggtgcccagaaacattgtttaatgaataaaagagaaagagcaaaggatatcagagatttctgtaataaaataaaggtaaccatgtgttgggaacaggccccccaaaatctggccataaactggccccaaaactggccataaccaaaatatctgcggcactgtgacatgttcatgatggccatgacgcctatgctggaaggttgtgggtttactggaatgagggcaaggaatacctggcccacccagggtggaaaactgcttaaaggcgttcttaaaccccaaacaatagcatgagtgatctgtgtcttaaggacgtgctcctgctgcagataactagccagagcccatccctttatttcggcccatccctttatttcccataaggaattcttttagttaatctataatctatagaaacaatgcttatcactggcttgctgtcaataaatacatgggtaaatctctgttcgaggctctcagctctgaaggctgtgagacccctgattttccactccacacctttatacttctgtgtgtgtgtctttaattcctctagcaccactgggttagggtctccctgaccgagcttgtctcggcaaccatgtccaagtaattaatcattctgtggggagcttggggatcctgaatgcttcattccctgaaattgatgcatagtcagtgtatacattttggttagaaaatctgtgatgacatcatgaaaaatcagcattgttttcctgttccttttgcaatattaatagtaaaaacatgatctcctaggagcgttattgaacttttatgtacgtatgtatgtatctagagatggggttcttgctatgttgcccaggctggcctcgagctcctaggctcaagggattctgctgcctcagcctcccaagtagctgggactacaggcacacaccactgcccctggcctaaacttttagtgaatttatctattaaccatgtcttcttttctgtaatctgatgctttgacatctggggccttgctgaccctggaagggtcaattcctagagatactaaacaactcagtggtaagcatatttctcaaatgtaaaccaaaaactccagagcccaaacctaaccacctcctttatggagccctcatactctaggccaccacccacctgcccttaccaccccagggctgggtaccagacagctagggacagcccatgtgctccatagctcacagagtttactcaaactgggctgggtgcggtggctcacgcctgtaatcccagcactttgggagaccaaggcgggcggatcacgaggtcaggagatcgagaccatcctggctaacaacatgaaaccctatctctactaaaagtacaaaaaattagccgggcgtggtggcgggtgactgtagtcccagctactcgggaggctgaggcaggagaatggcgtgaacctgggaggcagagcttgcagtgagctgagatcacgccactgtactccagcctggccaacagagccagactccgtctcaaaaaaaaaaaaaaaaaagaatttacttaaactggccaatcctaaattgcctgctctgcctcatctgtttcttcctttggaaaccacaataaaggctcttgctacccacagtttctatcatcactcccccactcccccagccccctacctctagccttctgaccaaccctggcatttccctgtgtggcccccaatggcacgatgtgcccctttctcttgggaactgtgagtatcaaactgtcttttcaatggcagtcatctcctgatctgttggccttagtatacctaagattttctattactacattatattttaataacaatataccaattaaggccgggctcagtggctcacacctataatcccagcactttgggaggccaaggtgggcagatcacctgaggtcaggagttcaagaccagcctggtcaacatggtgaaacccatctctactaaaaatacaaaacatgagccaggtgtggtggcccacgcttgtagtcccagctactgtggaggctgaggtgggagaatcgcttaaaccgggaggtagaagttgcagtgagcaatcacgccactgcactccagcctgggtgatggagcaagattgcatctcaaaaacaaacaaaaaaacaaaacacagacaatataccaaaacacagacaatatacagtgacatgttcaactgtaaataacagaaaacccaattcaaactgccttaagccataaaggagacaggatgtggattgagagttggggcagcctccagggttcgtttatttcagtctctggtgatgtcttcaaggccctactgtccatctgtcatctgggttctggaacagcagattgatcctttactcccaggcccacgtgcatctccttccaagcctagggagagagaccagggctcctctggaagctgtctgagaagaatgggcagcttcattcccaagagctcctgcaagtacctttgcaaaattggagtatgtgctcatccctggctaagaaaagaattatgttgatgaatttgggcctgagccaaatgacttccctggaatcacaagggcagtcagtcaactttccaagaagctcgtgagctgagaggagtcgtggacaccaagtcaagaaaagggaaaactcatgctcagtgacaccacaatgtccagtgcaataatataatagcagagagggacaaaacataagaaacggcacaggacaataatctgtgttgaggaaggtggtggtaccacatagctgctctaggtaccatatttgcaagtaaaattctctatctttattgtttatttatttatttatcttattttttgagatggagtctctctctgttgcccgggctggagtgcagtggcaccatctctgctcactgcaagctctgcctcccgggttcatgccattctcctgcctcagcctcccgagtacctgggactacaggcgcccgccaccatgcccggctaattttttgtatttttagcagagacagggtttctccgtgttagccaggatggtctcgatctcctgacctcatgatcggcctgcctcggtctcccaaagtgctgggtttacaggcgtgagccactgcacccagcgaaattctctatctttagtggcttttactagaattacaaggagacaacttcacttcttctgagatatggttctaattttgagatagccatgggaaaaaaaagtcattaaatttatattttatttctatcttacatttgcctgcctgatctttgagggttgtaaacctgatgggaaagaggtcatatattttaatagcatgttggcatttaaaatgccaagaagtgaaaaaaaaatcaggattccttttagcctgagaattttaatgcatgttcgttgcttttcttcaataattcctctcatttcacacgtacacaaagacatgacctcccccctccacccccgccaccatcggacacacatatttagtcctgggagagatgtggcatcaaatcagaagcagtttttctctaaagaaccagagtaaagaggctaatttaattagcgtccagtctggaaggaatgaaaacagcatagcatctgtaatgcagaaaggttatttgctatctgcctcttgaaaagatgtctgcttgatttgtgtcattctgctgccctcaacaatagagatttgctctcctctctgcaacagacatatttccaatcaccaagctcttgtggatttatgctctcttcctgatttaaacagcaactcccagaaggcagtctacatttcagcatcagaggatggagggttccttagacattctgcaagcatgtattgcatttatcaccaaattagaggtaattgtgagcacagaagaaaaatgatcaaattcacaaattacactgctaatttacccaactacaattatgttgaatatatgcattttgccttgatttttgcatttggtgaaagtcatatctgctatgaaaacaagactagcaagcaatatttcacgtgttacttctaataaaaacagaatgagaaaatggagaggaaagcactttgtaaatcctaaagcactatatagaagtgagttactctcagtgattccattgtttgctaagctttacttaaagaaaaaaaggttgcctagagaactgcataagtgagctcattttcttcctttactgacattctaaacgcattagaatgatctgttttttctacatattttaacatgttcagatggaaagtctcacccagataaatattttcacagtctaaaaagctgtctgctcccaactcagttttttttaatgggcaaaagacttgaacaaggacttcacaaaagaggtcatataaatgacaaacaacatttaaaagtgctcatgattaatcaccaaggaaatgcaaattcaatccacatttattgaccactacatgctcaactgaatggctaacattgataaaagctgccaatactggggatcaggctgggcgcggtcgctcacgtctgtaatcccagcactttgagaggctgaggcaggcagaccacttgaggcagaagtttgagaccagcctgggcaacatggcaaaaccccatctctactgaaaatacaaaacttagctgggcgtggtagtgtgtgcctataatcccagctactcgggtgggttaggcacaagaatcagttgaacccgggaggcagaggctgcagtgagccaagatggtgccactgtactccagcaacagagcaagactgggcaacagagcaagactctgtctccaaaaagaaaagaaaaacaaacaaacaatactgggaattggcaagggtgtggataaactggactctcccgcagtgccagtgagagtgtaaattggcccactgtaaaaactgttggcagtattgattatactgcttgaattcatgcacgccgtatgacccaaccctcccaggtatacacctgtggcaggcacaatgcagtgagccctctgtattcatgggttctgcatcctcagattcaaccaaactccatcgaaaatacagtcacagcatcacttaatgatgaggataatcgttagccaatttcatcatcctgtgagcaccgtagagtgtacttacataaacctggttggtacagcctactatatacctaggctatgcggtatagcctattgcccataggcaacaagtctgcacagcgtgtgactgaactgaatacagtaggcaattgtaacacaatggtgtttgtgtatctaaaactatctaaacatagaaaggtacattaaaaatacagtttataatcttatgggatcaccatatatatgtagcacattgttaaccaaaaagatatgttcatcacatgactatactggaaaaaaagaaactaacaataacaatacaacaataaaagtaatgcaaaatttaaaatacagtataacaactttttctttttgagacagagtctcactgtcactcaggctggaatgcagaggcaggatctcagctcactgcaacttccgtctcctgggttcaagagattcttctgcctcagcctccccagtagcagggattacaggtgtgcaccaccacacctggctaatttttttgtattattagtagagatggggtttcaccatgttggccaggctggtctcgaacgccttacctcaagtgatccacctgccttggcctcccaaaatgctgggatcacaggagtgagtcaccatgcctggccaaaatacaaaataactatttacatagcatttacattgtattaggtattataagtaatctaggaatgatctaaagtatatgggagggccagacacagtggctcatgcctgtaatcccagcactttgagaggctgaggcaggcagatcatttgaggtcaggagttcgtgaccagcctggccaacatggcaaagccttgtctctactaaaagtacaaaaattagcaacgggtattgtggcaggtacctgtaatcccagccacctccacctcccaggctcaagtgattctcctgcctcagactcccaagtgtctgggataacaggcacatgccaccatgcccagctaattttttttgtatttttagtagagacggggtttcaccctgttggccagactgatctcgaacacccgacctcaggtgatccacccacctcagcctcctaaggtgctgggattacaggcatgagccaccacacccagcctctattttttttaagtataaaaataatttaaattttttaaaaagaagctctctgtttttattattaaactttaaaaaatttaaactaaagccactttatattaataacagtgaatttttttttttttttttttttttttttttttttttgttggagtcttgctctgtcacccaggctggagtgaagtggcccaacttggcacactgcaacctctgcctcccgggttccactgcaatctctgcctcccagattcaagcaattctcctgcctcagcctcccaagtagctggtattacaggcgcctaccatcatgcctggctaatttttgtatttttagtagagacggggtttcaccatgttggccaggctggtctcaaactcctgacctcaagtgatccgcccgccttggcctcccaaagtgctgggattataggcatgaaccacctcacccggcctaataatagtgatttttttttccttttactgtttagctaccctttgaattttcttttttctttttttttttttgatagggtctcactttgtcaaccagactggagtgcagtggtgcaatctcagctcactgcagccttgacttcctgagctcaagcgattttcctgccttggcctcccgagtagctggggctacaggcacacacgccaccatgccctgctaatttttgtattttttgtagagatgaggttttgccgtgttgccaagactggtctcgagctcctgagctcaagtgatccacctgcctctgtctcccaaaatgctgggattacaggtgtgagccactgcacccaaccctgatttttcatcacagactgttccccttaggccagaatagaaacatctagtgaaagaccaccaaacatcatggtacattttaataaatttaaacatataccctttcacagactctacttttaaattttaggtattattatttattttgagacagggtttcactctgtcgcccaggctagagtacagtggcatgatcttggctccctctagccgtgacctcctggactcaggtgatccttccacctcagcctcccaagtagctgggactacaggtgcacaccaccacatctggctaattttttgaattttttaataagagatggagtttcaccatattgccccagctggtcttgaactcttgggctcaagagttaaattttatttattatttacttatttatttaatgactatcagattcttctccccaaaagcaattaattgcattttcttctgtttcctttcagagattttctataattataaattatagaaaataaagaatatatatatatatatatattaaaaaaagggctgggcatggtggcccacatccgtaatcccagcactttgggaggccaaggcaggcagatcacttgaggtcaggagttcgaggtcagcctggccaacatggtgaaatctctactaaaaatacagaaattagccagacgtggtggaccgtatctgtactcccagctacttgggaggctgaggcaggagaatcacttgaacccaggaggcagaggttgcagtgagccaagattgcgccactgcacttcagcctgggtgacagactgagactccgtctcaaaagagcaattgagcccgggtgcggtggctcacgcctataatcctagcagtttgggaggccaaggcgggcggatcacttaaggtcaggagttcaaaaccagcctggccaacatggtgaaatgccgtatctactaaaaatacaaaaattagtcgggtgtggtggcatgcgcctgtaatcccagccacttgggaggctgaggcaggagaattgcttgaactggggaggcagaggttgcatgagctgagatcatgtcactgcactccagcctgggtgatagaatgagactccatctcaaaaaaaaaaaaaaaaagcaattggatgtaaaaccatccctcatttaattagttcctctattgacagacatttgggttgttgccagtcctttgctattataaacaatgctgcaataaatatccttaaatatccattattttgcacaatcacaagttacttttcagtaaatttacttcaataaatattgatttaaaggtcagtggtagatgctaacatttgtttcctaaaatagacagaccatctactgagaagaatacacttgttaatgaatgtattcctccaatagatacttcagtgcctaactctggttagacaaggctgaacatgggggaaaaaaatcttacacctgtaaatgatttttgaaatgatgttttagttttttagggctgccgtaacaaagtagcacaaatgaggtggcttaaaacaacagaaatttatggtctcaaaattcttgaaactagagaggagaggacaggtggctaggacaaaggggtgtcgcagatgctgggatgggtggtggagggagtttcaaggaggagaataatcacatataatacaaaaggtaagtgggatgcaagcttagtaggagccactggatttggtaatgagaaggtttctgttgaccttagcagtcagattgcagtggatggaggaaagaatgggaagttagtaagtagggtgatattatctgaaaggaaaacaactccatcttctgacttaataatacgtttgaggttgataaatcacggtgctgacctcttttccctcctcctgttgggggatgtctgggacctcatttagtgcttccttctggagggaactggccttccaggtctgtctgacatgcgcagcactgatgctgacatcagcccttgtccttcaggggttcaaatgctacccatggctcagattctagctcaaagggcatctcttctcgaaagtcttccccagtctccccagctctaagtcatctttttgtcctctgaatctctacaatattcatctctacatctcttaaagtatactttactttaaatgtttattccttttattataatttttagtgcttttcatcttttcttcttaactagagtaagagttctagacaagattcatggatgattcaccttgatattcccaaagatatcatatttcttcacatttgcaccagatattaacatcaaatgcatgctggctattccataaatatttattaagtaaattaataaagggagataactggacccaacaagacaacataaaatagagtccaacaggccgggcaccgtggctaatgcctgtagttccagcactttgggaggctgagacaggtggatcactttaggtcaggagttcaagaccagcctggccaacatggcgaaacctgtctctactaaaaatacaccaattagctggacatggtggcaggcccctgcaatcccagctactcgggaggctgaggcaagagaatcgcttgactccgggaggcggaggttgcagtcagcctagattgcaccactgcactccagcctgagcaacagaatgaggctctgtctcaaaaaaaaaaaaaaaactagagtccaacaacctcacacggtgtgtatatctttaggttaaatgctctttgcagttaaaaacagcaattttgaagtcagcagaagcaaacaattagatgccaaacgtctaacccaatctgaagtatccaaaatccaggaagtaacacagatgtcaaccaagggtgaaattgctatagtaaaccacggtagtagggagccaggttgcatgggagagatgggtttggaagggcacagccaaaacgtagcctataactttctgtgattttgaggaagtacgcttgcctctcaaagccagtcgtcacatcactaccctgaagacagtaattcccctatgattgttatggggtatatatatatatgctatatacagggtacccgaaacagaagaagccctcaataaaaaataacttttaactgttatagcaataagatgaaatattatgcaaacattaaaatgattactctgaagaccatgtagcaacacgtcttgttatatatcagtaaatgtattttactgattcattattgttagtatataatttaagatatttggctgggcgaggtggctcacgcctgtaattccaacactttgggaggccaaggtgtgcgggttgctttgagctcaggagttcaagaccagcctgggcaacatggtaaaaccctgtctctacaaaaaatacaaaaacttagtcaagcgtggtggtgcatgcctgtagtcccagctactcaggaggctgaggtaggagaaccacttgagcccaggaggtcaaggctgcagtgagctgagatcacgccactgcactacggcctgggtgacaaagtgagaccccgtcccccaaaaaaagaaaaaaaatttaacataccaattataataaaattataaatgtattacatattaataatacaccattaaattagagaaagcagaataaaaattatataaaactgctagttatacaacaatataagaaattatgcatacttgttaacaagatcaaaatgcaatctgcctgggcgaggtggctcaagcctgtaatcccagcactttaggagaccgacgcaggtggatcagttgagcccagaagtttaagaccagtctgaccaacacggtgaaaccctgtctctattaaaaatacaaaaattagccaggcatggtggcatacgcctgtaatcatagctactcaggaggctgaggcatgagaaacacttgaactcgggaggcagaagttgcagtaagctgtgattatgccactgcacttcagtctgggcagcagagcaagaccctacctaaaaaaaaaaaaaaaaaagattgaaggcattataaagataagactatcattattcattactacagatgcctcagaaagaaaaaggattgatcacaagttataatgaactagtatgaacaattatatgccaacaaatttgataatctagaagaaattgataaattcctagaagcatgtatacaacctatcaaaactgaatcaggaaaaagtagccgaaaccgacaattcacaaataagactaaatcagtaatcaaaaaccttccaacaggctgggtgcagtggctcatgcctgtattcccaggcatgtattcctagcactctgggaggttgaggcgggcagattgcttgagttcaggagttcaagaccagcctgaacaacgtagcaaaaccccatccctactaaaaacacaaaaaaattagctgggcatggtgtgcatctgtagtcccagctactcaggaggctgaggtaggagaatcacctgagcctgggaggttgatcctacaatgagctgagatcatgccactgcactactgggcatgattaggcgacatagtgagaccctgtctgaaaaacaaaaaaccttccaacaaagaaaagcctaggaccagatggcttcacaggtgaatcctaacaaacattcaaaaaaagaattactatcaatccttcttaaactcttctgaaaaataaaagagagacaacctccaagaccattttatgaggttcacatcaccttaatatcaaagacaaagaataacactaagaagaaaaccacaggccaatatacctggtgaacagagatgcaaaactcctcaaaaaaatactagcaaactgaattcaacagcacattaaaaggatcatacactacaatcaagtgggatttatccctaggatgcaaggatggttcaacatatgcaagtcaatgtgatataccacattaacagattgaaatataaaaactacatgatctactataaaaactacatgttctactataaaaacagattgaaatataaaaactacatgatctacaaaaactactgcatcatttcaataggtgcagaaatagcattcgacaaaattcaacatccattcatgataaaagctcttaacaaaataagtatagaggggacatacttcaacataataaagatcacatatgtatttccatgaacagttcacaaaagtaaaaaaaaaatatatgaaaggccatagctaacattgtaatcaatacggagaaactgaaaggtttttctctaatatcttatcttagctacaaatgcccactaacaccacttctattcagcatagtactagaaatcctaaccagaacaattagacaagaaaaagaaataaaagccactgaaatcagaaaagaagaggtataattacctctgtctgcagaccagcctgggcaacatatctcccccaatctctacagtaaaaaaaatttttagttagctaagcgtggtggtatgtgcctaaagtcctagctatttgggaggctgaaacgggaggatcacttaagcacaggagttagacgttgcagtgagctgtggtcatgccactgcactctagactgggcaacagagcaagaccctcaagaaataa

SEQ ID NO: 1196 - DNA, 5326 bp, Homo sapiens
caggctgaagggagggaggctgagtctcagggcagagtctgagtcccactccgcaccccaccctctgtctggtacagcttaccaaaccaaagtgcccaaagccgtgacatcccggccggcggctcgcaggcccccgccctccgcacgtcacggccgccgggtgcagtgccccctaggggcccctgggacgaggaggaagcgccaggtccttcccgccgccgccgccgccgccgccgcctgctcccctggcacgcgccccgccgccctcggcagccgcagctccgtgtcccctgagaaccagccgtcccgcgccatgggcacgcgtctgccgctcgtcctgcgccagctccgccgcccgccccagcccccgggccctccgcgccgcctccgtgtgccctgtcgcgctagcagcggcggcggcggaggcggcggcggtggccgggagggcctgcttggacagcggcggccgcaggatggccaggcccggagcagctgcagccccggcggccgaacgcccgcggcgcgggactccatcgtcagagaagtcattcagaattcaaaagaagttctaagtttattgcaagaaaaaaaccctgccttcaagccggttcttgcaattatccaggcaggtgacgacaacttgatgcaggaaatcaaccagaatttggctgaggaggctggtctgaacatcactcacatttgcctccctccagatagcagtgaagccgagattatagatgaaatcttaaagatcaatgaagataccagagtacatggccttgcccttcagatctctgagaacttgtttagcaacaaagtcctcaatgccttgaaaccagaaaaagatgtggatggagtaacagacataaacctggggaagctggtgcgaggggatgcccatgaatgttttgtttcacctgttgccaaagctgtaattgaacttcttgaaaaatcaggtgtcaacctagatggaaagaagattttggtagtgggggcccatgggtctttggaagctgctctacaatgcctgttccagagaaaagggtccatgacaatgagcatccagtggaaaacacgccagcttcaaagcaagcttcacgaggctgacattgtggtcctaggctcacctaagccagaagagattccccttacttggatacaaccaggaactactgttctcaactgctcccatgacttcctgtcagggaaggttgggtgtggctctccaagaatacattttggtggactcattgaggaagatgatgtgattctccttgctgcagctctgcgaattcagaacatggtcagtagtggaaggagatggcttcgtgaacagcagcacaggcggtggagacttcactgcttgaaacttcagcctctctcccctgtgccaagtgacattgagatttcaagaggacaaactccaaaagctgtggatgtccttgccaaggagattggattgcttgcagatgaaattgaaatctatggcaaaagcaaagccaaagtacgtttgtccgtgctagaaaggttaaaggatcaagcagatggaaaatacgtcttagttgctgggatcacacccacccctcttggagaagggaagagcacagtcaccatcgggcttgtgcaggctctgaccgcacacctgaatgtcaactcctttgcctgcttgaggcagccttcccaaggaccgacgtttggagtgaaaggaggagccgcgggtggtggatatgcccaggtcatccccatggaggagttcaaccttcacttgactggagacatccacgccatcaccgctgccaataacttgctggctgccgccatcgacacgaggattcttcatgaaaacacgcaaacagataaggctctgtataatcggctggttcctttagtgaatggtgtcagagaattttcagaaattcagcttgctcggctaaaaaaactgggaataaataagactgatccgagcacactgacagaagaggaagtgagtaaatttgcccgtctcgacatcgacccatctaccatcacgtggcagagagtattggatacaaatgaccgatttctacgaaaaataaccatcgggcagggaaacacagagaagggccattaccggcaggcgcagtttgacatcgcagtggccagcgagatcatggcggtgctggccctgacggacagcctcgcagacatgaaggcacggctgggaaggatggtggtggccagtgacaaaagcgggcagcctgtgacagcagatgatttgggggtgacaggtgctttgacagttttgatgaaagatgcaataaaaccaaacctgatgcagaccctggaagggacacctgtgttcgtgcatgcgggcccttttgctaacattgctcacggcaactcttcagtgttggctgataaaattgccctgaaactggttggtgaagaaggatttgtagtgaccgaagctggctttggtgctgacatcggaatggagaaattcttcaacatcaagtgccgagcttccggcttggtgcccaacgtggttgtgttagtggcaacggtgcgagctctgaagatgcatggaggcgggccaagtgtaacggctggtgttcctcttaagaaagaatatacagaggagaacatccagctggtggcagacggctgctgtaacctccagaagcaaattcagatcactcagctctttggggttcccgttgtggtggctctgaatgtcttcaagaccgacacccgcgctgagattgacttggtgtgtgagcttgcaaagcgggctggtgcctttgatgcagtcccctgctatcactggtccgttggtggaaaaggatcggtggacttggctcgggctgtgagagaggctgcgagtaaaagaagccgattccagttcctgtatgatgttcaggttccaattgtggacaagataaggaccattgctcaggctgtctatggagccaaagatattgaactctctcctgaggcacaagccaaaatagatcgttacactcaacagggttttggaaatttgcccatctgcatggcaaagacccacctttctctatctcaccaacctgacaaaaaaggtgtgccaagggacttcatcttacctatcagtgacgtccgggccagcataggcgctgggttcatttaccctttggtcggaacgatgagcaccatgccaggactgcccacccggccctgcttttatgacatagatcttgataccgaaacagaacaagttaaaggcttgttctaagtggacaaggctctcacaggacccgatgcagactcctgaaacagactactctttgcctttttgctgcagttggagaagaaactgaatttgaaaaatgtctgttatgcaatgctggagacatggtgaaataggccaaagatttcttcttcgttcaagatgaattctgttcacagtggagtatggtgttcggcaaaaggacctccaccaagactgaaagaaactaatttatttctgtttctgtggagtttccattatttctactgcttacactttagaatgtttattttatggggactaagggattaggagtgtgaactaaaaggtaacattttccactctcaagttttctactttgtctttgaactgaaaataaacatggatctagaaaaccaaccagcaagttttcagtgccagataaaactctgcgctctagaggtaactcctcatgggaggcagctaggagtgttacctgacaccagtttcctagaaaactgtgacaagcaaagcaataacacacgtcgagaaatatctgatcaagcgggaaatcttctgactgtcggggatctctatgggggctgtccaggttgggatgaagctgtatgcagaggaatgaaagctttgagaggctctgagggttcttggactagagccaacccagctgtatggtgggaattcgaaagctcaaagagtgaagaagccacttctgtagcaggtgatttgggaagatttatagagcaccacgatgtggcagaccctgcacccagccctgagaatgcaaagatgatgggcgaggtgtctgctctcaggaggagctcagcccgtggcagaagttttcctgatgcaaagatttcactttcactattaggctgtcactatgccctgacagcttcccaggactcggcccattcctgtgaagagagcacatttcttgcttcccttagtcactacattggtgtcaatgtcagacactctgtattagggaccaaggttcctgaagaatcctggaaaaatggggtgggggtggagaaggcagtggctgggaccacggcaaaaatcagggctctgcccagtgaccgtcagccagagaagcaggaagaaatgcaagaagaggcagcaagagtacaattgagccttggctgcccatgggaccagtgtgcacgaatgtggccaggacacatgcttttcgctcagaatgctcacttgaaatgtaaggatctcttgttccctgtaactttagatgaggtttcaaaacacagaatccatgctggaaccgccaggccagcagcgggaggtgggctgtcttcagagcagatggaacaaaggattgggttcccaagttcttatgatctgggatcagaggccctcctggctcagtcctggatcaggggcagcccacccaccgacacctctctctcagccacagcagcgtccatcacatcggagctcctacgcagcctgggattacagcctcttagtcctacagctcctgtgtttgcggaagagaatcccatcacaggctctcgtggggaagaacttccttgtctttacaaagacattcctggaataaaaaccaatttcgtggcccgtggggggaaaaaagagaaactaggcttccagaaagctcagcccactggaatggcagtgcatagccaaaaccaagcaaataaacaaaaggaagaattgcaaccaaggaacccacaaatcaaaggtgcagttacacaaaggctctgcaacttgtcagttatctatgggaaggccagtgacactccaagtagccagccttattgggcaaagctaagacatgtagggaagcagtggctagatgaatttatcaaaaatgagcagaaggaagaagaaagaatctctgtggtattgggagagagaccagggctcctctggaagctgtctgagaagaatgggcagcttcattcccaagagctcctgcaagtacctttgcaaaattggagtatgtgctcatccctggctaagaaaagaattatgttgatgaatttgggcctgagccaaatgacttccctggaatcacaagggcagtcagtcaactttccaagaagctcg

SEQ ID NO: 1197 - protein, 972 aa, Homo sapiens
MGTRLPLVLRQLRRPPQPPGPPRRLRVPCRASSGGGGGGGGGREGLLGQRRPQDGQARSSCSPGGRTPAARDSIVREVIQNSKEVLSLLQEKNPAFKPVLAIIQAGDDNLMQEINQNLAEEAQITHICLPPDSSEAEIIDEILKINEDTRVHGLALQISENLFSNKVLNALKPEKDVDGVTDINLGKLVRGDAHECFVSPVAKAVIELLEKSGVNLDGKKILVVGAHGSLEAALQCLFQRKGSMTMSIQWKTRQLQSKLHEADIVVLGSPKPEEIPLTWIQPGTTVLNCSHDFLSGKVGCGSPRIHFGGLIEEDDVILLAAALRIQNMVSSGRRWLREQQHRRWRLHCLKLQPLSPVPSDIEISRGQTPKAVDVLAKEIGLLADEIEIYGKSKAKVRLSVLERLKDQADGKYVLVAGITPTPLGEGKSTVTIGLVQALTAHLNVNSFACLRQPSQGPTFGVKGGAAGGGYAQVIPMEEFNLHLTGDIHAITAANNLLAAAIDTRILHENTQTDKALYNRLVPLVNGVREFSEIQLARLKKLGINKTDPSTLTEEEVSKFARLDIDPSTITWQRVLDTNDRFLRKITIGQGNTEKGHYRQAQFDIAVASEIMAVLALTDSLADMKARLGRMVVASDKSGQPVTADDLGVTGALTVLMKDAIKPNLMQTLEGTPVFVHAGPFANIAHGNSSVLADKIALKLVGEEGFVVTEAGFGADIGMEKFFNIKCRASGLVPNVVVLVATVRALKMHGGGPSVTAGVPLKKEYTEENIQLVADGCCNLQKQIQITQLFGVPVVVNVFKTDTRAEIDLVCELAKRAGAFDAVPCYHWSVGGKGSVDLARAVREAASKRSRFQFLYDVQVPIVDKIRTIAQAVYGAKDIELSPEAQAKIDRYTQQGFGNLPICMAKTHLSLSHQPDKKGVPRDFILPISDVRASIGAGFIYPLVGTMSTMPGLPWCFYDIDLDTETEQVKGLF

SEQ ID NO: 1198 - DNA, 1237 bp, Homo sapiens
caggctgaagggagggaggctgagtctcagggcagagtctgagtcccactccgcaccccaccctctgtctggtacagcttaccaaaccaaagtgcccaaagccgtgacatcccggccggcggctcgcaggcccccgccctccgcacgtcacggccgccgggtgcagtgccccctaggggcccctgggacgaggaggaagcgccaggtccttcccgccgccgccgccgccgccgccgcctgctcccctggcacgcgccccgccgccctcggcagccgcagctccgtgtcccctgagaaccagccgtcccgcgccatgggcacgcgtctgccgctcgtcctgcgccagctccgccgcccgccccagcccccgggccctccgcgccgcctccgtgtgccctgtcgcgctagcagcggcggcggcggaggcggcggcggtggccgggagggcctgcttggacagcggcggccgcaggatggccaggcccggagcagctgcagccccggcggccgaacgcccgcggcgcgggactccatcgtcagagaagtcattcagaattcaaaagaagttctaagtttattgcaagaaaaaaaccctgccttcaagccggttcttgcaattatccaggcaggtgacgacaacttgatgcaggaaatcaaccagaatttggctgaggaggctggtctgaacatcactcacatttgcctccctccagatagcagtgaagccgagattatagatgaaatcttaaagatcaatgaagataccagagtacatggccttgcccttcagatctctgagaacttgtttagcaacaaagtcctcaatgccttgaaaccagaaaaagatgtggatggagtaacagacataaacctggggaagctggtgcgaggggatgcccatgaatgttttgtttcacctgttgccaaagctgtaattgaacttcttgaaaaatcagtaggtgtcaacctagatggaaagaagattttggtagtgggggcccatgggtctttggaagctgctctacaatgcctgttccagagaaaagggtccatgacaatgagcatccagtggaaaacacgccagcttcaaagcaagacggagtctcgttctgtcaccaggctggagtgcaggcgcgtgatctaggctcactgcaagctctgcctcccaggttgaagtgattctcctgtgaaagggaattatttttgatgagtcattaaagtatatccattcccagaa

SEQ ID NO: 1199 - protein, 274 aa, Homo sapiens
MGTRLPLVLRQLRRPPQPPGPPRRLRVPCRASSGGGGGGGGGREGLLGQRRPQDGQARSSCSPGGRTPAARDSIVREVIQNSKEVLSLLQEKNPAFKPVLAIIQAGDDNLMQEINQNLAEEAQITHICLPPDSSEAEIIDEILKINEDTRVHGLALQISENLFSNKVLNALKPEKDVDGVTDINLGKLVRGDAHECFVSPVAKAVIELLEKSVGVNLDGKKILVVGAHGSLEAALQCLFQRKGSMTMSIQWKTRQLQSKTESRSVTRLECRRVI

SEQ ID NO: 1200 - DNA, 3986 bp, Homo sapiens
caggctgaagggagggaggctgagtctcagggcagagtctgagtcccactccgcaccccaccctctgtctggtacagcttaccaaaccaaagtgcccaaagccgtgacatcccggccggcggctcgcaggcccccgccctccgcacgtcacggccgccgggtgcagtgccccctaggggcccctgggacgaggaggaagcgccaggtccttcccgccgccgccgccgccgccgccgcctgctcccctggcacgcgccccgccgccctcggcagccgcagctccgtgtcccctgagaaccagccgtcccgcgccatgggcacgcgtctgccgctcgtcctgcgccagctccgccgcccgccccagcccccgggccctccgcgccgcctccgtgtgccctgtcgcgctagcagcggcggcggcggaggcggcggcggtggccgggagggcctgcttggacagcggcggccgcaggatggccaggcccggagcagctgcagccccggcggccgaacgcccgcggcgcgggactccatcgtcagagaagtcattcagaattcaaaagaagttctaagtttattgcaagaaaaaaaccctgccttcaagccggttcttgcaattatccaggcaggtgacgacaacttgatgcaggaaatcaaccagaatttggctgaggaggctggtctgaacatcactcacatttgcctccctccagatagcagtgaagccgagattatagatgaaatcttaaagatcaatgaagataccagagtacatggccttgcccttcagatctctgagaacttgtttagcaacaaagtcctcaatgccttgaaaccagaaaaagatgtggatggagtaacagacataaacctggggaagctggtgcgaggggatgcccatgaatgttttgtttcacctgttgccaaagctgtaattgaacttcttgaaaaatcaggtgtcaacctagatggaaagaagattttggtagtgggggcccatgggtctttggaagctgctctacaatgcctgttccagagaaaagggtccatgacaatgagcatccagtggaaaacacgccagcttcaaagcaagcttcacgaggctgacattgtggtcctaggctcacctaagccagaagagattccccttacttggatacaaccaggaactactgttctcaactgctcccatgacttcctgtcagggaaggttgggtgtggctctccaagaatacattttggtggactcattgaggaagatgatgtgattctccttgctgcagctctgcgaattcagaacatggtcagtagtggaaggagatggcttcgtgaacagcagcacaggcggtggagacttcactgcttgaaacttcagcctctctcccctgtgccaagtgacattgagatttcaagaggacaaactccaaaagctgtggatgtccttgccaaggagattggattgcttgcagatgaaattgaaatctatggcaaaagcaaagccaaagtacgtttgtccgtgctagaaaggttaaaggatcaagcagatggaaaatacgtcttagttgctgggatcacacccacccctcttggagaagggaagagcacagtcaccatcgggcttgtgcaggctctgaccgcacacctgaatgtcaactcctttgcctgcttgaggcagccttcccaaggaccgacgtttggagtgaaaggaggagccgcgggtggtggatatgcccaggtcatccccatggaggagttcaaccttcacttgactggagacatccacgccatcaccgctgccaataacttgctggctgccgccatcgacacgaggattcttcatgaaaacacgcaaacagataaggctctgtataatcggctggttcctttagtgaatggtgtcagagaattttcagaaattcagcttgctcggctaaaaaaactgggaataaataagactgatccgagcacactgacagaagaggaagtgagtaaatttgcccgtctcgacatcgacccatctaccatcacgtggcagagagtattggatacaaatgaccgatttctacgaaaaataaccatcgggcagggaaacacagagaagggccattaccggcaggcgcagtttgacatcgcagtggccagcgagatcatggcggtgctggccctgacggacagcctcgcagacatgaaggcacggctgggaaggatggtggtggccagtgacaaaagcgggcagcctgtgacagcagatgatttgggggtgacaggtgctttgacagttttgatgaaagatgcaataaaaccaaacctgatgcagaccctggaagggacacctgtgttcgtgcatgcgggcccttttgctaacattgctcacggcaactcttcagtgttggctgataaaattgccctgaaactggttggtgaagaaggatttgtagtgaccgaagctggctttggtgctgacatcggaatggagaaattcttcaacatcaagtgccgagcttccggcttggtgcccaacgtggttgtgttagtggcaacggtgcgagctctgaagatgcatggaggcgggccaagtgtaacggctggtgttcctcttaagaaagaatatacagaggagaacatccagctggtggcagacggctgctgtaacctccagaagcaaattcagatcactcagctctttggggttcccgttgtggtggctctgaatgtcttcaagaccgacacccgcgctgagattgacttggtgtgtgagcttgcaaagcgggctggtgcctttgatgcagtcccctgctatcactggtccgttggtggaaaaggatcggtggacttggctcgggctgtgagagaggctgcgagtaaaagaagccgattccagttcctgtatgatgttcaggttccaattgtggacaagataaggaccattgctcaggctgtctatggagccaaagatattgaactctctcctgaggcacaagccaaaatagatcgttacactcaacagggttttggaaatttgcccatctgcatggcaaagacccacctttctctatctcaccaacctgacaaaaaaggtgtgccaagggacttcatcttacctatcagtgacgtccgggccagcataggcgctgggttcatttaccctttggtcggaacgatgagcaccatgccaggactgcccacccggccctgcttttatgacatagatcttgataccgaaacagaacaagttaaaggcttgttctaagtggacaaggctctcacaggacccgatgcagactcctgaaacagactactctttgcctttttgctgcagttggagaagaaactgaatttgaaaaatgtctgttatgcaatgctggagacatggtgaaataggccaaagatttcttcttcgttcaagatgaattctgttcacagtggagtatggtgttcggcaaaaggacctccaccaagactgaaagaaactaatttatttctgtttctgtggagtttccattatttctactgcttacactttagaatgtttattttatggggactaagggattaggagtgtgaactaaaaggtaacattttccactctcaagttttctactttgtctttgaactgaaaataaacatggatctagaaaaccaaccagcaagttttcagtgccagataaaactctgcgctctagaggtaactcctcatgggaggcagctaggagtgttacctgacaccagtttcctagaaaactgtgacaagcaaagcaataacacacgtcgagaaatatctgatcaagcgggaaatcttctgactgtcggggatctctagtaagatctcttggaatgaagtgcactgtgtatccaaaactattttccagcgccagtgaagttgctcttacctaaaacaaatgggtttatgctagtttccaccaaggaatgagtctcgatggccattaaactttctaaggcccacagggctaggaaaagtcgctctt

SEQ ID NO: 1201 - protein, 972 aa, Homo sapiens; identical to SEQ ID NO: 1197

SEQ ID NO: 1202 - DNA, 313184 bp, Mus musculus
  misc_feature (1)...(313184): n = A,T,C or G
aacttctttttcctctgaacatgctccaacacatcactccctcaaaacttgttggtatttgtgtgtgtgtgtgtttatgtgtcctttttcttctactttgtctttgagacatgctattctctctttcccttgacttaatctgtcagtgagaatttcctctgagccttttgttctatattttgaaattattttatttctaggtatttttctttggcatttctttaggggttttatctctttattaaattattttttcatatttttggaatgtttttattattcccattcaaatgtttgtgtttatttgaggggggaggtcttcattcaggcatttatccttatcctctttaagttccataatcatatttataattacttgttcacagtgcttgtcttgtgcatcagctaagttgctttcctctgggactattatagtggtgatacccattgagtccaattggtggtgcctgctggaatgtggactggccatcttgacttgtccttgtgaaggcaacaagagctgtagcgagctcatgagtgggaatggccatgctgtgtccagaatacatcacttcctggcattcctccccacatcctggctcttaagaatctttctggatgtcgtgctgggagtgggggcttaacacagcttgttctcattgtgatatttgatgtcttcagagagaaaagtgaggactatgctttccacagcagtgtttcctccaagacccgtgcttgcagttctaagttagattggccatcatttagaaagagttctgtctataagagtcaaattcgtgcatgaaaggtagcctgggaatcagtccagttagaaaggtattgctggctgaacagagggcctgatcaagaagaagatctgatgagatgtggctccaaggctgcaaagtcatactgcttggatgttgcttataaaccggaaggaagggcagagaaggctggatgtaagaaggggtattattgcttggacctgtggaaaggtgggggtcaaggaggggtgttgagctctccaatgtcacacagagtacccagcccattagacactttctttggctgtgtgatctggtcagaatctgagaatgatgagatgtcccatgatgaatatagagtggacacagtctatctggaaagagctcagggaatagacaggattgaccacatgattaaagaagatggcctgtgggaggaacaggaagcctagaaggacagaatgtagaaagaacagatgtggggattagacagacggtacaacatggctatttactagcatttgtataaagttttctggagataagtatttttccccctccggatttatagccacaaaagctactggcaagtgtcactaaagtagtatcatcaggctgacggttactgggaatgtgtcagggagttctccaaccataatgcgtttgtgtacttcccaaacagcatttcagttcctttagtggcctgtaactttcaggaaggccagcactctgtgatcctgaagtctttaccactgtgccagcaactccaacaggagcctgagcatttctcaaattcgcttcctctggacaatggaaagatatcacatcaagtcaagcaattagtttcgttttgtttttaatttggttagaggtgttacatttgcaaatttgtacaagttagcgacttcaggaaggatttaaatgtgttcagtagcaagaaagttcaattcaaattatatggagattaaaaaaaggagacctcagtgagctgtcctctgaagggcaagggatggaagttggaccactcatatcttcatgttcttctaaggtcttctgagcacaagttgctctgggactagtgatttgggaatgtgggaagacagtcttcctgtgttttccaaaaagatggggatttttaaggctctaagaatagaacacagagccaccaagtggatgccttgattcagtttgtgatgagcatgggggctactgaaaggaaggccaggtattcacagacccaagcctggaaggaaaagcccaccctgagctcagtgcttcaggtgacactaattatatccaatgctttgcccaggcctttctgagcctcagtcctacaaaagcaagtctagccttctgaacgtgatgagcagaggtgggtggcatcagctgtaatgatcctcgatatgaaaagcatgagttgttctagaaaatgtgaacctgtttccaaaatgtcctccaaactctggtcctgagttttaactgccgtgatgactcccgagttaagccatgaaggattccagatagcaaggcaaataggtttgagtcagctttctcttcttattattcaaatgagatttgttcactgagctactctgcaatgaaactttgaaaaacacacaggagcctgttcttcattcatgggctgtggtggggcagagaatagtgaacaggaaatccaatagagtcacaagggctggagtagaagtggtgatgggtactatggtttgagtaccatctccaaaactaatttgggaatttattagccattgtagctatcttaagaggtacagaacttcaagaggtgaccaaggccattctcctggaagccagttccagaaaaagagcaggttagcttgatactctgtctcacacacaagctttttcatcatggtcctacccagatgaagcctgtccatcatggagtgctaccctccagaatcacaactgaattaattcttattttattacacagtctatggtgttctccaaaagcagcagggacagacaaagatcagggagatgtgggcagttgtaaaagcatccaagcagaaatcaaggcagtcttcctggtggctgtactgtctcaaggaagactacatgggagacagatggcaaaggaaggtggaaagattccacgtaaagccacctacatatgggaatgctcatgtttagaaaaagtcaggagtaagtatttgcacacgatggaggttgtctgcctggaggaaaacaaggctcatgggagaggggagatggggggatgatttctgagaatcaaggaatgcagttcaagttcttttgctggtagacagactgttcttcagtgcaggggatggggaattcaagcaaaggaatggaggtagtgacctccaagggatgatagtggcctggaaatcatagcgagtgtgagaacagaaggaggactcaaaagagattgagcaacgagaaataaaagcttgtgatagagccagttcaagactgaggaagagagccagggcacagagtactgagttctttggatgtgtgcagtgatgtatatgaagtaccatttgccaagacaggaaatggagaggaaaaacgggtctgtgaggaagttgagtgttaaatgatgactatacagcaggtgctcaaaaatgttcatagagtgagtgaacacgtgggtaaaaatgttccacctggtaagagagctttctctaagatggagatcttgggtgactttcttctctgaggtcctcaaggcacagatgaaatgtaacttgtgggagctgttgtggtgattcaaggcaagggtgcgaggggtgaggagtgttcaggcactgaattccagcaataccaacctctcagcacaagaaatggtctcaggagggtctcagcacacagggacagtaagataggcaaacgtaagagaggcctggggagatggcccagtcagaaaagggctttccatataagcttagggtttgatccccaatacccatgtaaaggttacatcagtgctaggtttggggagacagagacttgggtatccctggggctttgtggacagcccacctgctctaattggaagttctaggttcagtaagagaacctgtctcaaaaaaataaggtagagagtgatgaggaagatatttgaagtctacctctggcctctgctgccatgaacctcactcccagtagtgcatacacatcaaataacatacatgtatacacaatgtaaaacaataagcagaaaaagaatagtactggaaaaaaaaatagacaccccctgaagctttcggtagcttggatggcagaaacttgcttgatttgtttcatggtactcacactgactgaatcatgtctccacctcaactcatagtttgaattcatatcctctccttgggagtatctctcaattcatatcctctccttgggagtatctctcaattcatatcctctccttgggagtatctctctataagaacgttaggaggcagttaaggttgagggagggatgccatatgtcttattaagtcttatcaagagggagtgccttcatcttccctctcctcaagctctcacccatgaggagtcaaaggcactgacatgctagctccctgcagggtaggaagacgatcctgctctcagatggcagttttcctaactaagagaaaggaaatgcatgctgttctgagctccctgcctgtgacatttggtgatggcagcctgagctgactaagacggtacctgacccttcagagttgttcttggtaaatatagtaatcaatattgtttcagtgaagtgaatgaatgagtcactcattggcatgattgcagaggcactactccttcagagctgcgtgattgccactcagggggcagaagagaggaggggcatctgctagctagcctaagggtcctggatccttagggagagtgggaggcagccttgactgtgactaaatgcaaggaaaggcttaagcaaaggctcaaaactccaatgctctgctatctgttggcttttcttcttagcatttggtggggttggctttgaaattggagacaattcttcatagactgtgtatgtgtgtgtgtgtgtgtgtgtgtgtgtgtgtgtgtgtgtgtgtgcatctgtccattcatgtatgtgtaaactctcctaacattatatgaatcttcctgaatttaagtgtatttagccaccagttattgctctccacaaaggaataacacccttaagctgacaatgtgattcttcaagtaaacaatagataaaggcaggaaagggacactgtgtgacaataattgggataattacaactcatgtgttactcacggcacttgccataaaagccctttctgaattatcttctaccacatatgaggcaggtaaatagtacaaaaagtttgcaaggtatttgaaaaaaaatttccaagaaaagataagatgaaagtggctaaattccattaaactgagcattaactctgaattactcattgatctgtaataaaaagtagccgttatgcctggcaaccgaaaattgaaattatcttcaagtcatcatcagggagacagagagtagatctgaggtcacaaggttggtaaagggactttgggtgagttattggtttacaaatattctttccttgtattggcaatggggtgaagtataaggcttccccctggcttctggttactgtgtatccctgtggtctcccagctccaattggctgtcggttactatgtatggttactatgtatccttgccgtcttccaagcttaacatttcaacatgttaagcttgtattgattattagattttgattagtatatttactaatattgactgctatatctactaagagcaactctgaagggtcaggtactgttttagtcaactcaggttgccatcaccaaattaaagtgaaaaatcaactgttctgaaaaggtctacaaatgaaagaatgttagtaaaactgaggggacttccagggctcccccttcccaggcagtaggctctgaataaggcaattacaactctgtaccctgatgccaagggaagcggatgctggaagcctagtgcctggatgggctttctaatgggttgtatgtgctccaacgtttaagtgagcacctgggtcaggcagaaaaagctttaaggtaaaacatcagcctgtaaaggtgggggactgattagaaagggtataggggactttctgggttgattgaaatagtcaaatgctttatactttgtttgacatggttgttaagagtgaaatcgatccatgtttttcaggttgtatacttaatatatgcacataacattgaacattaattttgcttcgaaaagcaatattctaaggccaaagtctaggagacaagtaaagaaaaaaaatcagtgctcaaactatctttaaaatgaagaaccctttagagggaaacgcaacatgcttctgctgtagaggagaatagcattgcatcaggactcagcacggggtcttagcagacctagtcactgattcttgagatgtcggcactctagcagcttgtcccgagtttcgagccatcctgggctacacagtgagttccagcacagcttggtcttcaggttgatactttcttaaaaaggaagaagaaaagaaagaacaaaatggaaagagagaacacacacacacacacacacacatgcacacacacatacatgcacatatacattcacacacatatacacatacacacatatatgaacacatacatacacatgcacacacatacatatatacactcacatatatacatatacaaacatacacacatgaatacacacacacatacacacatgaacacacatacacaccattgataatcatggtaatgttcaaactgcacagagctaaacttttctcatctcagcgcagggaacatgttagtagcataagttatcatacaccgacatccccatttcctctttcatggttttgtagagagataatgtttttgtaaatgtaaaaagccttcaatggagctggagaggaagctctgcctggtcctagtccacatggtagctcacaaccatccataatgagatctgatgcccttttctgatgtgcccgaggacagctacagtgtactcacatgcataaaataaataaacaatcctttaaaaaaaaagaactaagatgaaaagctttctggtgaacacgctgctaagcactggtggcttctgcctcgatattagatggacttgaagtttgattttatagcttctgttgctgtaaagataggaagataccatcctagagggaacacagggctcccagtggaggagctagagaaagtacccaaggagctgaaggcgtctgtaaccctataggaggaacaacaatatgaactaaccagtacccccggagctcttgtctctagctgcatatgtagcagaagatggcctagtcggccatcattaggaagagaggcccctgggtcttgcaaactttatatgccccagtacaggggaacgccagggctaagaagttggagtgggtgggtaggggagcagggcagggggaggatatagggaactttcaggatagcatttgatatgtaaataaagaaaatatctaataaaaaaaaaaaaagaaaaaaaaaacagtctggaaagttccggatggtcatggtcatgtgaaaagttagttttcagaaagagtcgttcagacaggttggggtgttgttttgtcctttgaagtatctagagaggaaattaatccatatttggtgacctaaggatgagcagacaagatgctacgtattgagattctcagggccaggcctttgagttgctcctcggtgggatgaggcaacaaaaaccaggtgagttcagggaggaagaggataagtggttgagaactacaactgggactcagaagagggaggcgctggaggatgaccacgagtggaggatgaccatgaggataagctggtgcttgatccgaacctcaagacagcagatgctttctgccaagctagaaaagtgaatattctaagcagaaaaaaaaaaaaattaagagaagaaaagctttggggcctttggaacaacaaatttttattcatcaggctgaggcataggctacgtgttgggggtgacagactagcaaagacaggtccaggagagaggaagggactctactcttagagaagctgggatttggggtaatgatgaaggggagcctgcacttagacaagtgaggtaagaggccgctgaaaagggatgggcaatgcatgggaagggagcgtgcaaactatgggtttgggagttgtttcttggataactatagaaggcatacgagtgtcagacagagacagcgatgctgtgtcctgtgtccggagtgaagtgttgggtcgggaggagaatgatgttgggtgtttggtccagagtctgcactgggcaggaaaacaaggcagcccatgttctcccctacacctgggcaagcagtacagtgtgctcagcctaggactcagagagaagaggagagggatgagactccaagagaaaacaggtggccagagtagcggtgccgggtggtgagtgggggaaccaagatggcggccatgctttccgccacaacccctgtccctgggagacagagtttactaagaggagtctgaaagctattcctggaaatgcctatcttgagatagctcaggctaactggaattgtaaacttctccacggccaaagtcccctgagatgatacctgccttctcatacccttcctatgcagatctccagatgtccagatctctctctctctctctctcacacacatatacacacacaccaactttccttgactcattttctttcttttctaccatctctccttcttttgttacacagtttagttggactggcttgatgagtgtgacatcattgttgacctacaggaggggcccctgtcatcaggagtcaacactattaccaacaaagggttagcaatcttttttcccccaatatttatttatttgtttgttcatctatacagtgctagatctcaaacccatgactccccatatgctaggcaaatgcttcattactcacaccgcaacttctcgatacttatttatatattagatatttatggtcattgctgattgttgagggaacttgtctaagtcccgatataatgaccttgagtctttccaagcacaaaaacgtatagttgcagcatgatatcattagtattttctttctatttctttctttgtactggcccaagtgccactcatatatctcttggtaactgcctagggtcctagggctggagaccggccactcctggcgttgtgattagagtcacttaatacctaaagtagttactaaacaacaaaggctcctttaggcctcctgtgtcctgggacccagggtgaggacacagtcagagtaccttgttaatctgtgttgtactgtggtggagagaagcactgagaaccaggtgtatccatgggacagcactggaggtacaagatctctgtctgcaaccaatgctggtaactacagctgtgaacgtgtaatcgctttaacgcaaagctattttatggttccaactttacgattaaaataatgcctcttctgggatgtgtttacagacagtagtcagtaggctattggtagagaggctggtaggtttgactaatgaagtgagggagtcttgcatttcagttggaaacatatccctggaatgccaaaaatatttattgcgaagtctgacttttgtatgttattggtagcattgtcactgagcatcttattcaggggaacagtagggctagagggcttgactcatatgtatcccagaaggcttttcttgttaaatgacatcgtttaggaagaagatatcctggcatagtttataaacttgatctctgcacactttgactggcattctagtttatctgtgagcctgtggttcacagccatctcagtttccctctccatagaaagcaccgggacatttctggctctacaggtagggagcaaagggggctggagtttcttctaggaatgctgattctagcggggctactgctgtccctcagcagacagcaaggctcccggactcccgctgccattcatccagctcgtgcaggagcccagctgccttgtctgccgggaggggctgccaagtgccctgcctactggctgcttcccgagagtccctgccactccacatacaaacacatccacacacgctctgccttgatcacacaccgcgccactcgatcattcgagcacattccttccttccgtcttactgtctcagcccttgacttctacaaacccatggaacatttctggaaagacgctcttgaaccagcagggtaggatcggcttttgatttctctctctctttctctctctgtagcttgagcgatttgagaaagcaacttacctttctgcttagtgtctgtctcctagctggagaaggaagctgtgctgtttttctatggggggaaatctgtgcggcttttttttttttttttttcccgctttccggacttgtaggattctctgtgccatttatatataatttggcaggctcagatttttaaagagtctcatctgaagtgcttgcttttgcatgtgttttttaaaaggcatttgaaaattgaaagtgtgatttatgggaactaaatcatctacgaaaaaattgctctagaaagtcatggttgctggccataaagagaaatatctgcgattcacctaatgtatttttaacccttcctttgctgtcaatgatacttatgggtgctaaaactcatctttgtctttagatttaagccagcttagctgtggtttatccaaaattatctgtttttctaagaattagataaatagtgtgcttagtagaaaatatttttaaagtgttactattagtaacagcaaccttgacatttgcatgtgtcaggtacttctcctgggtatatgggctagcaattcaagtcatatgctaatggttattttaggggatattaggttggggcatatgcagtttattaagaaagtacaaactatccaagctgcaatttttttctaaatttgcaataacaggtgtgtgtgagctcaatcagaatttaattcaatactgaataaaaaacttattttaacttctctgtcattcgagtattagattcctgtgtaccctatgccaagggaacccagaaggtccatttgtagaattcaagagctgaaaggtaggagagcctttcaaaagtttctggttagacagacaaggttaccggatcgccagagctttagtcaaggacctcaggtgatattttatgggaaaatgtcttagtccttgcatggttttcccaatttttggttgcataacctgtggaaggtagggacacccaagtgtgcctaaccgaaggtttttctgaatcatatccacatgagaatttctaaaggaagcaaatttggcaccggggtccaacaaaaacagaaaagctaggctgggcaaaattgccatggctgtgctttcttggggagcgttttaaaaaaattattatttttatttttttgtcagaagaggaagctgaaggctggcagttttctcttgactccaagtgcagctcttcctatacatagtccatctccactcgtctggccctagatgcctcctatctgtgtccactggtgctaaatatagctgtcggtggctggctgcatatgcaatcacacaccccatcctatttgccatatctcagttacagatacagttaccgtccctccagggtcattctatgcatacactgcgtacttccagccaacaagaagactgaatcaaatagaaaggaagacaaaacagagacagattggagcttggcagaggcacacaggcaacacatcaggaaaagaaagaaagaaagaaaaaaagaaaagaagaaagaaagaaagaaaatggcctgtggcttagtctgcatttgttgcaaacctagtcttccttgggatggggggagtggtaggggcgcggctcctggaggtccctttgctgctttcaccccctgcagcgaaatccagcagcgaagacctggaaagttaagttcaaggaagctagcggttccttgggtgcacgcacagtgtgatgttcccagtagtgcctggaagctgcagcccctggccagtggcttccagcaggtttgtctaagagcagaggagaggagtatgtaaagttggagaacccgggagcgtctgggtgcgctccttggagttgggtcacctgtgttctgcaggatagctctgccccgcaggggcagaggcagggccagggccagtactcgtgccaagggggacttgcgctgcgccttctctaatcgcaggctctactcttttttccaggtggcccacgcgctgctgagccctctgcgtgcgcggggagccagtctgtaactcgccggctgccacttaccatgaccatgacccttcacaccaaagcctcgggaatggccttgctgcaccagatccaagggaacgagctggagcccctcaaccgcccgcagctcaagatgcccatggagagggccctgggcgaggtatacgtggacaacagcaagcccactgtgttcaactaccccgagggcgccgcctacgagttcaacgccgccgccgccgccgccgccgccgcctcggcgccggtctacggccagtcgggcatcgcctacggccccgggtcggaggcggccgccttcagtgccaacagcctgggggctttcccccagctcaacagcgtgtcgcctagcccgctgatgctgctgcacccgccgccgcagctgtctcctttcctgcacccgcacggccagcaggtgccctactacctggagaacgagcccagcgcctacgccgtgcgcgacaccggccctcccgccttctacaggtacccgcgccacatcggggtggccgctgtgtaaggcctggccgggggagggagcgcacgaggggggtcaccgcgggctgcaggtctccccatcccagccctcggggaagtcagaaaggattctttggcagctttaaaacaacagtaacaacacaaacaacaacaacaacaacaacaacagcaacaacaacaacaacaacaacaacattctctgcctgtagctgtcttgtgggagagacagatccaaacggccctgtcccctaattacacaagaattggaaactagtccaaagaagttatttatggggcaagtaacctaaaggtccaggtggcctgtgctagcaaggaacccctttattatttaaagctgcaggtgtttgaggccagtggagcccaggggagatttattagtcttttttgtttgtttgttttaaaattgtttcattgtgtcgggttcaatgttctttcaactagagttctggactggaaacacccaaggtttactgaagaagataagcttttaggcagagcggcccgtggatctctttccctctcttccccatttctgggttctggattgagttgcggttgctcataaatgctggtatgggagttgaatgaatgggtctcaacaagttttgatttctggtcgaattcgagttcgagcagattgctggcatatgacttctgacagccggggatttataggtgtcccatgtgtttacaacatatcacactgaaacaccagcacagtaattcccctacagctacatttcatgcctggcccagcaggcagcgaatgctctggagtagcacacgggttagctacgtccgcaccccccaccccccaaggcactgtgcaagaagccagggcagtccaggacacaggggaatccaggacacagagactcttcgtgacctaagtgacaattgttttgtgtcctcagtttttgtttctcctaagagagatttttttggaaccccccccccccacttcctctcatttctgcttcttttccctaagggtctgcagaaggcttaggtgggtgggtaaacacctgttagactttcccaggggacagtaatatacaggccgtgtccagagtctttgggtgctcacaggctgccgaatcaaaactagcccactgtaggctggctttggccactggctcgggttctctttccagatgtatttatagtagaagaaataggactaaggtgcatcttggccccagaagacactgaaggatgaaaccatgctgtatcccagctcacctttagcccacccaggaaactaaagcgtcaggcagcaaagtgggtccaggcccagatttcacattcaggatcaacagtgaacgagactttaaaagcatttttggggtttaaattaatctcacttgctttaattcagggttaagataaaaaaaggcaaataatttattctctagatccccagcgcccccccccaaaaaaaaaaactgaaggaacaaaatatagcgattaagattaattcatactttaaaatttttcttgctgttaaagatggtattggtagaatgtgagtcctgtaaccttatgatggagttcccaaagtattttcttttccatttaattttcagttctttttttgcaaattaatgccagtgcatttcaatgggagctaatgagggtgctccttgtcgggttatttactgccttgctaataattacaaagtgaacggggaaaataaaaagagatcacattttattcaataccgcttagcatccccgtatcaaagaatctcaccagatataccccatcttaaacttttagtccagatgatatccaaatacttccccctccccacaaaaaaaccccaacaatgaaaagagattattaagataaaagttgtgcacaggtggaattctgggtggaaatttagtcttaaaaacgattttcttacttggcttcttactcaaggtgaaaggaaagtatctatgccagtgtttcaaatggatgtttggtagtttttttcctctttttcttttttgaataaccttgaatttttttttttttttttaaagaaagtaaagaattgaacaggctcttaaagaaacaaaacaaaacaacaactttacttttcctaagcacttcttaatagtttgggggctgaaaactgcgcttttcaaaattgcttctcacgaaccagtaaatgatgaagtcactttaccaagtctaagttttaaaaatggaacaaaccctaaaagaataatgtcttagagtgagtacatggttatgcagtcagggcaggttctgactttcggagtctagaagtgctagactggtgtaacaaagtcttacactgtgggtcgggagcaaagaaggttgaaagatacaggcctaagatatatttaggagaaaagcaaaatgtgtaggtaagttgctgtaattttatttatataaagaaaaaagctaatttgtccatcttcattttatctttttttccatctacgttggcttggtgtctatggaccaataagagcaagatttattattcctgattgtggagtggggctgcttcgtgagctctttatgagaacatatttgagtgggccacaggatgttcagggaatttgggcaaagcttgatttactctgagtctacatgctgtggttcctttttccattggccacaacatgcagccatatttaggtatgaggagatgtagcaggtaaaatagcttggggcatgtaattaagtgagaaacactgccacttgtccaggtaacttgttgcagagacatgctctgttggtaatcaacaagctgtggttttgtaggttgtgtgttactgagaatttcatggaagtcattttattcagaattcttagggattcagacaactttgaggatttcaaagaaagttcaaggcgaaacacttctgttcactgaggctttaaaaaaaattcaacacaggtgtttaatgctgcctgaatattttgaattttgtcagtatgtctaggtgctacgtttcaaaccagaccaaagcaacccaaacttaagaaacaagccgtccacatcagccaatcctctgataatttggatcccgatgtctgtgtagtctggagaactactttgtctgtggtgatcactgaagaccacctttctgctttgaggaggtcttgggagagagttgagggatggatgttcatgtttcccgtggttccccccatgcacttgaatgatcagaccaccccttttcttttggtctttacatgtcttaatcatttaaattgctgccgaccacctgccatgttaagttggtctaagaatagtgcaaggaaccacacattgctcgggacggagcgtatgcttggatgtggatggaatcacatctgtgtcccttctcttttgttgccagccccatgtggctcttactgccacggagagagctctcaggggtaattgctatttcctccaatcttatgcggtgctctgttaacttggatcccattccccagtttatacattcataaagttgtgaagttcataatttgagagaattcgggttgagcacttttggtttcttatactttaaaacagaaggcaggggcagtagacagcagggagggtgaggacggcaagaacacagggctttacataggagactgtgcatgtgaaggcagtatgtaagctacatgaaaattgcaggcttttaagttactttacccacatttgaatagctgtttgtacatttgtgtgcactagagcaagaggaagggacacatatgagtggccaagagtttctttataaacagagagtagcggtaacaagaaatgtttttcctacaagccagatctgctggtcatcagaaagaacatgtgtgttagtatatccaaagtcaaaaggatcatgtgaaaagttttacatgaagaaattctcagatttgagtcatgttttttaccaactccatattatacacaacttcagccctcttctatcttccctgtgatgccagggttctttttagtgtaattttagaaggtccagcttgagagagcagtgtatggagtgtggcggtcaggtcctgtgtctccctgcctctcccctccagccctgggagaccatgacggtgaaaggggagaaagaaacaaattaacttttctttagaatgttgagtctcagttcactaattcaggaaaggaagatacagaatggctactcttgtttagaaccaaaatacatagcccccagggagattctagataaagccaaaagtactgctgtttaccgaccagagtgaaagcttaagagctttcaccaagaggaggcagtggcttgacaaagttactaaggagtctttttttactggtccagctcttgcagtgaattgatggatagttttgtttttcaaagagctccctcttcatcctgctgtcctactcccagagtgttcaactgaaggttaagggagacacctttatgatatgcttggtctcaggataggagaaaaatagttgctgtgtgctgtgcctgaagaatattaatagaaattccaggaacacatttgccttaatcaatagtgtctaaagtgatgcatacttaactgtatttggttaaaatgcgacacttagaaagatatgtattccattaccaaccgacagaattttatgtagtttaatgaagcaatttcaagtgagttggtttagacaataaggttgctgtaactgtttataagtgatatggttaagtccggtggtgacctgtgatgatagtgtgggagatggtggtaatgatggtgatggtggtgataatattgaaggtgacagatgaagtctttgatggtaacaatagtgacaatgatagttacagaacactaggctctgtctgggtatggtgtttttctggataccatgtagcatcgggatgtttatcctatacagacatcaaaggcttctaatacacttggatttattttatttggctatgatttaagaatcagaaaatcccagtgatattatcaaccagattgatatttgtaattctcctaaacacgtactactgctatgtgaaaatgtcaaacctaaaccacaaacaaatgtaggattccaatcctttaacattttatgttattatgaatgtattttcaaaacattcccacctcccccgactcagtttctccccacccccactataattttgtactttttggagtccttatgcattatagttagaaaaactttggaagttcacttggcgctagtaaagtttgttaagtaatgttcaggaataggcatgttaatgcgagcccttaaaactctcagatttactgttgatctggagagtggagaggggctctggggctctggggccggggttctggggcccttttctctcctttggaagtcgcattgctgtccgcccttggctttctctttgtggccattctagtcccttcgtcagccttcggccttccttcattcccagattccctaatgttagtatgtttggggggttcgaacagtggactgggggtgtcctgcattatttagcaggcaccttagttgttctttgcctctcttacagtttttaaaacaacttattttaaggtcataaaaacaaaaggcaattattaccgattagtttctcacaattaatagtcccaagcattaggttaaaagcagctgtctgtgcgctgcccgtttctttactccatgatctttgttatttccaattctttctcatattttcttgtttcctttgttctatctttgaacaaatacgtaaaaactcttttaaaaactctttctggctcttccttatcaaactttctttcctttcctttcctttcctttcctttcctttcctttcctttcctttcctttcctttcctttcctttcctttcctttcctttcctttcctcttcttttctattttggttccatctgttcgtgctcctatttctccttctacattttctggattatttctttatagacctagttcatctgttattttaacaatgtttggaacaggccttgagactcctgtctactgtaggaaatctgatagtgcgaggctatgccttcataactcaggaggctattaactaaatagacagttccaaaaaggatcccctgcctcagctttatggatagaagcttgaaggaaaataagggagtaatttctacttagcagaatgtcttggatatctcctttatccctccatttggctcccctgttctgatctgagatgaaaatggaggccatatttcacaataaatacacttttgtgtttccagccagtcataggatggcactgcctatagcagccggggaatcttactgacagacatttcaaattcagttttttcccccttctgcttataacatagagataactaaaaatgcacttagggccattgttctgtgggattctagaatcatgtgaatttgtgcaaggcatttatgctaatttcctacaccgtcaacagcaacaacaacaataaaaaagccacacatttcaaaaactgtttgagtatacctatgattcattttactcatgccatgaaggtatttaaatggtgctttgtggagaggctgtgaaacatccttaatgctttgttgtcgggagtataattgattttaatgatcttttagggagatgaatttttgttttggggtagactttaaagtatttgtgccaggatattttcaacagtgtggaataggaggatgcatttcctaatttgacgacaagacacaaggtagacatttagaaggtgttttcattagttacaggaaagggatttggggaccccgggaagcctccttgggttctagtaaggaggatctttgagcactgaatgctccaaacagacaccacatgtagttcacgttcacttccctctaccctcagcgaggctgtggacatgagtgtgttgagaagctgttgggaggatgtgggctgcggagcctaagctgcaatgctctctgggaaattccatgcaggaagggtttttgtgatgtctttggaagaacgtggaaagtctgtggctctctctctggaagatgagtacttccagaggcattccatgcatagtcagcccattccacacacagtcagccctcgtcatccatcacagattctcgacttgaaaatttactcactcactcactgaaattgatccaaagccaatcggggatgatgctttcctgctattttgctgatatgtacagagtgacaaaaatttgaagtcatttgataagtattttcttttctaaggttgaacatgacatactttcttcttgctttgtgctgtaaatgagtctttttgggggtctcttggtggcagagagttggcatttttatccgtttttgtttattattattattattattattttattttattttattttttttactgtgtgcaatgcccctaggcacagtgctgaaatgcaatctagtgtttctcagtacaaaaggctgccagagatgagctgtatttagggataaactataatctggttgagtgagttcaatgttaaggagtcaacagtttacagtaaatgaagtgctttgaacagaaacacacataaaataaggttttgtattgatgggttagtaaactgtgaccagagtttcccagggacccactctgtttacctctccaggagcaaggatttagcacccattaactatatatccacagtggcctcatagaaagtaactaccaggaataattaagggcatggtgaaaacacgtgtttgggagccaagcagcccgtgtctctagtctgccttgactcttgtctcactgggatttttggcaagtcacttaattgtgtgacaaggtatattcatgtgtaagatgccaatcagaataagaaatacatattttaggtcttgtgaggattaagtgaatttgtaggtatctagtactcaggacatgaacttgtaatatgccaatggttttgtaccagccatttgtttattttgttccctttttcttccactctttctctctccgagactccatttttctttctttcttttatcttttcaacaagctcttactaaataaccaaggctgtccttgaattcatggaccccctgaattctggaatcaccaactctagcaacctttattccttctttaagaggaagttgagagctatccaccaacgatgaagagaggggctcttgttctatgtgcagagtgtttgtccttctgattaatttgcctacaaggaaccaactttaataccctattgtgatgaggagttaaagttttccaaccagaaggaagcaggaagctagtatttcttgaattgcttaggatatgccaggtactaccctggcaaagaacaaaacaagttgcaacctccaaataagtgagagtcattcagtctataaggagggcaagcattcaatccggtgcagtgaagcaatcttagagatggaggggcgaggctgatgctgagctgagccacttgtgggagaagctgtcacatgcaaggcagggaggacagacttctctgacatggggcaaagggacacatgtaagcacccagggagaatggttgcagagccatctacatatattaagaacttactcagacctgggcctcatctcagaggttctaaccactgctctgaggtaaagctggataggcaattaaagaaaacaagaaactgctctttaggacttttctgctgggcagtccactgctttgaagtttccttggacgtctctatgtctgcctcacccactttctgctcattttatacgcatggactttctagaagagttttacatatggagacattggggtggtggaatggtccctggtggcctccaaggttttgttacgtttgaaactctgagctgaactcgtgactgattcccaagtggtctacaccatcatcaggtgtggatgcccaaggcagagtcaagaaggcacagaggacagaaatgactgaggcagtcctttttctttctcctctttccagaaggaaatggaggcaattcaattgcagttgatgtagtcacaaagaagaacggaaaaatgtggacttttgccataggatatgagatgaaattaggtcacagatacaagcccacatgcatgttaatgatcttgcatgatctgaattttgcttcatgcttagatagattaaggtgatgtagggtcttgtatctccagccagtagagttctctttcatttaggcttttcagagagttaccacagcattaggctgttatcgaaagacataaccactagaacaacagttctctacctgaaggtcgggacccctttagagatgaatgaccctttcacaggggttgcaaatcagatattgtgcatatcagatacttacatttcgattcctaatggtagcaaaattacagttatgaagttgcaacaaaataaattttatgggtgtgggtcaccacaacatgaaggtctcagcattaggaaggctgagaactgctgtcctagagcctttaactgaattcatattggtgcaaggggttgttgcatgacaaaatctagttgtacatctggaaaattcctgatttcaaagccttttatttttttgttgttttaaataaaaatcatttccttgcaatgaactcacagataaaatgatcacccagctagattacggttgcttctcaagcagccactttgcctctcccaagctctccccatctctgtgaacttctgcacagtggggtgggccattccgaagccacggagctctgattagggttttacactttcacttccagtgacatttttatgcacttgtctgcaacaaaggaaaaaaaattctgactcagttaaactagaaaaataatgagcttcatacccccctttacaaatccttttccctacattccatcctcccttggcacctgatattgtcccttcttggtctccctcctcaatgttgtaatgtccccacacttacaagtctataatacactggaggacttgcctttgcccttctgccatgaaatatttgaaaaattagcaatgctcttggaatgtatgatattcttggtgtctctccccttccagttttgttttaaatgactaacttgtcaaaagaggagggatgctaagagtctgtatcttggcacttcagccctgcactctgtctaaggcttctttctgtattactcaaccctcaagcctgctcccttctcagccataatgtctagaagcaagactttgaaatgttgggcatatgtatacatgcatctccttgggtgtcttctccagtgtccacatatcttttcttaactatgtagttagtatttctttaaaaaattttttaaaattaattttgagaaattcatgtagtgtatttttatcatacttaccgtacaccaactcttctcagatctgcctatcactcataacccctcccaacttcacattcatgtttttcttaaatagccctccagccccaatttgtactgcccatatactcatgggtgtgggtctgtctataggattgtggctgactaggaactatatcttaaagaaaactgactcttcctctcccaggacccatctgctgttcatagccagaggcaagggcttgggagtcccttcctcctccatgctgggatgttgactgtcttgatcccatgcaggttttatattgatgatcatgactgctgtgagctcattagcatagtagtcctgtcatagcctgaggatctgtttcttctgctcctcccagacctctggctcttaaaatctttctggtgtttcttctatgatggtcactgagcctgggagagagggatccatttgaccactctgtggacatgtattttctatactttggccagtggtgtatttctgtgctaagcattatctactgcggaaagaaatgtctctgatgaggtctaagagcagctgatctatggatggaaagctaggaatttagagggcagtatgccattatgtccatttggcagaatgatagtaggttcacccctagggccagtgctccctgaccatgggttcttggcctgtaaagtgccaggcatgtttgtggagtgggccttagatacaaccagaaagcagttggttatcttcataacatttgggcccctattacacctatgggcatatcctgctatttggttgttattgtacctcagggggctcacaggtggataatgactatatttcttggttatcaggatctagacctcaaacaataaggggttgttacctgctttccagcctagggctctgtggttatttttttttttttttttcgtgcttaggaaatgggattgatgaaatcaaagcagctctgttccccccaccccaatttaacaaatttgaccttgttctaagaagtctgtgtttgataggaaatgggtagcaaagtcatccagggacccaaagacttacagaaaatccagtctcttgagattttatattgaccgactgtgattgacattagggtggtgccagtcactttattatatgcctttaaacacacagacatggcagtttgtctccgatgtctcttgtgtcaccttctgctttcctcgtatgtggctggccctcctttactgctgttgggattttgctctctccagttcagattttattgaataatcttttagcttgctgccagaatacctaattccaggcttgcctgtctgcttggctccttccctggcctaatggcctctggtgctttctcagtggtcatagactgcattcacactcttgtctgtaccttccagtcagtctccggagatcacgccaaggagctcttgtccagagccatacacaccttgcctcttctttgttaggaccacgccactgggaagtcagggttcagctcaaatgctgtctccgtttggcatgtttcatagtgtctgttgtgtgcatattggcctttttgttatggtcatcatgggatttcttttggctgtaaagagattggtcacttctatctgttcaatagtttgtagaattgatagaagtaatttcatagattttgctaattaactcaccaatttattgattcaacaagctccactggattttgattaagtcctggatccaatagcagacacagagatcttacacattcttctcaaggagttcacagtcaaggagacaaggagtctgtgaagaagtgacagtgggccaggagttgtgtttaggaagaaaccactaggggcgctatggagaatatctgaccaagtagccagtcctagttgactgagacagctcacagaggggtttgactgagcaaaggatgctcacctgggagttttgaagactgagatggagctacatgcaggagctgggcaaggtcgcaagcagatgctgcgcttggctgctcaggcagtgtcttcttgtaaccccatactgtggaaatgaaaatactcagagagccaaaaaaactgttgccctaaaaaaaaacaaggtaaattattaagaatcaaagagataaatgaaaatcccaacggcttgtgtgcttggggagctttaagcacagtgtactcggcaccatggtgatgacgttacaaggatgctcttgtttagtttttatgccagacccaatagccagtgtgattattctcctcacttatggataatgaatctaaacttcagagaggggagcttgaggggccagagctagtggaccagggattcaaactctagaaaatgaagctgaaaacttaaacaagcagaatgctctgtggaaaaagtgatggtatgccttctgccgctggcctgctggattgtggcaattctttatatctctctgttgtgacaaagctttaatctttgactatgtcctgggggctgctgctttctgttttatgggaaatggctgtttttatgatgctttactaaatgtgtgtttaaacaatttcccattaagtaggggcatgatttctcttctaatctcagaaagagctactaaatgttatcctatcaatgtttgctgataggggccttattaattcctttgcatgtgaatctaatctcagaatttaaaattgggttggaattacagtgttcatttggtccaccctctgtccatgttcataggtttataggatcataaagtagagtgtttttaatccagagaagaggctagacttgcggtacttttttttttttccttttgtagagctgagactacagatcctcagcagtttaacctaaagagagacctcagacatgacttctctctatgctttctgaagtccagagaggcaatttttttttctccaggttctctagctgggagaatggagtcagggctgggtggaatgactcctgaccaccccatcacacctttaatacacagaagcgcaatcaatcccagttcacccaggggacaccatgtccagctaattgttggagttcaggcatttgcaggggaagctcaacagcaacaaagtggaatgaagggatgcttgaatcttgttgctaggagattaacgtgatggttaaggcgggcgctccggctgcacctgcccagactgtccatctgtttaattgacacacagtccattcggaaaatgctaacctctgtttgggggtcagttctcactccatggcagagactaatctcccatacttaactttagattatcttctctctgtcctaattactgtatcttgtttacttttgattgaatattctctttcttgtttttcttgtatatttttttttgttgttgtttccaaagcttaatgttagggaattaccttgccagatttctctagagcctcatcctgacactcttcagatttcaaaagcagttggatgtgattttagctctgcccttaccaatgcaaaaaaacgaaacctgcgtcagtttctttcagtaatggcgaaactgaagaaagccaagttatctctgttgaaaaatcatgtgtcttccacgagactaattgctaagcctagtgccgattttgtactgtttactattacaatttttttccttctctggttgaatattgtcccagaaaatgaaatgtaagtttaataagaacaacaatagctggggacacatgctaggtgtataattaatgttcctgataaatgtttaacagacttattatggctggtggtttataactgcacaacaaaatgacagcttgttctgtggaaatttatatttaccaagataggctctagaattaaggaagcgaacaatatttttttcccactttaacatttctaacgagttaaggaattattagaactgtcaattaaagtatttgaaagggcttcggcaatcattttatatttcataacactctaaggagagcaagtaggaattaaatatgctctgattaccattttatgccctctctgtgtaaaaggaagattacttgaatgaagaggacattatatggatttctaaaggttggttttcatggttctgttttcttttgtgaacaattgtagatcaacaagcgttttctcctgttttgaaaaactactgtcgctctctttgcagtaatgtgacttccactaggggagcaatcctattcctgggatattctaagaggtgcttgcccaacaccctgcaatctaaggatttcttggacccaagtgatactatgtgttgtgtaagaatgtcaggtcagtgacaagttataagtcagtccttcatggaagatgattattttaatattgaagacaaggtctctctctctctctctctctctctctctctcccctctcctctcctatactctcctctcctctcctctccctcttcttcctgaaaaggtctcactcatataccctaggatagctttgaacttgctatgtagtcaaccaaaatcgtgaactcccagttcaatcgtgccagtgttgggattacaggcagttgccaccatatttatttatgcagttctggggagcaaacctcttgcatgctacccagaactctagcagttaagctagctacacctccagatgctaggctaaagctttccaatgggttctactaaagtatgatacaagtagatagacagaaggcaagaaaaaaatgaaacccaagtgtcccatggaatttcactagtgaaatatctttttggcaactgtggtggttttaatgaaaaaaaaagtcccccaaagacgcatgtacttaaacacttggattccagttggtagcactttctagggaggtggttctgcagcctcgttagcaaacgacagggtttgagggatcatagacatcctctgcctctgcactgtgttgtggttgaagatgatgtctcttgacttgccactcctgcagccagctgccagccgttcctgatgcttctggtgatgcctccctgtcacaacgagctcttaaacttctgacaccgtagaggaaaataaactctttcttccatggattgcttttgaccatggtgtgtgtatgtgtgtgtgtgtttgtgtatgtttgtgtgtgaacaacagtaaagtggtaaatacagtaacttaacctaggtagaccatatcgataagtacagtaaacaggtgaacattaatctagtgtcagaaaccactgatccaggtatatgctcatcactcgatgggattttgttggagaaaataatgagtaagcgtgttatcattaacattttctactgttgagagctcaagtatgtgattgcagcaggtccacccatctttattgccttccttaaactgtcatactctgggcttccagatcaaatgcaagttgtaatttcagataagtaatgaggaatttgcaaactatgcctcatgtgatagtttatggaaaaattattattattatttttttaaaatctgaaattccaatctgaccactgccttgtattttatttattattgtatggagataatctgacagcctttctcaaatggtctatttgttgtttttgggcattgaaacctggtgtgtgtgtgtgtgtgtgtgtgtgtgtgtatgtgcattgcacatcttttgtgttagacagcactttctatctccttctacctgagtctatgtgggacatttttcaaggcatattgatacagaatttcccactcatttttgcttttattgaccatgagagtgaatgcagacccacatcaagcatggcctttgttcatcttcaggtaatgataaatcctgataagtatattattttgatagttacaagggtaagtaaagtataaggaaaatattacaatatttggtgaaagaaatcaagggacagagactagtaaagaggccttgcttgtaactgtgaatgtcactgagcactatagaaacacttctttcagtcatcatagggcagttctcttattttttgcccaattattagatttcataagctagcatctcagaaagaaaatctccaagtcccccccaccaaataacaagtgcttatgggaaaggaacacatatttctctccatgaggcactgttgaactcggcactcccagccaacactgtgagttggttggcctatggttggagaacttgagcttgcctgtggcttgagagggaacttgctgtttgaattgctgcatgtgtgcaaacaggcatggaagtgagggagagccctcatgcacagttgggttagtaggcaaatcatggtcacagtcaaaagtaacagttgctggggtacagacccagtaaatatccttgtgtggttttctatggtcggttctctgaaatctttttgataaaaacacagagagaaggaactctgagacagcttctttgacgctgttctgatgcaaggatgttaaagggttcccagaaacacattccaagacgtttctgggaaataaagttgtcctaaggctggaaatgtgccaccgtggtttccaggtgctcagaaaacatgtggcctcagcccatagtcgcccagcccagtggctcacaggtgagtaattggccccaagtatgagctgcagttgaagaaaacactggaattggggaagatagtgaaatccaaaaaaaatatggggagggagaagatgaaatctaagaactcttgtttggcttgtctctgggctttgtaatgttttacagcttgcagaacgaacttattggactataagagaattatgacctaataaaatatttgtaatgattgtcacatagaagagcaaggaggacatacactgttgatgttgattctcctctgagcacggctggacagaacagaagtgggaggtgggaatctatgctcttacactaggaggcttcccgttgcttctgatacaattgtgtggataaacacatcagaagatactgtctagaaagatggtgtttgtttaagacacagagtctggttaggctgcgggaatctatgctggggtggtggtggtggtggtggtgnnnnnnnnnnnnnnnnnnnnnnnnnnnnnnnnnnnnnnnnnnnnnnnnnnnnnnnnnnnnnnnnnnntggtggtggtggtggtggtggtggtggttgttgtggtggtggtggtggtggtggttgtggtgatggtggtggttgtgggggtggtggtggtggtggtggtggtggtggtggtggtggcaaagtagcatggatgctcccaaagtagcaggctaactttatttgctgctgttcctcaagctcaaaaaaaatttccctgttttataaagtttgttgactccctggacattctacaggttccctcttcttatctgttggagagcctgtcagcaggctgatttacagtgaccaacagagcctgtttgaaatgccctcactacacctgcttgatattccagagtctccagccagcttctatgggtggataactcagtgtattctctcactgagtgcatttagcttgaattgattgactaggtactgtccgctaagcactgttctaggccctgcaaggagaaaagctaaagaaaaccggaagtatgacccgatgaagcaaagaaaaagaagggaaggttttgtaggtctgaaatagttttagtttcctggactctatccacaatgacggagggggaggatttgaagaaaagaagacctgaggtagtgaactcacaataagtgtaattcacggatcatagccctgtccaagtcatcaagactggctggaaagaggtctgatacttacacagggttgtggagaaaaatatggatcaggtatggcacagaatgaacaagagattcctcaacagttcagatatcttccctcctcttgctaaagtggcctgtgtcagagtcagtcttattatcagttgctaacagaatggttcttcctgtggcaaagcccagtctttacagagtcacagaccaggtcctgtggcacctggaggcaggcacaaagagttctcgtagatgtggaagtcgagactaaacattcaaagttatgcttccttggtctttcctacagtctctaccaaaatcaagttcaaagggggaaaaatcatgtttccctgttggcataacaataacaaaaacagtcctgcttgattctcagaagacatagtgaggcactccagtgtaaccaggaactgtttacagatagatggtgtcacctgtagagaggcacgcacatggcttactagttagatgtcacagtgcgtgaaggttggcctgatgtgtggacttgtgatgattatctctgcaacttaggaaaaacaatgtgtttttaaagaacatctcaacctttttttcaagttcatgtccccagtgtcccttttgccctccagttgcacatgtcacagttctgccacaattaactgctgtttctcgcactgaatgcctgggctcttgttgttgtcctgatgggaacatcctttcttagggcttgtgagcccagagtgcacgtcagccattcagactcgatggcagtctgccgcagcttcacctcctgctcaattccactgcacagtgatgcacagagctccagattcactctgggatcctatacatgaggcagccagtcagtctgctgaatgtatttcactgggattctgttctgttgtagtacatgctctgttgtagtcctttaaagactgagaggttagatagtaaatgtggcccgacaagggccccatggccttctcaaagtccctatatgcaagagaaaactatataaaaacagagcttggtaggtcacacctatttagcaggattttctgaaccactctctctgagtctttagaagttactaaccatgtgacccggatggatcccttccttccttcttcatgccatccttcccttcaggtttagtttccttgtcttgcctcctattgctaaagtgacccatgtcagagtcagtcttattatcagtggctaacagaatggttcttcctgacagtcacctgtgttggcctgggtggtggtgtcatccctggttggaggagtcacaagaagacttaactgtgacattcccctctcctccaaagctctcgtatgcactctgttactcttaggaaagagttctgagaaatgggctgtactctccaggggctcattgaataaatcctagctggctgcagctgttcctgctggtcagatccatgggagagaagctcactcacacacatgtggtgccagaaggcatttaggaaacacagttgtaacctcccattttaaagatagaacgaggtttagggaggtttgcttatgttgtacagctgttattggataggtttctgtctagaccttgacaactttgactagaacttggtcatcccagtccattgtccttcttgctgcatctggaagttggtcacatttgcagccacagactctctgatgacatcaggttcccaaatgatttttttttaaaatgcaaaaattcccatttgcaattctggacatgcttgtgtgaacttttatgtgatgacatattgattctctctcctcggtgggattataaataaaacaatttatagttcgccctcaagagcaggcaggaggccagtgattaaaaggggctgtttggggtcattggtggtgagtgcctaagctctcacacaggactctgcctgtgtgcatttacccaggcacccaggctctcaggattccatgacctgcttcccgaggcagatgcttctcgctgtctctttcatattctctgcctctcctgttccccctttccctttacttcctatctctgtccactgctggcttgtcgtccacagctttcccctcagggctgtcaataggtgagtggatttcttaataatccagcacaaacacaaatgtattcctctaacatacatcacagtgcctgtggagattagactggaaatcagactttttaactctttgaagaggatggtgcagagtcaagctgccactccccctctattactttacctccttagtgtcctctgcacagcctgattcttgcctctttgggcttctggaccttaccattcattagcgcttataacagattggtgtgagtgagaaagggcaggtgatgaaactcaaattgggtcatttggttacacattagtaagtgacaaaaagataaaaagatattgagcaaatgggatttttcagggaacttgagaccaggcgactcttgtttcccattagtgtggaaaatcaacacttgcttgtattttggggtgaagacatttttcttaagtgagtggaaaaacctcttgacatttcacaaagagccttacttttgaatggagaatgctaatttgctttgtgcataaagacttttagaactcttacctgtgagcattaatggcacatcattttctatgtgcttgtgagttaaagttttccaaactgggtatagcgaggcatacctgttattcgaacacataggaggcagaggcaggaggattggcacaaatttaaggccagctgtggctacacaccaggccatccagggttacactgaaaaaccatgtctcaaaacatgaaataatatggtttattttaaaatcccattttaggaaacattgagacatgcatcaatgcatctcaggtccctaactccattttcatggaactcaatagagttttcaacctttgctctggaaattaaattaacattttcctctcagaacgttttattggccttgtaacaaataattacaggcaattactgatgggatttatgagtctgtggatgagctccgaggcaatgaccttgtttccagatgtgcaatctttgcctttggcttgcaatgcctttgggtggagctcccacgaatggtggtttgtggagtatcctgggcctctgggttcagacagcactggtccttagctccagagttcactgactacatgactggcgttgtggtcccttctctgtgactgggttaccttgcttcagaagcagctgtggttcgaacaatcttgtcattctcatggacttcaggaggaacgtgaacaaccaagatcacaggatctgtacctgtaaagaagagtaatttcctgggatctactcacccaagaggttaagaagtcctctaatagttgacaagggcacaggaatggagactgagtggggtctgtttcccattgtagaaatttcactcttgctgtacggtgcaggacagatgtgtgagataggagtggtgtagatgtggaattgggaaggcacaagaggataatcactttgagccacattcattcaagttgcaaatctttattagtcatccaactgtgtgtcatgcactaacgctaagctatggttcttcggcaggtaaagtaaccatggtatccgtcatgatgaaggttatggctgtaccatcaaacatataatcaataagcccaccaaggacgggctcatcagtctcatgacctatttacacttgtttctttgtgtaagtctcttcctaaagtactgggagacatgaagttcatatttcaagtggaaaaacagataataaaataaacatgcttagatcagactggatgtggagaagctgaaagttctgcttaggagataaagcagtaaaagcatagaaggtaaaagggagtcttatgtggaggggctaggaaagtgtctgtgggaagggggtgggtgctgtcccacagaggggggaataggttgcagagtagagtgtgggcatgtgaaagcggaattgatggtctagcagcatcagtgtgttagcatctgaagccgggtgagtggggtagcatgaggagagttgtcagaggcaggcaggagacagattgcaccactactttcacatcttgaaaagacctttttttatggtctggtgggaacccactgcatgtctgaataaggaagggtaaaatcctgagatatagaggaagctttaaggtctgtgaaaaaggggccaatggatcttgagctctttgaagggaaacaaacttgagcccagaaaggatggtgcctcagagttacccaggagtgagatggtccaggtagaggagacaataggtttcagatcctcagcaggttgtagggccacatggaaggcaggaggagaagctggctctctgaagaagccccaggttctgctttgttattttgctagagatctttgggtcattcaaggcatagtgaagagtagacaaaatcaacaattatcccatgggtctgaggcctagaagaaggcctgtaagggcaatgggtatgaccacacacatcttagttcctataaagatcatatgttgacacagaatggcaaagacttgaaggaagagccctgggtcctgtcatttagaagcctagccagggaagagcaaatcacaaagtgtgtagaggtgggttggttgaagagggggatgctcacaaagtaggtgggaggagctctggtgagggctgtcagtaatataagaattcagttgaggaggcagtgtgatctgagtgcttaggacatgtctcaaggatgacgtaaaactaaagcttaattttctgggggaagatgagatgaatacatgggacataaggtgagctatgtcagagatggatgtgagaaaatcttaagaaaaacagagaacagtgctggctagagaagaaaaatcaggaattgggatgaattctgctaatgaatttaatgatttttttaaaacttgccttcccttggtttctagcagtcttaagaacataggcagaaatgtgagagtctttgtatatgcatgttccagacacttttagaattttaatcattccaaagctggtccatggcttccttacctatatggtataggaaatgattgtgacaattcaatgtggagtagctggcggggagaatttgggaggtaaatggtcattacaattcaaactttatttcgatttctgaaacacaaacaaaaacaaggaataggaagagtattttgaaaaaaaaaaagagtttattaaatacgacaaggggttaaatacaggagtggtaagcatttattgaaaacctgctgtgtgtcacttaaaatacatgaactaagacatgatttgtgtcatattggagtttactatttatgaaaggaatatatatttacatttattactgctttactgtatattacagttgtcatctacttgtaggactagaaactgtggtgaatgccatgttgaagaagtggagggaattttgagtgtacaaagaacagggtaatggccttcataagaaaacacgaagttatcttaataacattcaattaaactgttttctaaggagtggacacttgttggttcttttgtaaaagaaaatctcttctggaatctaagactttctgcattaaatacatactaaaaaggctaggctagcagagtagtgataatgattttgaatagctggtcctactatttatgattggaaaaatagcagtgtttgattacactgagtttcatactttcctttggattaatgaaaatcttttcaattaatatttcttatgcaatactttaatcgattcaagagagtctgccctctagactttgtataaacgcttttagatcattttagtatgtattatattgtcagtgggatgaactcttgagaatacttagaaatcaattaatgtaatacaagtgcaaccaaagtgaggcaagtgggctcccagtttctgtaggtggatggtgttgcgtctccatctcttcttcctcctcttcatctttttcttcctctcctttgacctctttcttgcttttgtccacctttcactactactatcatcttctctcgtcattgtgctcgttgcaatgctttaaagatttctggactattcagtgagaaaggctattataagaaaaaagattttaaagcaattttgctaaacaatttatttatctttaattacaataaagggacaaagacctggttagtgtttgtgaggcttccatccagaaagataaagcctaacatgaacatgaagagggtaagagcaactgattttggttctaggagcataaaggaaagcaaggtgggcagggactctgaagctgagagagttaaagaaagatggatggtgacatagctgacaacttcctaccaaggacatatgaggctgacaatgccagatctgacaggtgcacggactagggctgggtagtgatcagcagaaagaggtgggactagtacctgtcacaaggcttgtctgttgggttgaatctagccataggcactcagatgatcccatgttatatgttatatgttatatgtcagatgatcccatgttatatgttatatgttatatgtcagataatcccatgttcacgactctgttggcttgtgtcaagttgacataaaactagccagcacacctactgttgtgatcaagtctagtgtagtcatcttccaatgacctattaatatgattaggtctgcactaaggtgtagacttttccagcacccaccattgtggtcaggttgactgtagactcatcctaactaccaccattgttatcaaatctattccaagacatagatgcctcttaatgattcagaattgtgataacttctgatcccagatatagatttacattctgctgctttgaattacagatgatcaagccaattgctgcacctggggcaacagccctatgtagaccattgtgcttgattgattttacccttgggatattcaagttacttgaatacctccgggagatgccatagggatttgcaacccatgggaaactctcctctcttctttcccctgatctagttgaagtttcatgacatctttctagaacaaggatgtgcccagttagtatgattgctgatgttatttgcatgatctctatcttggttgacacattgcataatggacagcaaacattcccccttcttctttggtgtcccttctgcttttgtagctgtgttcacagttgagtttttggtattctggagttatctcaatgtcacgtctaatgagaaacacattgctgatagcaggtatttgttgtagctctccagaattttcctgtttatttttatactgatagcttagacacagatttttacatattccacttatattgtgaaactggttgtgccacgcatccacttattgatccatctacttactgtcagtgcttgctgagtcagtatttgagctgaggcaccagagatggaaggcatccaacagaaagaatagtgtagctcttagcagaagaggccaagtccaggcaaaccactgatgtttagaacaagaagaagctatttcaaggctctgaacattaagagtggctgcaggagagggattagtgccaaataaaaccttaaaagtaccatcattcccccttacagccattgggatgactgcaaacaacaagagcgacaagaaaaatcaccaccaaaacgagccagctagagacaacaaatggaaagtgtttgtgctggttggaaatgtaagatggtggagccattatggaaaaactcatgacagatactttaatccgctataaatataggactagaaaaagagtaaagggcttactgagcaagcatggggacccgagttcaacacttgccactcctgtaaaccccagcatggtgtcctgtgtttgtaattccagtgctgaagaggtccaggcaggtaggtccctgaggctttcaacctatcctaacgggcaagttccaggtctcagtgaggcaaggtaggtggttcctcagggacagttcctgaggctgactcccacacatgcatatgcagacgtgcacttacacctacacccacaactatgcactaacatataaatagaattgtcttatgttctaggaattctgtttatgaatatctgaaagaattaaaatctgggttttgatgaaatatttgtatagctatgttcatataacatttttcacaataactgaaagctagaaatgacacacatacatatataaatatattatacatgtataaatgtttaaaatatatattataatatatacaaatatattgacatacatacaaatatgtatatttttatcaaaatatgataagtatatgctgtggtatattgttaagtttgaaaacggaaggaaattctagcgagtacatacctataatccataggttgaggatgtaggactatgtgtttgaggtcagcttgggctatataatgagttcaaggtcattctgggatagagaactagaatctattcccaaaacaaacaacagcaacaagctcatgcttttaatcagcaatcagaagggagagataggtgggcctctgagggtctgagaccagattggtctacattgtaagttctaggacagccagagctacatagtgaaactttgttttgagaaaaaaaggaagaaaaattgtaacacatgctaccacatgtatctatgtgaatggatctgaaggacactatgctacatatatatggcagaaccaaaccagtcagatacagtttgattccatttggcacagctgctagagccatggcacccactggatcagagtgtaggatgcctgagagaagctggggaagggcaaactagggattattatttaatgcatgcagctcagtattatgagatcaaacaatcctaaagactgtgcttcaacatgaacatacttaacacgtgagctgcttaatgcagtaaattttcttatgtgtatttaattgaagcccctcaaaattataaaacaaaaataaaaatacagagcagttgttctttggactatgtgggtattagagacagcactcctttgtaagttccccaggccacctgccatttttttttcttttccctaaagatttaagaccttcattaacaagtgcttgagttttgcttactttggtttgaaaaaaatgaagagagaaagaaacttggttgtaaacttttattacacatcaaaaatgaagttcttagatgatccatctggaccaagttatgaacaatttagaacctgagaaagactaggtttaagaaatgagtgtgtttgttatcaccccaaagacatgtctctagatgaaaatgccgctggctgtgtgctgcatagatgatgcagatggttgtgttatatggctaacaggtacaaagcaagcccatgggtcatcagctgtcgtctttggtctgttgcctgtcactaggattggaagtgcttctggattctttcttgctggcccacagtgaatggatgttggtggatctgtgttcctccctgtcccctgtagcctcaggtgggatgggtcagccattaggcagcctccttttgtcaatttaccctcttggtttccaggtgactcagtggtaccatggtgagagagtgctactgcccttctgtcccatcctgaatttttcatcctcttccttggtgcctgtctctaggctgcctttggccagtgagaagagcctccacagggtcatagtctgtagctctgtacacattgtcttactgggctacactgggcttaaggatccaccattcccctttgccaggaggtttgaaacactgtctcagtcctgtgatgtctctacctgcagaagggtgggagccttggtctatgataaggtggacattgttggactagtcctctgaacctcttatctttttcctgtcctcattttctggccattctgttggtaattgcagtcaggacacttgaggcagggatggatatctgttaatagctgtgatcagctcacttgaggcagggatggatggtgtctgtaatggttacacctggctccattgtcacttcctggtgacttactactgtatgtccctgtccctttctccttctgtggtgcaaattccagtctctccctctcctgcacctcaagctacttcctgaatctggtccctctggcaatctggagcacaaaacatcttcctttgtgtccttcctgttgatgaactgctgtgtgacagatttcctgaggagaggtaacactcaaataagtctattcaccccagcaagagagccaccaacagacctaagttatgactataccactgtccaatttggtgaactaatgagtttttattttttattggctcaactaacaggaatatgggcactggggtatttaccagcagctgtggtaactcaaaagcagctggtttatcagaaagcctaccgccaaatgggggagactccccaaaactgcaaccttggggcttgttctcaggtctaggcagtttataggtacctcctcactctaaacatcccccgtttcctcagtttggctggtcaatgtccacctcagcagttgctacttcttttttactgctgggtagggatcctcaagactctccatactttcaactcaccacctgtacctgttcattgaactactttgataaaacccaaaccttggttgtgacagccttggctcttcctggtgatggttgtgatggttgtgccgctgtggcggtagcttactctgctggcacagtgatggtgctctggagctgtgacagctacagttctggattcacccatccccccccccccccatgagcattactctgctctcactaccatcaaactccctgggtaacccctggcctccttaaaatgatccaagtgctgagtgcctgccattgacaggaaacctccttgataaagcaggcagcccagcatcatggtgtgtacaccacttatctaatagacagtgaaagagaatcacactggagatatttctttttactgcatgacaatttaatgggggaaagaactgtgtgatctatttttttattttttgtttttagcattcaacccagactcacaggcacctacaataggaggggccccagtttagtcagttagttttcttcagctatggtcgatgctatgccactgttcttgtttccatgtctctcggggccagatggaccatctatgatctttaattacttttgatacagtttaatgagagtttctatgagagttttgtatatcttattgtagttaatgatggaataagttattgtctctatagttttatgaatttgcgacatgctaactttttctcaattttccctatagtcccagactctaggtttcttttccagctgcttgtaaacaaaacaaagcaagggaaaacaaaaacctgtgtattccaaacactattttactatatatttacagctcgattttactgtatatagatggctgggagactatttgatacattagatctcttttcctgtgtatgccattcattcagttgttcattcaacaaacttgtactgaatgcctactgcctttaaccatatagtatgagactcagttaaaatcatatactgattttgcagaggactggagtttgatacccagcattcatagtgggcagctcacagaagcctgcaactccagtttggcggggggtatgatacctctgacttccataggtacctttatccatgtgtgtgcacatacacgtgtacatacaaacacacacatacaattaacaatagaaataaatgtactctatagtagaccatatgtttgtccatttcatgcttgttcactatctactcccatgacccaaggcatgagtgtctaaatttaaataattgcagctgcttcctactggcttgaatcatccataagatattaataagcaaacagtaaaaagatctgcggttggtaggggagttcaatactatgatgatgaaatggaaagtgatgggtaatagaataggaacaagaactggaagctttgagccaatgctctctaaggatcactaaaaagtaaagaaatcctatctgaggctgccagcctcagagctaagttatttagagtggaaaaagttggccaactcagatggactcaaaccaaggagccaatgttttgtgagttttatagccgatgtcatttacgaaccattaaaatattgtattcaatattaatgagggggaatagcagggaagggttatgaaatacgagctgaaaggaaagctaggcctttgaggggaggaccagtgagttcatgtggctttgctatttgggacatggtgggactatgaagcagggaaccaggagcttccttaaccaagaagtcctgggagcttagttgactttgaaagtctcacatgaacatttccacccacaatatctgtcaatctctttcacaaccatttctgaacattgtttttattcatctaaatattatttatttattatttgtaatattattacaaaatccagtgctgtgaaccagttccttcttttggaggtgttggccatgaggtcttatagatattcaaatagtatctgctattgtcattctccagtggctagagttgacattacaccctattgctctgcacaccacatacttgagtccttgaatcatagaatatggggaaagcaagtggtactgacttagactttccatccctacatctttcttagtcctggaagttgccatgcaaactactggagtagaaaaatcatcaccagtcatacccagctgtaaaccttgaaagcaacaatcattacaagccccgtaagatgagttcactggcgcagtagtggcacagatgtccctggagtaaaaaaacactttcttgttgaatttaagacctgctggacaagatgaaaaccgtatcagacaccattgctggggccaagaacttgtgttctgtgggttatatggcacagtgggcaacttttctactattttctaaagggacaaagtactaaattcagtccttaagtcttattgtgatagattagtatacctttcaaccttcatcagagaagcttctgtctatggttattggaaatcaatacagacactcacaattggtcagtatgtagatagtaagaggctatacagttcttagccctaagtgagacattggtatcatacttcctcccctaaggctcatgggccatgttggaagaggggcttgaagattgtaaaagccaaaggcaacaggtggcacataagaaactcatagtgcttgtgccagcatgcacaagctcaagctagacaataatccaagcatggggtggaaggagagcatgaagttctacccctagctgaagagctattgacaatttatagctgttgagaaagggagagccagctaactttaaggggatggcccctggtaggttgctgtagtagtttgaatgaaaatggcctccatagactcatatgtttgaatgcttattcactcgttggcagaactgtttgggaaggattaagagggctggccgtgtaggaagggttgtgatcatgtgctttgagattttaaaagtccacaccattctagttagttctctctctctctctctctctctctctctctctctctctctctctctctcctgcttgtggatcagatataagctctaagctactgctccagcactattcttgcctgcctacctactgcctactgtgatggtcacagatactaactttctgaaatcatgagctccaataaatgttttcttttgtaaagtcatagtgtctcttcacagtaatagacaaggaattaagacaattgcccacacttagaaggatgaccacacatccaggggttcatgactagtacaaactggctttgataggtttaatacaaaaaagtatacaagttaggtaggtaggaaagagccttgatatgctctgagaagagatgggagacagtgagtgaatatgatcagaatacaatgcctagggagctggaggggtggcttagtggttaaaggcactggctgttctttcagagaacccagcatctgcactgaaagctaaaaactgcctgtagttctacctctagagaatccaatgccttctgaactccaggtgtacttgcacgtctatggaccacacagacacataaaaataaaatatatcttaaaatatgtgaaggcttgataccccagtgtaggggaattccagggcagggaggggcagtgggtgggggagcaccctcatagaagcagggagagggaggatggggtagggggtttcttaggcaggggaactgggaaaggggataacatttgaaatgtaaataaataaaatatccaatgaaaatatatattgcatgacattctcacacaattaataaaatctctatattagtgaatgatctccataccagacactattctaggctttggctatgcatatccgattcttctaagtcattttcatttgtctgaacatgtatagtccgcatggggcctttgccaatctctttccttccaacgacccatttgggagtcctcttagatttctttttagctactctttcattttctctatcccaatcttcatataagttgacaaaaaatgcccccccctttcatacctaccactcaccacacccattctccgaccaagagattttggtaggggtggtccacttcccctcccgaaagtcctctgctcaagcccaaatccatgcgagcggtcctctggttggatttctctgtcccatttgacaaagtgaacgcaaactccttttgtaaagtgttcttaaagctgtttactcctccattttcttggttcctctagagctcagctttcttactatgcacattcagtttcattcctgggatttgctccttccacgaaggttttgaaggttggaataaccatctgtattctgaggctcttcccatcccatgtgcttgagtggtggaacacttgaagatgtaattgcagtgtcaagttgtaaaaaaaaacagtcaccctgggttgcccgataacaataacataaggatttgaattgatattgtttcttatgtgtagtttccatgggtcatcactgggtctgtgttctgaatccaccagctgctgtaggctttgtctcgctttcctgaagacctttcatatggtgtagattggaatgagacttgtctatcttcgttttgaattaattatgaatgtctgaaaaaaaagaagtttgttagaaacctgctagcattttgttattttatggataatctgttctggggtatgcagtccatttcttaaacaagtttgttaaaaaaaaatcaatttttcttcaaggttaatataacaggcaaataccttctgctgcatgtgtcagaaagagacaatggaagatcagtgtatattatgaatcgttatttcaaaatgtcagaataaagtgggtctgctgcatcccccaggtctcacattcttgagaggggaaggaaggcttgcttctcaaatgctaatggattcgctgtttttctcccatcccacccccaggtctaattctgacaatcgacgccagaatggccgagagagactgtccagcagtaacgagaaaggaaacatgatcatggagtctgccaaggagactcgctactgtgccgtgtgcaatgactatgcctctggctaccattatggggtctggtcctgcgaaggctgcaaggctttctttaagagaagcattcaaggtaatagtgtattgtctaaaaactgctctgtttatgccctaaaaacagcagagaacagaaaggaagacaaggtctttgtacagcgctatttgcacaacacatgaatatctagtaagtctctctgttctccttggttgaaacttggaaaagacacagactcccaggagaagtggtaatgccagggaagctgtggctaagaatttctgcttccccctggcaagataagacagctttgagcaactccactagaagaattggtaactgggtctctagtgtacaaggaaatgtctctggcttgatgcaggcatggcaggcatacattcttattctttctcagctaagcttatgtgatgtggccttgtccaggtaaatattatgttctgatctttactccagactgactctgattcaaattgttcttttcccgccctacatctctttcttgactcaatggatgacatgaccttttgctaacatgagcagactcaatgtctgctgccttatgagggacaccccatcagtactgtgtacttataaagaaccagctgtgccacctcattctcctgccttccttggtccctctttgtgtacagtttataagtgcagctttcctgacaagccaccagatacatgctgttgctcctttagaaaggccagtactgtcacacgatacagaattccactgggaaatgtcagtcatttttactccctaaggtgtgtgcactaaagtccttgacagggacagaggcccgatggtacttttgacttcttgaattcatctttttttccccccctagcagtggggtagttttctttcttctctcttctttacctttagagcttaaataaagcttagtgtagagctatgaaggatactcctgctgcagtgccttctacaaaatgccaacttaaggaacttgttgaaaaccagaacctgccacattaatagacactgacccaagaagagattctcaggaactttctgcctcgcctcttcagctctgatatgggctaacaaccaggggatggtgcacactatttatctttcctccacagctggaagaacattttaaaaagctgttcatatcttaatagagtagcctgtgaggtcaatgtggtccattttaaaagcattttccttgacacttattgctttcaacatcttttagaattctgctgtaagacttggactcctttgtctgtgttcctaaaaaaattaatgatattctctatagcaactctttgtatatatccctctgtttgagtgtatcacacacgaactattaattttattacctgatatcaatttaattcagaaaaataaaatttaaatctagttttaggtcagtataaactttatcaggcttttggcaaacatcttaatttgtggatttactttttatttgatttcatacaatttaaagtatcatcattttcaccaatcatatgcttacacaccacacatacacacacacacacaagcacatgcatatacacgcaccccccccccccaaatcaatgaagaaaatgtagccctttaaaaacaggaatttggactctagggaaattgctcagtgaataaaacacttggcacataagtgtgaagtttctagtttggattcttagagcccatgtaaaaatccaggctggtacagcctccgcctataatcccagccccagggacaggtgatacccaacccaagctggatagatagaccaattagaattagcatactctgctttcaacagaagacttccacctcagtaaataaataatttgaaaatcggttgataaaggcactttctgtcagctttagacctccacacacatgtcccccgaccatgtaaacacacacacacacacacaaaaaatatgattagtggatatgctcagctatacaactggataagtcatttagtgggactgggttttttcatcaacaaagtctattcagagcactggtcagaaatatttttgtttaaagggtcaaaatagtaaccattgcatggccatactgcctttgctgtagtcatttggattcaggactataggcagataagtgggtataatgaggagtagctgtgtgggacaatatgcaaataagtggaagtggtcatggcagagaacgtgcaaataaattggagtggcttcgtactcaaataactataactataggtaactgaccagatctggctagtggccttattgtgatctataatttaattcctgcttgcatatctataatctaagtgtcaatatttatgaaaggaggcttaaaatatttgttttaagataggtggcttttaaacctaaacttttgattattcatattttgtagtcacttagtctgcatttgtctggatgttctgaggggaagttaaaagtgtgagagacatatttaacaatctcaaaaagtttaaagttcatttggaaaagtagagacaacttgttttcatggtgcaataggcgagtaggtacctgtgggcagagtgctacctgggcaaagaggaagaaagaaaatgaggggaatgaaaaactcttgctgtgaacttaaagttgttgtgattgaaaggaacattagcaacactgtattcacatggtttccattatatctgtacacatttgtattgcaagcatgccaaataaagtacctcaaaacctggtattgactttaagcctcaagatcatcagagcagaaaacaataaaagagaaagaaaaatacacttgccaaaacagtgaagaaaatacaagcttaaataataaacatcttattagtatagcattatctcaagttcaaatatatttttaaaatttcacttcttttttgagagtcacaatatatacctattatctccgtttttatagtagagactaaatccgattccagtacaattgtaccatatgaaagagtaatttttacctgttttcagaaacttcctattcattgtggtgtagtcatgtgaaaggtttctgagacagggaaactattgagagcagaattctgaaagaagcctagaaagaaaggctgagttttagagatgccatgagacctaataacggttgaggtctctgtgtttattaagacatgcatatattgaacactcattcagacaaagcagagtacacagacctggagatgggaagacggggagaactggtgcctatttgcactgagcttataaaatagagtcagaaatgaataaacaaaccagcaattaagttgcactgtgacaaatgtgaaggatggggaatctaaacttcactcagtccctggaacagtgagtaagactctccgagaatttttactgattcaaattaactctgaagaacaactcaggagagtgaagtggagggggaggcaagggtgggtgtttagtcatctgtccacacccagacagactactgaggtttccaaagtaacagttgacaatgttaacttaccatcatttaaaataatgatgtttctgagactgtgtcaaggagcgatgcttccttccttttccatctcgatagtgtttctatatactttatctgtttccaactccacaaaagaatatactaggcaagtgcaaaaaggtttccaggcctgttttcttacctgagtcttgataactgggagcaaaaagttttcctgaactcctgtggctgtttataaatcacagtgaccctcaaacacacttaaggacagtgaagggtctgactcgtgggtggaaagtcctgaagatggtgaggctttgcctattttccttgtcacttaagaagagagctagaaagaagtatacatcagattattctctctctctctaagtgttttggttgaagaggcaaagtgtttgacttgaaagcatacacattttcatcccttacttagggcacaaacttgattacttaaggaattgagtaatggcttcaggtaaatgtatttcttaaagcaaaataaaggatccaatttaagctagagggatgaaactgaatattgtctttattaatcctcgcaggcttcaaattgtatctttgcacagtgactgtagactgagtaacctgatcagattttagctttagctactaggtgtgctcctgggttccttttggagggagaatggattttataagatcgctggtcctctctcattggaatcccagaaggcaacagggcacagtggagaccaagtctatgtatacaccattgaactatacgatcacttcacagtctaagagttgtgagtagaagttgctcattattgagttagacacacatgatgaaggcatgtattaatttacaaggtttctgggataagggagaaatggtttcaagatgatgtctggtgaaggttaatatgatggggatcttgaattcaaagaggacaacagagagagagagagagagagagagagagagagagagagagagagagagagagagagagagagagagagagagatccacctgggctttagaaagcttcaggaagaaagcatccagcaccctggatagctcctgcaacagcagtggtgggaaacagatttgcttttctcaaagaccaaagtgtggacactttgccccttcttagaattgggaacaaaacacccatggaaggagttacagagacaaagtatggagctgtgatgaaaggatggaccatctagagactgccatatccggggatccatcccataatcagcttccaaacgctgacaccattgtacacactagcaagattttgctgaaaggacccagatagagctctctcttgtgagactatgctggggcctagcaaacacagaagtggatgctcacagtcagctattggatggatcacagggcccccaatggaggagctagagaaagtacccaaggagctaaagggatctgcaaccctataggtggaacaacattatgaactacccagtaccccggagctcttgactctagctgcatatgtatcaaaagatggtctagtcggccatcacttgaaagagaggcccattggacttgcaaactttatatgccctagtacaggggaatgccagggccaaaaagtgggagtgggtgggtaggggagtgggggggagggtatgggggactttttgggataacattggaaatgtaaaggaggaaaatacctaaaaaaaaaaaaagaactttagacttggggctgaagagatggctcagtggttaagagcatccactgtttgctcttccagaggattctggttcaattcccagctctcacatagcagttaataactgtctgtaaactccagttcaagaggacctggcaccctcacacagacatacatgcaggcaaaacaccaatgcacataaaaataaatacatagtttaagaacttcaggctcacttagcaggctctgtgtacttgtagagatctgtttctttaatcttggggactcacctctgtccactcaagaggggctgtgctcacacttcttttcaaattagttttctctctctgagtgcattcatgtgaagagtaggaggaatactagaagagccacccatttcttcacaggattattttatttctgagatctttttagagatatgtctgatcctatccactcccagcaaatagtaagtctttgttctcaacatttccactcatgaccctctctagtctgtaacagccagtgagatccttttgattagttgaatcgtatgattttttgagcttaaaactcctagtgtccttagattcaaacctcctttattggggctgaagagatggttcaatgatcaagagtgcttactgcacagacagtttggttctcagaacccacattaggcagttcacaactacctgtaattctagcttcgagggatctaacaccttcttctggcctctgtggatatctacatttatgttttacacacacacacacacacacacacacacacacacacacacacacacacacatgagagagagatagagagagacagagagagagagagacagagactgaaagacacagaaagagagacagagagagacacacacagagaaagttaaaaaccttttatatgatttaattattcctgcctatttcaactcctgctaatgtctgcccattcactgtaattcagctgcattgatattttcttttcttttctttctttctttctttctttctttccttttttttttttttttgtcctcaacacaacaatgattcttcaggacccgagtaggtgtggtcctctcagttcctttgcttggatcatcctgctgttttcttgcccagtttcctcctttgtacatgtatgaggtgtgcatgaacatattcatatggatgtgggtacgtgtgaatatgtatgcacatgcatgcacgtgcgtgtttgtgtgtgtatcacactcactcttcacattgttttgtgagtcagggtctcttgctgaagctggaactctgttttggctactctggctagtcagattcacttgtggattccctgtctctgtcttccatgtgctgggattataagctggctatctcacatgggttagcttagtagggaaggtgtcagtgaaagtgttatatgtgataggtttgggaaaaaaactaaagatttctcacaagcaggaaaaattttggcacaggggttggagaagtggttcagcaattgagagcacttttatgttcttgcagaggacctgggttcagctcgcagcattgatatggcggctcccaactgtcagtctaggtctagggtacacgaagccctcgtctagcctctgcaggcatcatgtaagccatgtggtgaacgtacatatgtgtaggcaaaacatttatccacagaaaacaaaaattaaaaaagattttggaacagaattttaggcatgtggaaaaggatagatggagaagttgagtaagccagccgggaacaacctggggcttagcttactgcctttggcttatttattccatttttagatctgtaagtgggtcctatctccatatctgcttctgccttccctttcttctttcttctcccaagttttccaggattttgttcccatccaatacggacttaacagtgaccccacagataagctgcagataccctaacatctcatacaccagaatgtgacacatctggaaaataaggttgtagaaaacaataatttatcagtgaagtcattctgaggcacaggagcttttaacttaatatccctgatatccttgtgagaagaggggggtgtggagacagccatgtatgatggtagaaagagatatatcgaagtgatatatctacaaagcaaagaacaaaaatgctcattggctaatcccagaggcacacaaagcttgctcggctccacacacacctttatttcagaattttacattgtatccctaggagacaatgtatttgtgtaattttaaggaactcatttgtgatgctttattatggtagacataggaaagcaattctatacttaaagcccagtgttttgtgatttggtaaatatctcctaaatcgacccctatctcatcctgacttgccaattactctgcgctgattcttttttaccaccggcagctgctggctaggaggcacgcccgttctttcaccactgtctcagacagccctcgtctctaacgtttccagcagaaatcttggatatttctaatgagtttattgcttaaacatatacccacccaattcccattattcagacttggctcctttgcccaagataatcacagcatgtcagtcagtctgtctctcctacaccatttgtttgttttgtttttcctttcctgtgagccattctgcacactgtctttctattaatattctcaaagaaaaatcactaatcttgtcagtccttcgtacgaaatcccttaatgagttctactgctcaaagagtagtgcttagacaacactgtgaggagtcacctatgcatatcttgttctagcttttgttttgaggtgttctaaagtcactatctgtacttacttgtatgtgtctgatatgacacacgctagattgttcatcagtttattggtcagaattctggcccagtctttcccccattaattaattaactaattaattaattaacttacatcctgattgctgccctcctggcccctcttacacattccttttccccatcttcattcccttctcttctgagagtatggagtgctccctgggtattcccccactctggcatgtaaagtctcttcaggtccagctgcattctctcccactgaggtcggacaaggcagcccctgctccagttgttgggggacctgcatgaagatctagctgcacatcagcacacatgtacaggggatctaggtccaggtgtgtattatgctcttttgttgatggttctgtctctgagagcactaagggttcaggttagttgactctgttggtcttcctgtggagttcctatccccccaggccccccagttcttcccctaactcttccataagactccccaagctctgtccaatgtttggctgtggatctatgcatctgtttcagtcagctgctaagtagagcctttcagaggacagttatgctaagctcctatctgcaagcataaccaagtatcattaatagtgtcaaggattagtgtttgcccatgggatgagtctcaagatgggccagttattggttgtcctgctaggtcttaacctgtaaggattcttaaactcattaagcatgactgtcaaaaacaatctcacacactggttcataagttctctctcttctggctcctccacaagacactgttttactgggttgcatacatttgtgtacatccgttcttctcattgtgacggtgaactcctcagaggttggtacaaaattaagatttcctctcaatgagcagacggcagcacagacagggttaagattcacttgggttggtttaggtaaagcaaagccatcagtttcaccagtgaggtgttaatatggcacaatagtttctgataaagggtagactgtcagcagcacgtttttcaatgagagatggaaaacagcagagaatgggagaaaatggaggcatcgagataaatagggtggtagtcagctcacccaagtgctcaaagatacgtggtgtttgtaaaatgggacaaaaggaaatagaatggaaggcccaatgaaataatgtatattgtattaaagtgaattaaacattttataatagtggaaagagtcaatgatgttcaaaggggaatgaatgaacagggaacattaagagccaggccaattaactcagatacaaaggaagttcaatgctagacatgccaagttggagatagatgatagctaggtacacagagagccagcatatcttttttttttttttgcttctagtctccaaaggtatttattataggttttttgaagaaaggtgttcatttttatgactgttgtgacacagtgctcaaaaacctttgaagtacaatgatcaatcggtatttgtacacatgatataaaaatagtatgctgattgattggaggtgaggttccatcctccaatctgcagatagtaatacatgaaaatcaaaaggaaatcgaagattaataagaccagtctttgttaagacatcataacttcaatcagagtaggattttgatgcccaagaagatggctgcaaagcttagaaactcataaagagaacgaattttgaaaagattataaaggatgagacagttgctttgcacattataaaaaagaaatcaaagctagttttaatgtctttccagcaatgtagaaagattcttatatgcatgtatacatgaagatagatgcaaagatagtcattgaagcactttcataatggagaccacctagtcacgaaagtcactactagacagtaatatattcatacagtgcaatagtattgtgacacgaattgataagccagcatatcttgatacacagagatattcagcagctacaaaatagaactgacactctgctctaattcacggatgggattggagtcattttctcaattaattttaaaggaagtggcagagaagaatggctttgttgtgaagatggcatgctttaaatgatgaaaaagtaggtgtcaactagcttccattgctcagaaactaccaagattatgaacttaaagagaggaagggtttgtcttggcttccagtttcagagatttcaatgtggggtcagctggctagatcacttttggagatagagaaagcactgcattatggcaggaacacacatggtagaggaggcctatcaactcatggctggaacagagagaaagaacaggcatgtgtcccatatctgcctcaaaggtataccctaagtgagtgactggaagatttcccactagcctctattttataagtgctccaacacctctcaatagtgccatgagcttcaggccaaacctttcccatgtgtgcctgtaggatacacttacccaaatcacagtagaaactccaaaatcttccttttgattctcagaatagcatgttaaaagacatttctagatcttcttgaaaccttgtgaaaatatcatcttcattaacaaaagtatgttcacaagaacctactggacaggaaaatcatgatttacttaacaggaccatgtggtgcactttagaatgttaaggttaaaaatcactatcctggtaccgacacactaagctgtacaaagtgaagtacaggaacaatgtgagcatttaaatgatgctgatgaagggactcagaccctggtggtttctgaaggtgagttaggttgtgggagttcattgtcccctcttgaggctcagaacttgccgaatccttgacttgtcagaattctgtcttaattgttcatcttgagacaacatgcatactgtgctgtaaagggacaagactatgtaaaccaaaggcagagagcataaatctgcacacagaggaaactttcaagggaaaaaccttacaatgaaccttcctcaaagacaggtattagcctcaggtactgataaatttgctaggtgtttggctcttgattctcattagagagaaagaaagaaagaaaccttcttctgtaaagtcacaggactgatcttattaatgttttgttgtaggcagcattttaatggtcatgatcctcctgcctccacctcctgagatctgggatgacaaacaggtgacaccacacctaaccacattattgattttaaatgcttgtagctctccactctgatagttagctagattaggttagacttatgcatatacatctgcatcgatctatggatctagagaaatctgtaggaagagaagtcacactcttctacctgagagatgacgttgcttctggtccattattttcctttctttcttccttttggccaagtaatctttatcttggagataattaagataaaattcctctgacaaatgaaatcagtatagattcctgtttcttggcagcttttatggacatagctgaggctttcagtagactttaaaaaccatggcaacaaatgccttcgaagggtaatcaaaggttccaaatggttttaatcgctggtggttttttcttttcttttcttttttaatgctaccacttggagtattcttcttctttttcactttttgttcatctgattgaaattaaatttccaatttccctactaagtggttctcttctggtcatggcactgactatttccattaaagttgtagcttgtgcccatgtgtagtgcttaagctcatcaacaatccattaaaaagccccatttatgaatggcaataattttccacaaaaattatagacagcctttaatgggcacatattcaaagggtattaactaaccctcaaaattattggctacattgtccttacaagccttacagtgatggtctagagccacaatcctccctaaattctctgttctttgtagaaaatgactgttgacacctttatatcctttaaaaatgaaagtcttgttctcagacatccactcactcagaggaaagtataatttgaagaataggaagatcatttctgggccacatcctatgctattgctgcaccaaacatgcaggcaaaactgttattgcctggatgtttttgtggggaaaaatatcattcacaagaacaatctatttcataaatctgctgtccaggtgtagaacctctttttcttccatgttaagcctgcagcatgtgtgggttagcgagcagaagatatccatggtccgaagaaagacacagggaagggaggattgctgtttcccccacatgtccaccttcccctagatgaaataaaaatactttagtcttcatttgctaagaaacaaggaatggaaaacacaatttaattattaaattacaacttctcccccataatgggcactcattttctctatttgttttgagaaggagtaaatggattttaaattttatccaaatgtgcattatccttatttgatgcacttgtcagtttcagaccatttgtactaggacgtaaagaatgaatgagattgaatggaatccaattacttacaaatgcctgggtgagtgactgggttatgtttataaatatgatctgtgtggttaaaatgtaaatgcaatcattttaaatgtggctagccctctctaaggtccttcactgagcaatgcacaagatattctccttatagtccatagaagatatattatagttcataaggtgatccaaatttgtaattatttgttcttttgacaccttggaggtggtttcttctgatttctagcacctgaaacactgtttatgctctcagagctgctgtagattcgctgcacccccactctctctcttccaattccctactctccttccttcttccttcttagcacttatacccacgagcactttcctgctcatgttccccaaagcctctttcccagagaggactaacttgttgagttaaggaatttatattttcctgttgcctttatgcaacagatatttattttctgtcatttcatagtagcaccatgagaaatttaagaatacaacatgtgcaatctaatgaaggattcagctggtcactgatagaagactatgctaaatcacacaagatttaaactcagcactagaagagatgccccacggctttggggatggagaagagactcttattgaaaggttaggagttcagagtcggagtgagaacacttctctagaataaactagacaactctatggaagaaatagtgagtcaactagcatctgtccgaagcacattaaagacgtctctttcattgttaatatcctgtaatttgcatttagtcattatttgcctagtcctgcatggtcgttgtagtagtacaacattagatagtatgttagaaccctctatgctttaaagctacttgtcacatagattctaacacattctggctgtatcgctctctcaatgtcatgagtaataagtctctaatgacaaatccagaatttggctggtgcgtatttctgggctgtgtgagcgatatactatttcaacttagttttaaagcttaacatgggaatagtattaataaaatattaagatactccctccactgtagtaatagataatgtagcgatggtggaaataaaagtactatgttttattatcatatagagaaaagcagttggttccaagtaaagagttgtttgggcaattataacttagagcctgtgacttttaatgtttgtgatactcttgatcttttccttggttatttatggagggtgtttgtctaaaaattctgtgtgtgtgtgtgttgatgtaacaatgtgtttctctgtgtgtgtctgtgtgcttgtgtttctgtgtgtcttggtctannnnnnnnnnnnnnnnnnnnnnnnnnnnnnnnnnnnnnnnnnnnnnnnnnnnnnnnnnnnnnnnnnnnnnnnnnnnnnnnnnnnnnnnnnnnnnnnnnnnnnnnnnnnnnnnnnnnnnnnnnnnnnnnnnnnnnnnnnnnnnnnnnnnnnnnnnnnnnnnnnnnnnnnnnnnnnnnnnnnnnnnnnnnnnnnnnnnnnnnnnnnnnnnnnnnnnnnnnnnnnnnnnnnnnnnnnnnnnnnnnnnnnnnnnnnnnnnnnnnnnnnnnnnnnnnnnnnnnnnnnnnnnnnnnnnnnnnnnnnnnnnnnnnnnnnnnnnnnnnnnnnnnnnnnnnnnnnnnnnnnnnnnnnnnnnnnnnnnnnnnnnnnnnnnnnnnnnnnnnnnnnnnnnnnnnnnnnnnnnnnnnnnnnnnnnnnnnnnnnnnnnnnnnnnnnnnnnnnnnnnnnnnnnnnnnnnnnnnnnnnnnnnnnnnnnnnnnnnnnnnnnnnnnnnnnnnnnnnnnnnnnnnnnnnnnnnnnnnnnnnnnnnnnnnnnnnnnnnnnnnnnnnnnnnnnntatgcagctagagtcaagagctccggggtactgggtagttcataatgttgttccacctatagggttgcagatccctttagctccttgggtactttctctagctcctccattgggggccctgtgatccatccaatagctgactgtgagcatccacttctgtgtttgctaggccccagcatagtctcacaagagagagctctatctgggtcctttcagcaaaaccttgctagtgtgtgcaatggtgtcagcatttggaagctgattatgggatggattcccggatatggcagtctctagatggtccatcctttcctctcagctccaaactgtgtctctgtaactccttccaggggtgctttgttcccaattctaagacggggcaaagtgtccacactttggtcttcgttcttcttgagtttcatgtgtttagcaaattgtatcttatatttgggtattctaagtttctgggctaatatccacttatcagtgagtacatattgtgcgagttcctttgtgattcggttacctcactcaggatgatgccctccaggtccatccatttgcctaggaatttcacaaattcattctttttaatagctgagtagtactccattgtgtaaatgtaccacatattctgtatccattcctctgttgaggggtatctgggttctttccagcttccggctattataaataaggctgctatgaacatagtggagcatgtgtccttcttacccattgggacctcttctggatatatgcccaggagaggtattgtgggatcttccagtagtactatgtccaattttctgaggaaccgccagactgatttccagagtggttgtataagcttgcaatcccacccacaatggaggagtgttcctctttctccacatcctcgccagcatctgctgtcacctgaatttttgatcttagccattctgactggtgtgaggtgaaatctcagggttgttttgattagcatttccctgatgattaaggatgctgaacatttttttnnnnnnnnnnnnnnnnnnnnnnnnnnnnnnnnnnnnnnnnnnnnnnnnnnnnnnnnnnnnnnnnnnnnnnnnnnnnnnnnnnnnnnnnnnnnnnnnnnnnnnnnnnnnnnnnnnnnnnnnnnnnnnnnnnnnnnnnnnnnnnnnnnnnnnnnnnnnnnnnnnnnnnnnnnnnnnnnnnnnnnnnnnnnnnnnnnnnnnnnnnnnnnnnnnnnnnnnnnnnnnnnnnnnnnnnnnnnnnnnnnnnnnnnnnnnnnnnnnnnnnnnnnnnnnnnnnnnnnnnnnnnnnnnnnnnnnnnnnnnnnnnnnnnnnnnnnnnnnnnnnnnnnnnnnnnnnnnnnnnnnnnnnnnnnnnnnnnnnnnnnnnnnnnnnnnnnnnnnnnnnnnnnnnnnnnnnnnnnnnnnnnnnnnnnnnnnnnnnnnnnnnnnnnnnnnnnnnnnnnnnnnnnnnnnnnnnnnnnnnnnnnnnnnnnnnnnnnnnnnnnnnnnnnnnnnnnnnnnnnnnnnnnnnnnnnnnnnnnnnnnnnnnnnnnnnnnnnnnnnnnnnnnnnnnnnnnnnnnnnnnnnnnnnnnnnnnnnnnnnnnnnnnnnnnnnnnnnnnnnnnnnnnnnnnnnnnnnnnnnnnnnnnnnnnnnnnnnnnnnnnnnnnnnnnnnnnnnnnnnnnnnnnnnnnnnnnnnnnnnnnnnnnnnnnnnnnnnnnnnnnnnnnnnnnnnnnnnnnnnnnnnnnnnnnnnnnnnnnnnnnnnnnnnnnnnnnnnnnnnnnnnnnnnnnnnnnnnnnnnnnnnnnnnnnnnnnnnnnnnnnnnnnnnnnnnnnnnnnnnnnnnnnnnnnnnnnnnnnnnnnnnnnnnnnnnnnnnnnnnnnnnnnnnnnnnnnnnnnnnnnnnnnnnnnnnnnnnnnnnnnnnnnnnnnnnnnnnnnnnnnnnnnnnnnnnnnnnnnnnnnnnnnnnnnnnnnnnnnnnnnnnnnnnnnnnnnnnnnnnnnnnnnnnnnnnnnnnnnnnnnnnnnnnnnnnnnnnnnnnnnnnnnnnnnnnnnnnnnnnnnnnnnnnnnnnnnnnnnnnnnnnnnnnnnnnnnnnnnnnnnnnnnnnnnnnnnnnnnnnnnnnnnnnnnnnnnnnnnnnnnnnnnnnnnnnnnnnnnnnnnnnnnnnnnnnnnnnnnnnnnnnnnnnnnnnnnnnnnnnnnnnnnnnnnnnnnnnnnnnnnnnnnnnnnnnnnnnnnnnnnnnnnnnnnnnnnnnnnnnnnnnnnnnnnnnnnnnnnnnnnnnnnnnnnnnnnnnnnnnnnnnnnnnnnnnnnnnnnnnnnnnnnnnnnnnnnnnnnnnnnnnnnnnnnnnnnnnnnnnnnnnnnnnnnnnnnnnnnnnnnnnnnnnnnnnnnnnnnnnnnnnnnnnnnnnnnnnnnnnnnnnnnnnnnnnnnnnnnnnnnnnnnnnnnnnnnnnnnnnnnnnnnnnnnnnnnnnnnnnnnnnnnnnnnnnnnnnnnnnnnnnnnnnnnnnnnnnnnnnnnnnnnnnnnnnnnnnnnnnnnnnnnnnnnnnnnnnnnnnnnnnnnnnnnnnnnnnnnnnnnnnnnnnnnnnnnnnnnnnnnnnnnnnnnnnnnnnnnnnnnnnnnnnnnnnnnnnnnnnnnnnnnnnnnnnnnnnnnnnnnnnnnnnnnnnnnnnnnnnnnnnnnnnnnnnnnnnnnnnnnnnnnnnnnnnnnnnnnnnnnnnnnnnnnnnnnnnnnnnnnnnnnnnnnnnnnnnnnnnnnnnnnnnnnnnnnnnnnnnnnnnnnnnnnnnnnnnnnnnnnnnnnnnnnnnnnnnnnnnnnnnnnnnnnnnnnnnnnnnnnnnnnnnnnnnnnnnnnnnnnnnnnnnnnnnnnnnnnnnnnnnnnnnnnnnnnnnnnnnnnnnnnnnnnnnnnnnnnnnnnnnnnnnnnnnnnnnnnnnnnnnnnnnnnnnnnnnnnnnnnnnnnnnnnnnnnnnnnnnnnnnnnnnnnnnnnnnnnnnnnnnnnnnnnnnnnnnnnnnnnnnnnnnnnnnnnnnnnnnnnnnnnnnnnnnnnnnnnnnnnnnnnnnnnnnnnnnnnnnnnnnnnnnnnnnnnnnnnnnnnnnnnnnnnnnnnnnnnnnnnnnnnnnnnnnnnnnnnnnnnnnnnnnnnnnnnnnnnnnnnnnnnnnnnnnnnnnnnnnnnnnnnnnnnnnnnnnnnnnnnnnnnnnnnnnnnnnnnnnnnnnnnnnnnnnnnnnnnnnnnnnnnnnnnnnnnnnnnnnnnnnnnnnnnnnnnnnnnnnnnnnnnnnnnnnnnnnnnnnnnnnnnnnnnnnnnnnnnnnnnnnnnnnnnnnnnnnnnnnnnnnnnnnnnnnnnnnnnnnnnnnnnnnnnnnnnnnnnnnnnnnnnnnnnnnnnnnnnnnnnnnnnnnnnnnnnnnnnnnnnnnnnnnnnnnnnnnnnnnngagttccttaatccacttagatttgcccttagtacaaggagataggaatggatcaattcacattcttctacatgataactgccaattatgccagcaccatttgttgaaaatgctgtctttcttccactggatttttttagctcccttgtcaaagatcaagtgaccataggtgtgtgggttcatatctgggtcttcaattctgttccattgttctacttgtctgtctctataccagtaccatgcagtttttttttttgttttttttttttttttggttttttttttttatcacaaatgctctgtagtacagctttaggtcaggcatggtgattccacagaggttcttttatccttgagaagagtttttgttatcctaggttttttgttattccaaatgaatttgcagattgctctttctaattctttgaagaattgagttggaattttgatggggattgaatcgaatctgtagattgcttttggcaagatatccagttttacaatgttgatgccaatccacgagcacgggagatctttccatcttctgagatcttctttaatttcttcttcagagacttgaagttcttatcatacagatctttcacttccttagttagagtcacgccaaggtatttcatattatttgtgactattgagaagggtgttgtttccctaatttcttctcagcctgtttatcctttgtgtagagaaatgccattgacttgtttgagttaattttatatccagctacttcattgaagctgtttatcaggcttaggagttctctgggggaatttttagggtcacttatatatactatcatatcatctgcaaaaagtgatattttgacttcttcctttccaatttgtatccccttgatctccttttgttgtctaattgctctggctaggacttcaagtacaatgttgaataggtagggagagagtggacagccttgtctagtccctgattttagtgggattgcttccagcttctcaccatttactttgatgttggctattggtttgctgtagattgcttttatcatgtttaggtatgggccttgaattcctggtctttccaagacttttatcatgaatgggtgttggattttgtcaaatgctttctcagcatctaatgagatgatcatgtggtttttgtctttgagtttgtttatataatggattacgttgatggatttccatatattgaaccatctctgcatccctgggatgaaacctacttggtcaggatgtatgattgttttgatgtgttcttggattcagttagcaagaactttattgaggattttttgcatcgatattcataaggaaaattggtctgaagttctctatctttgttaggtcgttttgtggtttaggtatcagattaattgtggcttcatagaatgagttgggtagagtaccttctgcttctagtttgtggaatagtttgtgaagaactgggatttgatcttctttgaaggtctgatagaactctgcactaaacccatctggtcctgggcttttttgttttggagattattaatgactgattctatttctttaggggatataggactgtttagatcattaaccttatcttggtttaactttggtacctggtatctgtctagaaatttttccatttcatccaggttctccagttttcttgagtatagccttttgtagaaggatctggtggtgttttggatttcttcaggatctgttgttatgtctctcttctcatttctgattttgtaattaggatgctgtccctgtgccctttagtgtgtctggctaagggtttatctatcttgttgattttctcaaagaaccagctcctcgttttgttgattcttgtttccacttggttgattttgcctctgagtttgattatttcctgcagtctactcctcttgggtgaatttgcttccttttgttctacagcttttagctgtgttgtcaagctgctaatgtgtgctctctctagtttctttttggaggcactcagagctatgagttttccttttagaaatgctttcattgtgtcccatatgtttgggtatgttgtggcttcattttcattaaactctaaaaagtccttaatttatttctttattccttccttgaccaaggtatcattgagaagagtgttttttttttttttcagtttccacgtgaatgttggcattctattatttattttgttattgaagatcagccttaattcatggtgatccgataggatgcacagggcaatttcaatatttttgtatctgttgaggcttgttttgtgaccaattatgtggtcagttttggggaaggtaccatgagtgctgagaagaaggtatatccttttgttttaggataaaatgttctgtagatatctgttagatccatttgttttataacctctgttagtttcactgtgtccctctttagtttctgtttccatgatctgtccattggtgaaagtggtgtgttgaagtctcccactattattgtgcgaggtgcaatgtgtgctttgagctttactaaagattctttaatgaatgtggctgcccttgtatttggagtatagatattcagaattgagagttcctcttggaagattttacctttgatgagtatgaaatgcccttccttgacttttttgatgactttggtttgggagtcgattttattagatattagaattgctactccagcttgtttcttcataccatttgcttggaaaattgttttccagcctttcattctgaggtagtgtctgtctttttccctgagatgggtttcctgtaagcagcaaaatattgggtcctatttgtgtagccagtctgttagtctatgtctttttattggagatttgagtccattgatattaagagatattaaggaaaagtaatcgttgcttcctattatttttgttgttaacgttggcattctattcttgtggctgtcctcttttaggctaattgaaggatactttcttgttttttctagtatgtggtttccatccttgtattgtttttttttttttctgtaattatcctttttagggctggattcatggaaagataatgtgtgaatttggtttggtcgtggaatactttggtttctccatctatagtaattgacagtttggctgggtatagtagcctgggctggaatttgtgttcttttagtgtctgtttaacatctgtccaggatcgtctggctttcatagtctctggtgaaaaatctggtgtaattctgataggcttgcctttatatgttacttgaccttttccccttattgcttttaatattctatctttatttaatgcatttgttgttctgattattatgtgtcgggaggaatttcttttctggtccagtctatttggagctctgtaggcttcttgtatgttcatgggcatctctttctttaggtttgggaagttttcttctataattttgttgaagatatttgctgaccctttgagttgaaaatcttccttctcatctactcctattatccgtagttttggtcttctcattgtgtcctgaatttcctggatgttttgagttaggatctttctgcattttccattgtctttgattgttgtgccaatgttctctatggaatcttctgcacctgagattctctcttccatctcttgtattcttttgctgatgctcgaatctatagttccagatttctttcttagggtttctatctccagcgttgcctcactttgggttttctttattgtgtctacttccctttttatgtctagtatggttttgttcatttccatcatctgtttggatgtactttcttgtttttctataaggatttgcaactctttagcagtgttctcctgtatttctttatgtcagttatcaaagaccttcttgatgtcttctaccatcatcatgagatatgcctttaaatccgggtctagatttttgggtgtgttggggtgccctggactggcttaggtgggagtaatgggttctgatgggtcttgatttttgttagtaagattcttacatctgcctttcaccatctggtaaactctggcgtcagtttttattgttgtctctggttagagcttgttcctctcctgattctgttattctctactagcagacctgggagactagctctgtcctgggtttcagtagtcagaacacactcttcaggcaagcttttctctttcagggaaggtgtacagatatctggcgttcagacttgcctcctggcagaagatgaaggacggaaacaggacccgtcccagaagctgttagcttctgtagtccacactctcacctgtgcagtctagtctcagtagagtctgggagctaagatgtctcccgcagatgctcaggcaaagccctcccgtgccgggcagacacctatcctctgtgcagagtagtctcggtggagtccaggatccaagatgtctccctcagatgctcaggccaactagttccttttatgtgtatgtgtatatactagtgcatatattggtacatttatcatatatgtattcatatatgcatatttcctatcttcacatctacatatatttctgtttatctatcaatctatcaatctatcaacctatctatctatctatctatctatctatctatctatctatctatctatctatctatcaatcatctcctatctcatctgtcaatctattaatctatatttgtttatcatctatccatctatctatctcctatctctatctttcatctatatctttatctttctgtctctcaatcatctctgtctatcatctgtctatctatctatctatctatctatctatctatctatctatctatcatctttctagctatctctctattgtctgtctatctatctatctatctatctatctatctatctatctatctatctatcatctattcatgtactcatcatgtactcatccctctacacctatctacctatttatctaaagtatgtgtgatatttggaaatgtgtcctttaacatataagtagcaactacatatgaattacaggatcattgataacctttgatttttatttgtcagcattgttattttcttcataggcatccattcctcacacaataaaacactgatttcaggtgtggtctgcaattgatcaggtgatttaattccagcacactgaatgctgttttctcactgtgtatcccagaagtctccattttatactttgaaagtttcttattttgtttgcaagatgataaggccgcactcaaatgcaacgttcatttcattagttgttagtcaaagtggaactgtattgagtattagtattatatatattgtattatgtagctagctccagggaactattcttactctgggatagtgaaaaatcctagtggaggagacgaaggcccttgtgttaataaacccaccaggagtctcagtagttaaagctgcagtagtggccaaccatgtgtcattttgtcaatttcccaaattgtgatattgattctaactctgtattcccaattgggatggaagagccagctgtcagcaaggtaactggactgttaacagagtgatttctgtcacatacccgcttgccccgacctctgcgaatattagaaggtgcgcaggaagtagatctatgtgttcattggcccagagacaagagccacccctccttacccttttctctgactccacatcaatgttaccaaagcagcttaggaataaatgctgtgactcttccaccttaacgtcttcattggggaatgatagaacttttgttctaaaagcagttggtaaaagagtgtgaaagttaccttgagtatctcaaaaagtggaaagcaaagagctatctacattgactttaacggatcagctgatgcaaaaatcctttgtagaattctcctcctggtcattctcctcttatttgcctcctcttcctccctctccccctccccnnnnnnnnnnnnnnnnnnnnnnnnnnnnnnnnnnnnnnnnnnnnnnnnnnnnnnnnnnnnnnnnnnnnnnnnnnnnnnnnnnnnnnnnnnnnnnnnnnnnnnnnnnnnnnnnnnnnnnnnnnnnnnnnnnnnnnnnnnnnnnnnnnnnnnnnnnnnnnnnnnnnnnnnnnnnnnnnnnnnnnnnnnnnnnnnnnnnnnnnnnnnnnnnnnnnnnnnnnnnnnnnnnnnnnnnnnnnnnnnnnnnnnnnnnnnnnnnnnnnnnnnnnnnnnnnnnnnnnnnnnnnnnnnnnnnnnnnnnnnnnnnnnnnnnnnnnnnnnnnnnnnnnnnnnnnnnnnnnnnnnnnnnnnnnnnnnnnnnnnnnnnnnnnnnnnnnnnnnnnnnnnnnnnnnnnnnnnnnnnnnnnnnnnnnnnnnnnnnnnnnnnnnnnnnnnnnnnnnnnnnnnnnnnnnnnnnnnnnnnnnnnnnnnnnnnnnnnnnnnnnnnnnnnnnnnnnnnnnnnnnnnnnnnnnnnnnnnnnnnnnnnnnnnnnnnnnnnnnnnnnnnnnnnnnnnnnnnnnnnnnnnnnnnnnnnnnnnnnnnnnnnnnnnnnnnnnnnnnnnnnnnnnnnnnnnnnnnnnnnnnnnnnnnnnnnnnnnnnnnnnnnnnnnnnnnnnnnnnnnnccccccccgcctaaaagcagaaataaagtattctgttgtagtaacacaagttttgggatggtctttgtgactttcttttagagatattcaattttctacatgattttcatagtgctaggcctctcccacttaagtgcagtttctgaggccattcagactttgttaaacaaagtataagatcttttcaaaggagatatttaaaaagaataatggtaatagcaattctactagttagtttctttgctcttgtgtttaccttgcctctggtgcagtgtgttgtgtgtgtgtgtgtgtgtgtgtgtgtgtgtgtgtgtgtgtgtgtgtatcactgagataaacaaagcaagatacagaaaactgatggaccatgggagtccagaaaggggtaatgggatacaacgaaggtgctgtgtggccaggccctcttcttgcagaactgaaattggtgtttctgaaggagggacatagtgcttaggggacagaagttatatcaaatttccgggagacataggattaatgatatgctagagatatttctggggtgtcaagttaggaagcctaaagaaccctgaagctgatgcttgaagcatttcaactatgatacattagaggatagctaagtaggcagacaggcttgtggtcaaaccccactgtcttgagttccaaagtgaaggcgagaaccaactcctgatttctgtggtcactgcaccttccttcctcccatcttaagattcagagcttgacaatgagagctgaagatgagtaagaacaggtggtgtttgtctttctgcatctgtgctagcacacagtagaatattttctatttaagtccacttacctgcaagattcatttttctctttagagcagaatagttttctatatcatttatatatcacatctttgttatccattcatcagttggaaaatacttaggttgttttgatttcctagttttcctgtgaatggagtgaagaggaacaaggctgagcaggtacctgtagtctaagggtcctctggctgttgagtcctgtggatattgagtcctttgggcatctgtcagagagtaacataactcgatcacatggtagacttatgtttggggttttgagggttgcacgtactggcttccagagaggttgcaaccagtttgtgacaatgaacgaggattcccttttccctacacctcctgtagcatttgtcattggctggtttgttgattttagcctttctgacaaggataagattacatcccagggttgtttaaatctgtatttctctaatttctaaggttgatgagtattttgggggtactttatagccatttttacttatttttttagtgagaattatctgtttaggtccatactcattattaagtgtgcaatttattgtctggattttttttgttagttctttatatattctggacagtaatcctctgttagaaatctagatggcaaatcctctgtcttgccttgtgagcctcctctttattcaattttagctgtgccaaagacttcattttatgaggtcccctttgttgttagtctcacttcctaggccttttcccacacctgtattttgaatgctattgcctatgtttttttttgttttttgtttgtttgttttgttttttgttttttttttcttttcctggcagttttatcatttctggtttcaaacaattattttcattctaaggccagatgcaaactattagttcgtgttaggttgttttgagggagtcaactgtatgtctcagacagtttatacaagtatgccataattcttggctatttaaaaggtatttggatacagattttgaatattttgagactggctggttttgttaggcactagtagaatttccagctctgaaagtagcattatctgattggctgattgtggtaggttttttgtttgtttgttttgtttgtttgtttttttgatttttgttttttgtctttgccaggataaagagtttcagtgccatttatacaaaatacaaccttacaagatatatgatccaaagacaattacttaagggcaaaaccactgttttattactaagaaatgataggttataatagacttctttgagggtgttttcttccaaatactgttctaaaaaagttgagcagtggtggtctggagatttagtgcctaataatcataatgtttgtgagcattcaatgggtacttgtcctgcccaaggctgtatgttattcatcatctcatttaactctccccaaatttatggtaaatcagcactctgatttatccttattttacagatgaggaaactaaggtataggagaaagaaagtcaatatagaaaccaattagtttgactacagaacctgatgtttagcatagggatttattgcttcccacagggataggatatttctaaaagggatgttacaagtgaagaggaccactaggctttagctgactctttgtgcccataggctaatgagcagcagaagtggacatagttgtttgtaactattctgattgctcaggggaaatgaagctgttaccaggtaatgagctgagtctaggatgctccattgtgccttcttgcccagtgtagggcaaaagtgaaggattctttatgttctacagtgaggagattaaaaaaaaacaaacaaaccaaaagatgggcactgggtcatcttaaagcaccgggcaaactggcaggcttggaagggcagtaagtgaatactgtccccagtggagggctttgtgacccactggacctgggcagcttagatgctccacctgcatttcagtatctgaagagcccacactttctcctattctgtgggtggcttcttcttgcttaataaggttctgatggtgaagttcattgcttagcccatggggggcagagcagagggatgaggacaaagaaccggaaaagaaatggaagctactgatgctggcctagcattgttccgaaagagaaatgttcactgcctctttgctgatcagttaaaaaagcgcatcaaacaaatatagagggcaaaggttaagcagcacaacatggtgtttgatgaagaatgaactttttgtcagtctcaaaaagtcttcttgggtggtctggatgcccaggagggtatgttccaacgacaagcctgtgtttcctgggtgaccatcacgtttactctttaccaggcttctgggccaccacgacatacctcacagaaattgtctctaggcttgaggactctgcacaccaccctggctgaaattcacaggccaatcaacccatgtttctttatgcatcctttaactctccagtggccacaagatgaacaaaaactttgcacgtgttgaccacacctgttatttctttttcttctttactctcttgaaattacttgtagaattgaagtattatttattaaaaaggaggggtttttttccatccacaagagcatggggtaatcttgaggctattgtgctaagtgttaaagaaagaaaaatggacaaattgatttactccaatagtcagacacaattgttgaggttgaaaaagtagattagccggtctccttatttttgaagaggtcgcagtcaagtgaagaaaatcagtaatgcctgcaccattgctacagatgtgctaaagaagtccctatttgtggaatcttaaatgcccgactttcctgtccttccttttcattggaatgtctatgcagagttgtgcctacaatagaatttcggcgagactctcaaagatcggtgaaattcttagttagcacttagtaaatcaggaatccattttttttaaagggtcccagcagtttgaaggacctccatatctccatactctgcactaatctgatctcagccaacaatcttttcctctctccctaaagcattaaaatgaccctgagctggagcacaagcttatctttgactgtgtggaaccagaccacgtggcagaacctgctcagggtctctgggttttatcctgtctcttagattgcaagaacattttctcttccttctctctcaggaagagaatactttgaaattctttctaccagttctggccatcagggttttatctttaaaggagttgatgtggtaagaaagcttggagaactttctggaagcaaaaagtacaaagaaggaaggccaggacatttggggaatgctgcctgcctttgaattagtcaccccgatggttacaccatctcctcctttgtttcaatcttatctaacactcatctttttctttgttcatccccctacccagtccttcagaccttctaaaatctggtcttggggcaaggcaccatgttctcagggtgttcaaaaccctgtgctggatattataggagcaggaggagccatttcagaaggtcctattctggactgcacactagcatttccttgtgtgtagagctaggagatgcattgttgaaagcgactcattgtctccagggtactgtggtgaggtggtggtcactgatcccatcatgctttgtcgcagctgttggcttgattctgtgccaggtgcttgaaacaactgtggctttgcagatgggctacagagactggacccaaaggtatcacgtcaacatgttcagtcaattggggtcttataaggacagagagaatttcttctgacttcactttttatgaagaaaaggagactttccagggctgttgtctttcctagaattccttctttcaaaacatctttggggaatataattggatattagtaatactttctggttcatttaaaaaataaaagcaaaatgcaatttataggtgggtgttgcttctggtaaaattaattaaaaagaactcgtgtgaaaatagaatttgggatgcatgattaagcatcctggatttctttttctttttctttctctctctctctctctctctcttttttctttttgtgcatgctgctacgtacagatgtggttgtgaaatagttcaaatcagggcccactgaatgtcctcactggacttttaggaatgtgtgcactgaggcagccaaattttatttcatttggtttggctcattgcactggctgtgaatcagaaagtattcattttaatatctgagtggaaatttatttacaaacacacggctacagttattctttcaaagggcttaaagtttttgtttaatttcctcaaaaatttgctttctagtttttctttccatctggaacttgtgacagaatatgttgaagaggtttttctagaataaaaaaatacatgtcctgacgcacagataaatgtaatctttcgtgtggtttatctttcctgtttggtggcaacgacagagttcagaattggtctggagatgattacattgctgattctgaaatgcttttcaaagataaagtgatttatttagctgttacattattattataagcataatttaatgcttaagtgttctgagttaatattgagttctttcttcttagccaatcatggcagtattctaaaaagaaaaaaaaattaaagaaaaacccaaagacccacgaatgagacagatctgcattttaatgatggttctaccatctatcagccaagagaccttgaacaagttagtcagatccctggcgtctcaagttatgactctgtaattggagcaacccagctcattgtttgtgatattgagatgagacacagagctgaacccaccaagcacattgctagtttatgagaagcccatggcgtatgctgctagttagtcagtccttggccacagagattgtcacatagaactgaatcagaataggatcaatcaatccaaccttgattcatctttctgctttctcacatcgatacttaggacagctccaagtttgttttacaaaaaccatacacaacaaaaatgtactagttcagccattgaaagtggatttaggttcatttaggatttaggttcatttaggatttaggttcatttatgttgtatgagcaaaaattgtatgagaagattgaaactgtgccttttaaccaataactccctcacttctctgaggattctttcaccatggtgtgtctctgtgagtgtgactactttaggtacttcatgtacacagggtcacttttatcgtttgtgtctgacttctctcactcagcattatgttttccagatccaaccatgccatagtatacattagaatttcaatgtttttaaaagcataatgttaattctattacatttatataccaccttatgtgtatttatttaagtcagtagaccctgagttttctctgacttttgtctgttatgagtaacattgccttgtctgtggacatacacatacacatatctgtttgtattcctgctttcaatcatatgtatatgtgtgtgtatgtgtatgtataagtatgatagagcctagggcattgttttagatttatctcagttgctgtgataaaacactgaacaaaagcaactaagggcagtaaaggatttattttatctaatgggttgcatcagtaagagatggcagggcagggactcaagcagtaattcgaagcagaaaccagggaggaatgctgcttgctgacttgctgaaaggcttatgcttagctagctttctcaggacattttagcccagggaatggtgctgcccacagtgggctgggctctcatatcaattaacaatcccccacccccagacgtgcccacaggctaatccgatcttggcaatccctcagcctccaagtctttcactcactgagtgtgcacctgaaaggagaattactgagtattttgcctccaattccatgtcttgattttatttcatattatttcattgacaactatctgcttgacagctggttgatgtcttactgaaccctcccgacatgtttagaactgttctacaccccctcttcctgccctccctcatgaaccagatcctcctcctgattaacaggaaggcaatctttagggcgtcctggagcaaagcaggagcctttcacttcctccttcttacctcctcctctttaatcccagatatgtgctaatcggtttaaaccttcacatctttttagcttcttgtgctttactacttaaagatgattaatagctattttgatatgaattcttctagggcataattatgaatacttcttctaatccttcatttttttatgtcagtcattcccacactcctacattcacttaaaaatctgttgaaatcttcccacctcgttacattccttgacagtcttccttttctcttgttggtggtcccagcagcgctgtttgagcctggttctcagttttgcctggcctctctcatagcattttcttcctttggtactagtgattgatgtgtgtgaaactcctagaatgaaactccactcaatgggctggagtacactcaggaattgccccactttcttcaggatgtaaggcagggtagtacccatgattctatgtaaatcatattcagatacttggcctgtggctctcatccaaataatgtcatttttttatcccaatgtccaatataagtttgttttgatacatcttgcatattttcaaagtacaggcagtgagtgacatcagcttggctatgttagttccctgttattctttctaatgcacaagcatccttgatctcagaaccctcattggtcagaagctgagaaccctaccataattgccagcagggaaacagatgctgttcttggacaaagagcttgttggacaagttgagccttcagtgtatgaaggttgcagggatgggtcagttcaatctctaatgggagggagaccttgattcaaaatccatctgttttgctgggtggctctgagccacttgaaaacctttacacaatcctacaacagtaaaatgtggattaatataattcccttttcataaagtcgacaggggattgaatcaagcaatccatgcgttatatagcacttggaacatcatgctcagaatggaagaagctggttttcatggagcgaatgatcaaatgagctttgtgaaagggtctccttcctccctcttctccttcttccctcccccctcctctgtcttcctttctctccctccttccttcccctccccctttctcctatccttcctgcccctcccttcctctctccttccctttctcctccctctcttcctccccctctccttctcttttctccttcctccctcttcccctccctcttcctcaccttctcttcctttctctccccctcnnnnnnnnnnnnnnnnnnnnttcctcttctcctcccccattccttttccccttctcttatcctttcgctccctcctcctcaccccacgctgtaattgtaagtccaaataaactctttcttctataagttgcttctgattatggcattttagtacagtaacaagtgaccaacacagtgactatttcccttaaaaggcccaacctgtcccgtcctgacacctgggctgcacagacaggttagtggaggactaaccagagctttagtgtctttgcttgattcctctatgtgaatactcactgagctctgctctgtgccctacaatgtggcagatatggctggatgatgatccaggtgtggctcattggctgccaagcctaagcccatctgtggattcagacaagcaaaagccagcatggaggtgtgatgacaggatacaaagtaagcttggttttccaggtggacttgcagaggatccagttcctcaggtggtgcactggaaaactgagcagtagccttgagtcacgctcctcccaggaacatggctccgggtgaagtaagccactctcagccacatgcttgcaggaggcctcagttaaatgcacaatgaaaggatataaaataggaagatctggaaagaagagggcatttgatgggagggggaggatgggaaaggataatgtgcattctggggtgggggttcttcgatcaaggaacatcttatacacatgaaaccttttacaaataaaattttaaaataaaaaagtgtgagtaatggagtaaaagagtaatgaaagaagacactccacatctacctctgtcttttgcacacacatatatatacacacatacacacacgtgggcacacgtgtataggcataaacatacacagatacacacatgcacacatatacacatgcacacacacatccatacatgcacacatgtacaaacatattccccactctctctcagtcactttcacacacatttgtacttatttgaaacaagtgcctttgctttgaaaaataatcaaatagttgattatttgatctcctctcttggtgtctgtgtaggtgagcctatatggtggaggtgtggtgggagggtccagtgaaggaggtgatctactgtgattctgtgtgtgtggcttcatgttgcatagttgacaagagacagatagccggtgagtgaagatggctactgtattagttactatgccattgctgtaacaaactacccaacagaaataacttaggaaaggaatgattattttggcccatgggtttgaaggactttagtctgttgttgcaagaaggcaccatggcagaaagcttccttctgtggtggcatgagtctgaggcagggcctggtgtctgactgggaagcagagtgagacagagcccgtttgggtgtgactttcaaagacccaccccgcagtggcctactttcccctgccgggctccactttggaaacagtgccatgagctggtgggagacatttgagatagaaaccgcagtgcagtcagtttgatggatgtgggtgcatagataggcctgaagccccaaaacgagatctggactgaggtagctgccaaaatgtcctgagggggaaaagtgtcaaaaaagataagttcacagtattcgatttctctcaggctactgcttgctttaattaggtctgtgtttatcttccttctgggtgtctggatagggatcattgtttattttctataacaaaacaaatcttggctttctgagtgataatgagaaaaacaaaacagttgctatgatagagagcagagagaaggaaaaggtcaagaaaaggaaagtcctgaaggaaaagccctcgtgaggcaggatccgtgtgtttctcaccaggtttacctggttgtttggcttgtaggcctcatatgtggcctgaccctacacttcacaccaccaagccttatcctctggagagtttgtatttcctttttttttttttttctcatgataataatggagcccaaggtctcatataagctggcaactgctaggccactgatgccgttcccaggctgagcttcttattcttggtggggaagaaaacagggtctagcttcccacccctccccttggttattgcatcttggctggatccttttatactccctccagtgttatcacaaggccatggcttctcatctctgtgttgaaattattggatatttcactcacataattgaattggttctcaaaaatcaattctacttcagtacagttttctcatacattattttcagaagatcaaataaggcttgcaaaggagctgaggaaaacacttgctttaacatcaggcatttacagacttattaagggaaatgacagctttgttgctttttatctaacatcagttgaagacttaaaagtactcattgctggtgtttgcttagggaggatttgttttgactgacgatagcaaacatgcacttagtagaatctttcttctagtcagtttattgattagtcatttcaacttcttttgagtgttgtcagagaagccctgcattgtgaccataatccagtgcctctgctctcgtttttgctaaaggatggagtcagttacacagatccgatgcacttttatggattaggcatgttagttcaagatttcacctgctttcatgaagatagacatctccagtgggtagccaatccaaacaggagaggcctccagttgttatctgactcatggcaattctttctcctcttctggcttgaaaaatacctgtctatcggagagagagtgagtcaacatagtatttggtttaagtagttattaatttttttctgaggcttaaatgtgtacttagttttttttgagctaaaatatattgatgtgttctctgtaaacaccagaagaggcaaaccactaaggatttccttagggtatcagaataatgaaccattttcctggagcttgctaactttaaacccaaatcagccttgtttccggttctgtgccttcctcagcaactcttccctcttaataaagacaatttaaaaatgactattgtgctttggcacagtggtacaagcctttactgcaggcagatctctgagttcaaggccaggctgaactacataatgccactccttgcctggatttttcaggcaatgtgaggtttctgaccagtttcaaattcatagtcaagcttactggctttaccagtctctcttatataaaagaaaatcttcgtttacatggtggctttcataaaatacatctaaaatagagccttgcatttcttctaaaattcctgccccgacatgttctagttggggctgattcttatgccgccaagagacaaatggtcctgtgttcaaccatttcactgtcttgcatcttgccccttatgaacagggggtagaggcctgtaggatgtacttcaattagtacatgcaataggttttcgctttgttttgagaatggaaaacatgccattccctttgtctatagtccaaactgaagatttcccctgtgaaatgtttggcattacacatacttcatatgggagcagctagagagaggtagataactgtaaaaccaagggttgtgttgagccactcaggggaggtaaggaaaggtaacccagtgtggacatctcggaggagtccagaagggtataaaggccgttgacatactgtggaagttaacatggagggacagacttgccggtgtccaaggccaatgagaattatttggtgaagacagccaacagacgaggtaggagagaggattcataattagaggacaggaccaatcccttgacatacattcactcatttctgaagtcttagagcagtggtgcaacaattataaagttttatatacatgtatgtgcatatgtgtacacgtgtgtgtgtgtgtgtgtaacatgagaaatcccataaaactcagaccaaaccaaatgaaaaagcaaagcaaagcaaagcaaaggccacagaggcttcccctgacgtgggaacatgtcctatggcgtttccctgcagagtgggggtgctgtccagcggcagggagcttctctagcacatgagaattccaagcctccatctcctgcaccacaaaacgaaacacactgtaggctgtgcagctcaggtcatgtgatggggagaggctttgaccaaacaaccaccaaagcaatagtgtgaggccttaattaagggtaagagcctgacctcttatatttcctgaaatgatactaatttgatcctctttatttccattaggacacaatgactacatgtgtccagctacaaaccaatgcaccattgacaagaaccggaggaagagttgccaggcctgtcggctgcgcaagtgttacgaagtgggcatgatgaaaggcggtgagtaaagctccatgagctggggatggctgtgctgtggatgctgggttgcctagctgaagtagcccagggctggctcttaggtatcaagtagaggcttagtaaatctctctctaattttaactactcttgggtttttattggggggagggcggtgttcgtaatacatagcattttctttttaaattgaagcaactaaacccaagaattctaacacactatttagtgttttatatttccaaggtaaagattgcattttacagcaaaggcatgtggtaggtactggtcgaaggaggactatgccatgtctcactcagggaaggtgttgcagttgctattgatacagctaatgctacacagatgagatcgggtgataaactttcctcagttgagacttccgtatcggaggacaaaacagctgccatgtctcctttatcagtgcattcgatggaggcaatcagcattcccatcaaaaggcattggagaagacaagtgggctccatcctcagtagccctgtgtttcatgggatgctggaagcggttgctgggcgacacccaacaaatccccaagcacccaggatttgccacacttccttatcttgtggttgctggtggctgggtgcacaggcatgcactatgcactccccttggccccttgtgtattcagtctcccaggatttttgtgcatgggaatctagagtagaaatttcttggtggattgttaaataatcctagatgtggttatctacacggttctcttgagtccttgggttggaaatctgagctgtggaaccccgatttttgtcttgggtaaccttccctgtactgagagagaatgaataggaacccgcacaatggacgtcaagtcctagctgcattcagacgtctccacggtgacactgaagctggaggggaagcttctagaagccaataaagcttgtaatgagggcatggacatatgtggaagtcagagaacaacctcaaatgttgttgctccattatcatcaacgttttgtttccaagacagcatctctcactggccttaatcctctcaactgggccacactacagtaaagcctggcttctgcctgtctccatctcaacattgttgggtgttatcattaatactttgtctcactgtggtgtcaaaatagactgacaagagccacttcagggaaaaaggttgatttttcacctcacccttggagggtagattctatcatagcaggaaagggagggcatcagaagctagaggtgtctgaccacaatgcagccaaagtcaggaggcagagaactgtgagtagtcacagccagtttgtttctttccttttatgaagtctaggaccttatcccatggaatggtgttaccctagtgttagggtgagactttctatctcaattaagccagtatagaaactccctctaggacatgcacaacggatttgtctccttggtccttctagaccctatcaggttgatagtcagtcttagtcatcacattaggattacaagtgctcaaatccacactcagccattttcatgtgtgtcctcaggctgtccacaggagctttgctccgacttagctgtgtccccaacacacaggaaagctaagctttaacggattaataccaggacaaagagggagaaggaaaaccaggaacggagctcaagatgaaggaaggtagagttgacttcccacgaaagatgatttggatgcagcccttggaatggtctcttagagaagagctgaaatgctgaacttaggctttgtgtgaggtgtgacgatttgtcttaaaaggcagcttgaattcacagggtaattaattctaagaattgaacaatcatattaaaaatgacgccttgagtcataaatggattcaatatttaaggacttcttcatctttctttgtactggaaaattagtcaggcttaattaaactcacaaaaagcttctcccgtgatttgacaagtgacaggaatgtagcagatgcatgacgaaaagttcaggtaggaacaggatgaggacggtgggtccaagcttcttctttgctcactgcaggtaacttaagcagggatcactctctggaagacgcaagaatggctttgtaaatgtgtagagcattttgaaagatgtgacggcactcatatgctgaccccaccttctgaaaaactattctattatttttgttcctaagtagtattcagacagagccatcctggctatataaatataaatatggtgcccttgattttggtctaataaaccatttcaatttacaaaggcacaatgtatgacttctgttttcaagtaggaatgcagatagatgccagaagatatgttaagccagcctgtgtcgtgtcggcacgcatgtgtgtgtgtgtgtgtgtgtgtgtgtgtgtgtgtgtgtgtgtgagacaacagaatgagtgtctgcattaatgttctagaaaatgctaccccctgggtggtttaaatgaccaaattaattttctcatgttaccggaagctgaatgtctaaggttcacatgctagaaaatttggtttctggttcacatgctaaaaaatttggtttctcttcagatctaaagtatctttatatagcatttttctctgcatatacattcatctctctctttcttagaaagaaagttcctgcaggctaggtgcctaccccttctgatttcacacaatcttttaaaaaacagttttaaaatgtaaatctagtaaacctgtgtgggtactttgattgagtatgtgtctcttcaccaattgcgtgcctggtgcccatgttcagaaacaggtatcagatcatctgtactggagctgcagatggtggtgagcctccatttgggatctgggaattgatccgggctcctctggaagggtagtcagtgttcttaatcttcaactcaccatctctccagttctggcttcatttaatcttaattatccccttaaagtacctgttccaagtagcattttggatgcttaaggttcaatacacgagttttccttttgggggtaaaattcaccactttacagcctggctataagaaaacgccacagatctgttggcgcaactatataaaccagtcttgtcctggtactggaggctagaagcctgtggtctgtttagcagctgtggtttctcctggtgcctctctccttggcttgcaccctgccacctccccctgtcctcacatgaccctccctccgcctgcacactctcttcctctttttgtaaggacatcagttatactggattagggccttatcgttatgaccttgtttaagtctaattagctcttcaaatgtcctggttttttttttttttaatgccagatacattctagggtcctgagggttggggtttcaaaatatgaattctgcgagcacattaagtagtgtctttttagggttccccatcaatgaccagggtctgtctacatgcacagagaatgtgtgtcttcctgtttctattaatatgcatatacttagagatatgttttaccataaaaccacagcctatgaaaacatctcattttagaaattcctgtatatattataaagtcatttataaagacctgtataaattgccttttgtaaagtggtatcatttattgaacagaataccacatatgaccttctgacaccgtatgcatcaagctctcttaacgttcctctgaataaagacttaatttacacctggaagaaatcccaactaactacaaaatttatagttgtaaaaccagctgtgataggacagaccttggcaaggttatccaataggttcacaatagtccagttgcttttttttttaattaggtattttcctcgttacattttcaatgctatcccaaaagtcccccatacccacccacccccaatcccctacccacccactccccctttttggccctgggattcccctgtactggggcatataaagtttgcaagtccaatgggtctctctttgcagtgatggccgactaggccatcttttgatacatatgcagctaaagacaagagctccggggtactggttagttcataatgttgttccacctatagggttgcagttccatttagctccttgagtaatttctctagctcctccattgggggccgtgttacccatccaatagctgactgtgatcatctacttatgtgtttgctaggccccggcatagtctcacaagagagagctatatctgggtcctttcagcaaaatcttgctagtgtatgcaatggtgtcagcgtttggatgctgattatggggtggatccctggatatggaagtctctacatggaccatcctttcatctcagctccaaactttgtctctgtaactccttccaagggtgttttgttcccacttctaaaggaggggcatagtgtccacacttcagtcttcatttttcttgagttccatgtgtttaggaaattgtatcttatatcttgggtatcctaggttttgtgctaatatccacttatcagtgagtacatattgtgtgagttcctttgtgaatgtgttacctcactcaggatgatgccctccaggtccatccatttggctaggaatttcataaattcattctttttaatagctgagtagtactccattgttgttcccatttctaagaaggggcaaagtgtccacactttggtcttcgttcttgaatttcatgcatttagcaaattgtatcttatatcttgggtatcctaagtttctgggctaatatccaatatcagtgagcacatattgtgcgagttcctttgtgattgggttacctaactcaggatgatgccctccaggtccatccatttggctaggaatttcataaattcattctttttaatagctgagtagtactccattgtgtaaatgtaccacattttctgtatccattcctctgttgaggggcatctgggttctttccagcttctggctattataaataaggctgctatgaacatagtggagcatgtgtccttcttaccggttgggacctcttctggatatgtgcccaggagagatattgcgggatcctccggtagtactatgtccaattttctgaggaaccgccagactgatttccagagtggttgtacaagcttgcaatcccaccaacaatggagaagtgttcctctttctccacatcctcgacagtatctgctgtcacctgagtttttgatcttagccattctgactggagtgaagtggaatctcagggttgttttgatttgcatttccctgatgattaaggatattgaacattttttcaggtgcttctcagccattcagtattcctcaggtgagaattctttgttcagctctgagccccattttttaatggggttatttgattttctggagtccaccttcttgagttctttatatatattgggtattagtcccctatccgatttgggataggtaaagatcctttcccaatctgttggtggcctttttgtcttattgacagtgtcttttgctttgcagaaactttgcaattttatgaggtcccatttatcaattatcaattttacagcacaagccattgctgttctattcaggaatttttcccctgtacccatatctttcttctctataagtttcagtgtctctggttttatgtggagttccttaatccacttagatttgaccttagtacaaggagatagaaatggatcaattcgcatttttctacatgataactgccagttgtgccagcaccatttgttgaaaatgctgtcttttttccactggatggttttatctcccttgtcaaagatcaaatgaccattggtgtatgggttcatctctgggtcttcaattctattccattggtctacttgtctgtcactataccaataccatgcagatttttatcacaattgctctgtagtacagctttaggtcaggcatggtgattccaccagaggttcttttatccttgagaagactttttgctatcctacgttttttgttattccagatgaatctgctgattgtcctttctaattcgttgaagaattgagttggaattttgatggggattgaattgaatctgtagattgcttttggcaagatagccatttttacaatgttgatcctgcaaatccatgagcatgggagatctttccatcttctgagatcttctttaatttttttcttcagagacttgaagttcttatcataaaaatctttcacttccttagttagagtcacgcctaggtattttatattatttgtgactattgagaagggtgttgtttccctaatttctttctcagcctgtttatcctttgtgtacagaaaagccattgacttgtttgagttaattttatatccagctacttcattgaagctgtttatcaggcttaggagttctctgggggaatttttagggtcacgtatatatactatcatatcatctgcaaaaagtgatattttgacttcttcctttccaatttgtatccccttaatctccttttgttgtctaattgctctggctaggacttcaagtacaatgttgaataggtagggcgagagtggacagcctcgtctagtccctgattttagtgggattgcttccagcttctcaccatttactttgatgttggctactggtttgctgtagattgcttttatcatggttaggtatgggccttgaattcctgatctttctaagacttttatcatgaatgggtgttggatttttgtcaaatgctttctcagcatctaacgagatgatcatgtgnnnnnnnnnnnnnnnnnnnnnnnnnnnnnnnnnnnnnnnnnnnnnnnnnnnnnnnnnnnnnnnnnnnnnnnnnnnnnnnnnnnnnnnnnnnnnnnnnnnnnnnnnnnnnnnnnnnnnnnnnnnnnnnnnnnnnnnnnnnnnnnnnnnnnnnnnnnnnnnnnnnnnnnnnnnnnnnnnnnnnnnngtttttgtctttgagtttgttcatatactggattacgttgatggatttccatatattgaaccatccctccatccctgggatgaaacctactaggtcaggatggatgattgctttaatgtgttcttggattctgttagcaagaactttattgaggatttttgcatcgatattcataagggaaattggtctgaagttctctatctttgttggatctttttgtggtttaggtatcagagtaattgtggcttcatagaatgagttgagtagagtaccttctgcttctattttgtggaataatttgtgaagaactgggattagatcttctttgaaggtctgatagaactctgcactaaacccatctggtcctgggctttttttggttgggagactattaatgactgcttctatttctttaggggatataggactgtttagatcattaacctgatcttgatttagctttggtacctgttatctgtctagaaacttgtccatttcatccaggttttccagtttgttgagtatagccttttgtagaaggatctgatggtgttttggatttcttcagaatctgttgttatgtttcccttttcatttctgattttgttaattaggatggtttccctgtgccttctagtgagtccggctaagggtttatctatcttgttgattttctcaaagaaccagctccatgactggttgattctttgaatagttcttcttgtttccacttggttgatttcacccctaagtttgattatttcctgccttctactccttttgggtgaatttgcttccttttgttctagaccttttaggtgtgttgtcaagctgctaatgtgtgctctctctagttctttttttggaggcactcagagctatgagttttcctcttaggaatgctttcattgtgtcccataagtttgggtatgttttggcttcattttcattaaactcaaaaaagtccttaatttctttctttattccttccttgaccaagttatcattgagaagagtgttgttcagtttccacatgaatgttggctttccattttttatgttgttattgaagatcagctttagtccatggtgatctgatagaatgcatgggacaatttcaatatttttgtatctcttgaggcttgttttgtgaccaattatgtggtcaattttggagaaggtaccatggggtgctgagaagaaggtatatccttttgttttagaataaaatgttctgtagatatctgttagatccatttgtttcataacctctgttagtttcactgtgtccctgtttattttctgtttccatgatctgtccattggtgaaagtggtgtgttgaagtctcccactattattgtgtgaggtgcaatgtgtgctttgagctttactaaagtttctttaatgaatgtggctgcccttgtatttggagcatagatattcagaattgagagttcctcttggaggattttacctttgatgagtatgaagtgcccccccttgtcttttttgattattttgggttggaagtccattttgttagatattagaatggctactccagcttgtttcttcataccatttgcttggaaaattgttttccagcctttcattctgaggtagtgtctatctttttctctgagatgagtttcctgtaagcagcaaaatgttgggtcttgtttgtgtagccagtttgttagtctatgtctttttattggggagttgagaccattgatattaagagatattaaggaaaagtaattgttgcttcctgttatttttgttgttaaagttggcattctgttcttgtggctgtcttcttttaggtttgttgagggattaccttcttgttttttctagggcttcgttcccttccttgtatttttttttttctgttattatcctttgaagggctggatttgtgggagaggtaatgggtgaatttagttttgtcgtggaatactttggtttctccatctatggtaattgagagtttggctgggtatagtagcctgggctggaatttgtgttctcttagtgtctgtataacatctgtccaggctcttctggctttcatagtctctggtgaaaaatctggtgtaattctgataggcttgcctttatatgttacttgacctttttcccttactgcttttattattttatctttatttaaagtgcatttgatgttctgattattatgtgtcgggaggactttcttttctggtccagtctatttggagttctgtaggcttcttgtatgttcatgggcatctctttctttagatttgggaagttttcttcaataattttgttgaagatgtttgctggtcctttgagttgaaaatcttcattctcatccactcctattatccgtaggtttggtcttctcattgtgtcctggatttcctggatgttttgggttaggatctttttgcattttccgttttctttgactgttgtcccgatgttctctatggaatcttctgcacctgatattctctcttccatctcttgtattctgttgctgatgctggcatctatggttccagatttctttcctagggtttctatctccagcgttgcctcacttagggttttctttattgtgtctacttcccttttttggtcttgaatggttttattaaattccatcacctgtttggttgtgttttcctgcaattctttaagggatttttgtgtttcctctttaatgtcttctacctgtttggttatgttttcttgcaatttatcaagggatttttgtgcttcctctttaatgttttctacttgtttagcagtgttctcctgtatttctttaagtgagttatttaagtccttcttgatatcctctaccatcatcatgagatatgcttttaaatctaggtctaggttttcaggtatgttgggtgccctggactgggcgaagtgggagtgctgggttctgatgatggtgagtggtcctggtttctgttagtaagattctttacctttcgccatatggtaatctctggagttagttgttatagttgtctttgtttagagattgttcctctggtgattttgttactctctatcagcagtcctgggagactagctctctcctctgagtttcagtggtcagagcagtctctgcaagcaaggtctcctctttcagggaaggtgcacagttatctggtgtttgcacctcctcctggccgaagatgaaggcccaaaacaggatctttcccagaagctgtgttgccttggcctgtcacagaagccgttgtttcagtagtccacactctcacctgtgtagactactttccgcaaagtcctggaaccaaggtggcccccgcggaacctgaggcagaagcctccagggccagtggatacctgtgctctgaccaggaaggtggccggttgtctggagccgaaaatggcaccgcctcagaagctctgtggctctcgcctgccccggaaactgctggcctctgtattccacactctcacctgtgcagactgccctccgcgtagtcctagtccagttgcttaaccaggctggataccaattgggatattgcatctctagatatgtagcaaaaaattaattgtattttagagtttttttttagagtattttatcaaagatctattctaaagatctaagagtgtgtagtttagctatatggggagatgattttcatgtattagtccggagattctcattatgattagatttgcttagagcactgtggttccataggacataacatctagcctgtgcaactgggatacttcctaaccccctttcccttgtagactgctgatatctattaatgcttgtcatttaggaaggtccttcccatttgcccatgctgggttagatttctgtgttcttatatgcacaacgcagcacaactttctgagagatgcactctctagtactaggtgtctccaagtgtctgtattcttctatagctgatgaatttcaggttgaatgattggagttctttctttgccctgtttagcactaaaacaagacacatggcaagggtttaagaaaacttcttgcataaatgaatgaacagactcaatctgtttgaataattatgtgtttttatacacaaggtattgtgggtaaaaagggactatgcataagaccctcccagcaatgtcctcacaatacaaagacaacatctgtatgcagtagaaattcagaagtcatgttgaagctccactgtgtcagaagatggaaggttcaaattacaagacatcagaatgggagtcagagtaccagatagttgcttctggattttatccaacccagcagctcactcaggccatttgatttccagaatatatattgcttcccatttaccagtcttggttaatagaaagatggcaacttcggatgtgaaatcccgattcaaacactggctcctgctcagaactggtaggcaactctgtaaaagtcacttttacaagtcatgcagatctcaggtgtaagactgcataaacaatttctactcaaccagtttctcttgaagaccacagatcataacatataaaaatactttacaaattcagattcctacagaagtgtcagtgattatatctcttccatgttaaaaatcccttacctaagaactttatcacctgcttgctgcctatttagtatattttccaattggtaggagatactggcaagggagacatgtctgctaagtcaatatatctaattcctttagagggtcaaagtgtggcctagatagacatgcctttaaaagtccttttgttatctatgctgtgtacagctgcatgatgaatgagctttgtagtttatcctttgatgatggcagagattttcagagacttgtcacagtagacccaagacatgttggtgccagcatcctcctttcacagatgaggaaattaccacatagatgttgatagatctggctaggttccatcacaccttgcaatgtaatttgagacagtagaagccgtgagctaatccttaggtatttgatgacagtgttgccatccaaagcccaagagtattctaaagtgatactttctttttaagagttgctctattttattcatgggataagtgggagaaggagctttattggagttgtcaagtggttgctctttaatgtttactataatattttcatatctgtagcactctgggtaactataattactggaggaattacacaggctcaatccccacaatatttaaagagtcaaaaaagtttgaaaaatgtttaatttctatttccagggtctataatcattaccaccagactttgctttttttgtttcttttacaaaaattctccttattgttgagcatttcacaatgaaatatgatcatattcacacttcacttatcccttctagcttccgaatgagcccttcacaactatgatttttgcatttatttatttatttatttagacaacccaccaagtatagttagtttcgactatatatacacaggtgtgggacactgaaaactattagtggccacatccctagcaggggttggggggtgactctctttcctcagctaccaacttacaagagttcctaagtaagcggtggggcttggagatcatccacccatcttgatcagcttgtaggtcttatgcaggtgaccacgaggactgtgaacgcataatctcagtagccatgtccagtcttacccccatctgtctattacactctttccacccaacttttgtgatattgcctaagccttggcggtgatgggttagtgtagatgttccagtttagcctgaatacccagtctcttattcttagcataaaacaacaaaataaaaaaattgttacaaatttatttttcatatctgttctatttttatctattttaacatttttcccaggtcacactggcctttatatatgtgtggtcatatgtctttgtcactaagatgtttatagtacaacctaaactcaatttcttcaaaccagcaaccttttccctcaacagctatttgttggcaacctgccccatcttactaatacttccacattttaaggaatttaggccaagactcctgagcctttcttcaggccatgctttccgagaatctgagctagtctcgtcacggttctgttctgctttggtctggccatccattctcccagattacactggaggcttgcctgattctgtctatttccatccagtccattccacctacagtgactccaagggccaaggtcacctgctgcttctgactgctctctccatttctgccaggccccttcctgctcccttcactataacctcacatgtgttcttgctcgacagccccacatacatcatagacagaatatacatcataggtttgcctggagtacctacattgtatatattgcatgtataatagtcacccagtagaataagttatccgatcaattgacaagttgcaaagcttgtcttcacagaaaactaatgaggtagcctgaccctaggccacaatgcctatgccatttccatcatttcttattatataaacattgcagccttttgtatcatcttagaaattgaaagaactcatgagaacagtacaactgacaggaagagagagagagagagagagagagagagagagagagagagagagagaacttgaaagaactcatgagaacagtacaactgacaggaagagagagagagacagagagagagagagacagagagacagagagagacagagagacagagacgacagagacagacaaaggcaggcagagagacagagagacagagagagatacagagagagagagagctatcaaatttgcatattacttatcacagcattactgctcaatttatgttgttcatggctgctaatttcttcttttattgctaatctcacagtttctaatctataggttaagcttcacaatagaaatgcatatgtagaaatcaatataggtatttctggagccctaagccagagggtgcccaacattaagtattctcaaccaatcttgtctgctcactattctaaaaagaaataacccatagtgaaaacaacaaaatgaatttagtgttcattatggacacgcagggaaacaaggagatttgcatcctcagctgttttcaaggatgctgacacaggcttcaggtgtgaccagggtgggcactgggatgagtgacaagctccatgcacggttaggcagcattgtcaactgtgggttagttgatcattatcaatcttggttttgtgaggacttgctggtgctaaaagggaagttattattgcttgagggacaattcagttaccattgtgtgatgttcgcttgtgcttagggttcagcctcctttcttgtcactgggtagcagatcttatttatggggtgcagactcatcaaaccacaggatcctgctgttccagaatccaaggtgacttctagagagaatggatcagagaacagcacacattttcttcaggcttagagcaacaactggagaaatcagtgatgtgaaaccagaccttgtagaagcccacagtcaggatgggtgagtgcttgctattaagactccctacctgagctaggctcctggaacctccatgctgaaaggcaagaacttccacaagttgtcctctgacagctacaaaagtgtgtgtgtgtgtgtgtgtgtgtgtgtgtgtgtgtgtgtgtgtgtgtgtgtggtgtatgcatggtgcatgtatatagtgtgaatgtggggtatgtgagtatttggtatgtgtataatatgtgtgtgtacttgcacatgcagtagctgaccatctgttggttacactagccttgcaaatcttaaagacaccttatcttctctcagctggtatctgcagccttaaagcatgaaggtttccattagttcaaatgaatactccctaattggtagtgtgcttacattcacagtctgacaggaaccagactgacaaataaattgtaatatagtgaaggcatcagatacgaaaccaagaaattcctgcccctgtcctctttcagttacctgctgggatcctgtaggtccaacaatgatatagcactttttgacataaatagtctctcattcttgttgtagaagtaggacttgattatagttagttttcatcatcctttgagagtcttaaaatatatacctcacagatatgggcgagtaggctaccttaaacacatcagggcttgtgtataatgcagccaacaaagagttataccatctataagttaatagaatcaagaaatacatctcaaagtataagcactgaattatgaattaattatgaatgactagtcctatttttctaattaggagaacacgtcttctctgtagtttttgctgtatagcaggatcttatcttgggcaccaatgacacatggtaggaagcacctgtcagtcaggatactggtattcactctacacactcttgtgtctggagatgagctggctgttttaattagggcatcttgggaaaccttggttcattttgttcatctcccctcttatggtctggtccaggaatattctaacgataatagcagaggcccaaggcagggcaagttctaagctcatctgaaaactttgtctgatgagatcatcaagtccagtgtctgagaatgctcaatgagacaggaacttcagagttacatggagcagattgaaagcctggctgcatttcttttataacccatctcagccaaaacctcaagcctttaagagtttagactttaaaatacctaacatcactgaatataggagttctaagagtatgtctacctctgttcagcaacaaagaatcccaagtgcagcacacacagcttctatttgggtgcaggatacagaggcgcattttattttcaatttttttcccatacgtttattgagcagacatgataaggtagaaagatcaggaataatagaagtaggatatatggcatattttcagatattgtagctttccctaatttattaaggtatgagtttagtgtgtgtgtatgtttgctacaactagttctgagtttaaaagccaattaaatagaaatctatttttattctttgataaaaattcacagtatatataaactatgttttaataagcatacttttattttttcttgtcataaattagaagagaaatttaaatttttttaaaaatttcagttgacaaactcctttaattttactttattcttaaatttctcttttgtttgttcactattcctattgacgtgagtgtctgcgtgtatgtgtctttctctctgtgtgtgtgtgtgatatgtttttgtgagggtgtgcagcacatgtgtagtcatgtatgagctgacagaggacaagcctgtgcagctggctgcctctttctaagatggattccagagatgaaacttggaccaccaggcttgcatggcaagtgtttttacccagtgagcctccctgtggcccaaccaaagtatcttaattaataaatattaattgtgcacatcaagatgttttgaaatatgtacatctctgagaaatggttaaatcatggtgattaatacattatctcacagtttggagacagaacgcccacactcagttctcaagtattcagtacattgttagtttacgtattgccaccagttttcaagataaatctcctgtccttattctgttgttttgtgtcccatggctgttatatctccagcatcatttgcttacccttgccccttgtagggaccattgtgctcactgcttctttaactttgatgcttcaagatttcatgtgcaaatgaagcttcgtgcaacttgacgttatgtgtctggcctttatgtcattttaggaaccctaagtaccatccactttttgcaaatcttatgattctctctgttttttaagttgtacagtttcccactgtggtacctgtatttcattttctttgcttactcacctgtaggctcaggttttttttcaaatcctactttatttaaagctcttaaacactttaacctctcttctatcccaccaaccagaggtaggggagaaagatggttaataggaaaagaaattgggctgattccgtgcttcatagtcaggatactagcagtccatccagtttgatggcaaacgacaaacactagccagaaatcagtaactgagaggcacgatccaagagaaacaagaaggctcaccaaatctgcagaatgagcggaagcagccagaatcagctagaataccatgagaagttctttggtcttgaataacatttcattgtgtgtttaacttctactttcttgatggtgaataatcttgaccatttttataatctttttttccctcctgtgaactgttggccattttctcgagtacccttgctcagttttcacttgagttagctgtttttctgctggcagtgagctgagctcctcaagtatttctgagcctaacccatgatcggacagacggtttacagacattttcttctttttcaatgattctctccccattatactgattttcagttaaatgaaatcccattagtctccttttatcttcatttcctgagctttgaagaccattttaagacaacagatcactgtctggagcagtgggattgcctctgcctttacttttctaggaccttttcagcgtcagaggtttaaggcttcactccagttgagctgatttttatatatgctgagagttaaaggtttattatttttctgcatgtggatatctgtctcctcagcatcgtttgttgaagagactgccttttctccatttcatattctctgaacttatgaggaaaatcaattgactgtaaaaacatgaatttgcttatgagttatttgtttatttgtttggtgtatctgtttgtatgaaattaccatgctcttgggattccaatacttttgaagtcagtgtgttattacagccttgctccttatcttcaagattggcttgaatatttatgactttttgcttacatatgatttttagaattatttatttatttattacaattactcttgaaattttgattcaaatcacatcgaatgtataaatcactttggctactgaggacattttaacactatggatttttcaaatccatgaacattggctatcttctgatttactagcggcttcctcagtttgttgaattagcacatagttctcagtgtgtagtttttttactcccttggataaatgtgttatcttttatagctctcctagatggaattgttttcttggatacctcactgttattgcatagaaacactactacatattttagacagtgtctcatgatatagaccaggatggcctggaactcaccatgcagttcaagttagcagatttttttttcctcagaaggctcaaaatgaaataatttaattagtattactctaattaccattttaaatcactggaattcttttattaattaagtatttactttactatcccagcagcttcccctccctcctctcttcccagtctctcccttttacctacacccccattcccccctcttcttctttgcctcaggaaaggagaggattgaaggatatcaaccagccttggaacatcaagttgcagtaagactaggtctatcttcttctcctggggctggacaaggccctctaagggcaagtaatcaggtgacctctccccagcctcctgagtgctgggtctacaggcacatgtcaccacacccagctcatactgggtttttgtatcataactttgcatcctaaaacagcactcagtttgcttattctttccaacttttctatgtgtagtatttagggttgcctgtatataaaacaatgtaaactttaaataagcataattttaatgctgatgcatgtattcatctatctatctatccattatctatctatctatctatctatctatctatctatctatctatctatctatctatctatctatctatctatccattatctatctatctatctatctatcatctatctatctatctattatctatctatctatctatctatctatctatctatccattatctatctatctatctatctatcatctatctatctatctattatctatctatctatctatctatctatctatctatctatctatttatcatgcatctatctgcccattatctatctatctatctatctatctatctatctatctatctatctatctacctacctacctacctacctacctatctattatctttctatcatctatctatctatctatctatctatctatctattatctatctatctatctatctatctatctatctatctatctatctatcatctatctatccatccatccatccatccatccatccatctatctatctatctatctatctatctacctacctacctacctacctacctacctacctaacctatcatctgtctattttttacttaattgctctagttaggacttccagcactatggtgaataaaaatgagaagagttggcatctttgctttgctcctaatcataggtaaggaacatttcaatttttcatgactgaatatagttgctgtgggtttatagcatacagcctttagtgttttgaggtacgttccttcactattaaagttattgagagtttttatgaggaaaggcagctaggcttgattttacgaagaagggcagttttgtatctgttgaaacgattatgtaccatttctcccttactctatcaatgtaacatgtcacatttataggttttaaagtcgtttaggacaattagtatttagttctttaaatatttggagagtttttagcaaatctcttgggtcctgaacttatattttatgggtgaccttttgatgttgattcacacttctgactcatcattgcttcatcttttatattaagttttgatgattacgtgtgtcaggaatttgtcaattccttcatattcagatttattgatatgaccttatcaactgtgtcttctgtgttgctgtatatttgtgtgcaattttctattatttattgggtcttctgtcctttcttccttatctagctaatactgttcatcttaaaaaatcatctcttagttctattgatttttaaacactttttctaatctctattgtttttgttctttctttattgttttactgtacttaccactccagggcttagtttgttctgtactatttagctttctaaagagtaactccaggcagttaagaaccaacttgcttcctttttctttgcgtccttacccccaccttgctcccttccattttttctttctcttttagttttgacacagacatttatttgctacatgctgtaagtgctggtatgaagtatttccatatttttgtctgatgacttatatttccccctcttgaactttgtgtctcactaaagagttaggagcatgtcatttaattttcatgtttttgtaaaatttccaaaagccccactgttgctggttactatttttatgttgctgagcttagaaggacaattggtgtgatttcaatcttgctagagttgttaaaacttgttttgtggcctggcaaattcatcctgcatcttgtgacgaatgtacattctgctgctgttagatgttgttcattttcctctttgatatagttgtgctaaaatgaagttcaaacttaagcttgctttatttatttttctacctgaatgatatgttcattgttcaaacttgaatgttaaggtttcttgtatattatagctgtgccttttttcccccagacagattgatagatggatatttttaaaatatatttaggttcttggatttttggttatgcttgtttacaattattatattattttgatgaattgacacttttgtcacaaaattaactttcttcttagttttttcgttatagttgatcttatttgaggtaactacccttccttccttgtgtcttctgttttcatataaggttctcccctactccttcagtctatctctgtgcattcaaggtgcagtgaatatctttcaggtagcatacagttgggtttatttttttctgttgtccattgtgctattcctgagaaaatgactactctcaggtcacttgacctggggattttatccatttgcattctgagaaatacgacttactaatgttattttgttaactgatatttttgttgatccactgttactgtttctcttctcactgccttcttttgtgattgaatgttattttcctttaataggatgcttaaaatctttctctttttgtcttctgttaacatcacaggacttttgctttgtgatttccataaaatatgtggaaacgtcttgcagttagaatagattcttctaaacattgctgaaaatttttttacttatttgattttcttatttagagattatttgatttgaagaaggaaaaaggctccacatttacctttcaaaaattgccatattttctctccctgattgcatttttatttatgtgtatgcatgtatttctgtttatgtatgtatgtatgtatgtatgtatgtatgtatgtatgtgtatatatacacatacacacatatgtatgtatatgtatgacacaggtgttacgttggtaaccagaaggcatttggtccctggaagctggacttacagcagttatgcactgtctgatgtggatactgagaaccaaacttggatcctctgaaagtgcagtcaagttcttttaactgctgagacatccttttagccccaggagcaaatagctataccttaccttcaatgttagaagaaatgctgtgagtgtctcaagaatgagtatgactctatgaaaagttctcttttgtccttacacttttcctttgtaaaattaattggtgttttgtaggatagaattattctttctgtggttagaatctaatagataaccagtgtttgggagtaatgctatgaatgggttgctacttttgaaatctataaattgaaaaccccaagaaatttcatattcttattcttttatcccaatggctacatctaggacaatgaattgtttttagagtagaaaagaacttaaggataatttagttcccttcattgtttgtcagcttgttctcagctgggtcacacagctgtttaactgctcagccaagaaagcagattgacccattcttggatcaatgatttttacattgtattaaatggcttaactgacctgttcatgacatagattgccatcaaagatagattcatgcataatacgatattaatatccacagatgaacattgtgccttctggacacagtatacactccttaacagaagcattggttgctggatttggcttagttgtacagaagagttactactatgtgggtgtatagtgtatagagattatgatatgtattttaaaagtactaaatagtaatatacttttaaaaggacgtttgctcctttaggcgaaaggtcatctttttgaataggggttctgactattggtcaatatgtcaatatgaccaatatggccctttaccgactgcctaggaacctttggagtatttcttcacttttcttcactattttggatttgatatgattcagctctcaagggtcatgggttggtggatgggctttctgtgtggggacctcgagtagagcctagagggagtggtgaagtcctggagagaactgcccttagaaggaatcaacatagttttctgggatcccacttactgggttgtttttttttttttttgtttgtttgtttttttgttttgtttttttttttaacaggaagatttgttcctccctggtctcagactccctcttgtatgtactcatgataggattccgtcttccaggaggccatgggcagaggccagccaatgggggcatgtctctgtcttagacaatcagcttccaaaacatgaaatagatactattttataagattccaagatgtaaagattttctttcaatcgtggaaaatgaacgaatacatgctagtactgagtatttgcttctaaaaatggaggtccagggttcatagtctctgtggtatcatccagatcttaaattttatgtttttatgatttaagttcagatagagacaatggaaagatgtaacacaaagatagagtatatatatgtatatatatattcacatatatggttttacacacattatctatctatctatctatctatctatctatctatctatctatctatctatcaagacattcataatcgtcccgctatttcaagctaaatttagcataataataactgaagatacttgctgaactgattaatatatatggggtgtggatatcttctgagtgcagattgtcatgcaaatgaatctgatgccatcatcactgaaatgagaatacaatgagcagatggtcacaatgttgccacaaattatttagccacattaaatgaaggaattcaaaggaaaagtttgacaagagtctgagaatataactaagttattttccgcaagacatgtagtaattatgactaagacttgagtctcaagatctggtgaaactttctaatttctgccatctggaaaaaggaaggaagagttcaaaatagggattgtcaagaggttcctgaataagtaccccagaaactagttcaaacactcaaggcccagtttattagaaaccacaaaaccatgtgctattcctaagaggaatccagggtcaggaagtgctgagagacaatctgtgaaccaatgtggaggtggcaattttggtgcccagaggcaacctattggttcagtttctgtgaaatacctgagaagaatatggaattgtatttagctttttatacatttaaaagcttgattcatgagacaaatcattattaaattcatttcatatttgtatgatgacagttttacttaggttattttggtaaacagtagggaactctaccctgggcctcacatatgcaaagcaatggcacaactacacagctacatcttcagtccctgtttgaaaatttttccatgcctattccaactttgcattctaaaatcatttacagacaatgatggtgagcatctacatgggaaggttttggagagacaaaggacttggaaatgtgctccaagtgcaaactttggacaatcagaccatggaaagagaccatgtaaaaagatgaactttgtttcaacacacctaggattaaaatttttatgatgtctcaagtcattccctggtaatgaccttgctcccaggaaccaagtgagctacctgtgcctggacattttttcggggggggggttgttcatcttctccccaatgttcctggggaatagatgctcttgtgaggtttaagttcttgcctcttagatatgcttcagtttctttgtagactttagtcttgtagaaagcatgtttgtgcagaaatatcaaataatctttaaaggtactctgaaggtcaaagcatgaactgtgttttgatatttacaaataaatctgtggctattagctagtagtgctggtgcagggtactgatctttactttgtagagtaactagattaaaatgtgaatatccttgaaaatggatatacataattcttcagatcttgctttcactatttgtcaggcatgaacaacaatatgataatattacgactgctttgaggtggttgtgtcagagaatgtagagcctttaatattttatctagcttccagtaacccctccgtataagttggctatggttagtaatgtgaaatacacgtacattttaccttttgtacttgatctaggttccgagtaaaatgcaattacagaatactataaccctaaccaagtattactaagcagcgagtctgcattctgctccagttgaagaactgatagcatataaaaccaggcacatttccctgaggcatctacagggccttctcctccatccttcgcctccattgttttccacttcctgaatcacacctaatttttttcttccacattctctctcccccatttcctagcagagcctttgctggagcacacagatctgcttattagctacagaatatattttcctgttgtatgcataccttgaaccagaaattagtcattatcgttttgttatttgaaatacactttcttgcttgccagttccccttcctgagctggcttaggagtccccagaagtgacactcctccccttcagaacaactgtaatcctcttgtgtttgtcctgtgctgtcagatcccagtgctaagccaggcacttagccctgtgtcttaccatctgagcactgctggacacatagctgtgtggtcacgttcatctgacactgtgttagggtgacaggctcatacctaacctcacctgccctcagtcctctgtcctacctctgtctctgatctgtgacatgcattcccttgcatcaggtttgctttggggcttggaggccatttatctggctaatcaatttcatccattactccaacttaattgtctatagtttttgctttcagctagtgggagttgggctatcctctccattcatcctggctgtacatgctgggcatccattcagctggctctgagtcctctgtgctctcataccagttgaatgcttagttttgcattttctaacttagcatcaccttaaatgcgatataaatataactttctatataccagatagttaagccaagcaaacagctcagtatttaaaaatacacttgtttatggaagtatagttatatgtcctataaacacaaatagaatttttctttccagaggcagctcactgtttattcataacactgtaataatggcaactgtttgtgatttaaaaaaatggaaggggagggctgatttaccataatctgtaactaaagaactccctggactgttaagctgatcagggaaatatgactgaaggtgttttttcctcccctctcattcactctctctgctcttctgtcccccttttccactcttcccctgcaatcccagcactgagagtgtgcagacaagataaactcggaggcttcctggctagacattgtaactgaattatgaacttaagcttcactgagagactctgttttaaaaataacgtaccacatgattgtggaagacagctgatgttgacctctggcctctacatgcatgtgtgcatacacatccttgcaatgtcctttaccatacacacagacacaacaccatgtatataaacacacatacatatacatacagcaataacaatttgtataataataacacagagagagagagagaaagagaaagtgccaaatactacaactattacagtaaataaactagattaattaaaagaaacacagattttagggaataaaaagagcgagtccccaaatcagatcaaagtaagacttccatatgattgatttattttaaagatatttaaactaacaggtaagaatggttttgttgccagcggtcactcactgcagaccttggttggagcagttctgggtggaacattttcctactgaaagctgtattttgctgccgctcatgcttctttctacttattactttgtctcaggggaactggggaacttacactctacactatgcatggagagtctgaataattttctctaggacaatagttccatcatacaatgtttgattattctttcctgcaagcagctagccactcttctgctggaacacaccatctttcaagctctggcctctctctctctctctctctctctctctctctctctctctctctctctctctctctctccctccatcctcctttctatatgcatggcatcttttctttttctgttcttttcattttgagacagaatctaattatgtgccactacacccaattcttttattgttgttctttttttatttgatattttcttcatttacatttcaaattctatcacaaaaggatataggggctataggggtatactcttccccctccctgctcccctactcactcactcccacttcatggccctgacattcccctgtactggggcatacaatgtttgctagaccaaggggcctctcttcccaatgatgacccacaaggccatcttctgctacatatgcaagctctgatactgatttgttcatattgttgttctaccaatagggctgcagaccccttcagctccttgggtgctttctctagcttctacactgggggtcctgtgtttcatccaatagatgactatgagcattcacttctgtatttgccaggcactggcatagcctcacaggagacagctatatcagggccctttcagcaaaattttgctggtgtatgcaatagtgtctgcgtttggtggctaattatgggatggacccccagatggggcagactctgtatggtccatcattttgtcttagctacaaactttgtctctgcaaatccttccgtggatattttattccctattctagggaggaatgaagtatccactcattggccttccttcttgattttcttgtgttttggaagttttatcttgggtattctaggtttctgggctaatatccacttatcagtgagtccatatcaagtgacttcttttgtgattgggttacctcactcaggatgatattctccagaaaccatttgcccaagaattttataaattcattgtttttaatagttgagcagtactccattgtgtaaatgtaccacattttctatatccattcctctgttgagggacatctgggttctttccagcttctagctattataaatagggctgctatgaacatagtggagcatgtgtctttcttaccagttggaacatcttctgggtatatacccaggagaggtattgctggatctagcagtaataccttgtccagttttctgacaaacggccagactgatttccagagtggttgtaccagcttgcaatcctaccaacaatggaatagtgttcctctttctccacatcctctccagcatctgctgtcacctgaatttttgatcctagccattctgtctggtgtgaggtggaatctcaaggttgttttgatttgcatttccctgatgattaaggatgttgacattttttcaagtgcttctcagccctctggtattcctcagttgagaattctttgtttagctttgtatcccattcccccccccctttttttgaaaaattaggcattttcttcattaacatttccaatgctatcccaaaagtcccccataccctccccccctgactctcctacccatccactcccaattcttggctctggtgttcccctgtaccgaggcatataaagtttgcaagaccaaggggtctctcttctctatgatggccgactaggccatcttctgctacatatgcagctagagacacaagctccaggggtattggttagttcatattgttgttccacctatagggttgcagaccactttagcactttgtgtaccccatttttaatggggttatttgaatttctggtatccatcttcttgagctctttgtatatattggatattagtcccctatcagatttaggattggtaaaaattctttcccaatttgttggtggtctttttgtcttaccaacagtatcttttgctctacagaagctttgcaatattttgaggtcccatttgtcgattcttgatcttatagaatagaccattgctgttctgtttaggaatttttctcctgtgcccatatctttgaggcttttcccacactttctcctctataaattttagtgtctctggttttatgtggagttctttgatccacttagacttgaactttgtacaaggagataagaatgtatcaattcacattcttctacatgatatctgctatttatgtcagcaccatttgttgagaaaatgtggtcttttttccactgaatggttttagctcccttgtcaaagatcaagtgaccataggtgtgtggattcatttgtgggacttcaattctattccattgatctacctgtctgtcgctgtaccagtactatgtagtttttatcacaattgctctgtagtacagcttgaggtcaggcatggtgattccatcagaggttcttttattgttgagaatagtttttgctatttatgtttttttgttattccagatgaatttgcaaattgccctttctaactcagtgaagaattgagtgggaattttgatggggattgcattgaatctgtagattgctttcagcaggatagccattttgactatgttaatcctgccaatctatgagcatgggagatctttccatcttttgagatcttcttcaatttctttcttcagtgacttgaatttcctgtcatacagatctttcactcccttatttagagtcacaccaaggtattttttattatttgtgactattgtgaagggtgttgtttccctaatttctttcttatcctgtttatcctttgtatggagaaaggccactgatttgtttgagttaagtttatatccagtttatactgtactgaggctgtttattaggtttaggagttctctggtggaatttttcgggtcacttatatatactatcatatcatctgcaaatagtgatattttgacttcttcctttctgatttgtatccccttgatctccttttgttaacaaattgctctggctaggacttcaagtattatattgaataggtaggagaaagtgggcatccttgtctagtccctgattttagtggtattgcttccagtttctctccatttagtttgatgttggctactggtttgctgtatattgcttttattatgtttacgtatgggccttgaattcctgatctttccatgacttttatcatgaaggggtgttgggttttgtcaaaagctttctcagcatttaatgagatgatcatgttatttttgtctttgagtttgtttatatagtggattacgttgatggatttctgtatattaaaccatccctgcatccctgggataaagcctacttggtcatgatggattatcagttttatgtgttcttggattcggttagcaagaactttattgaggatttttgcatcgacattcataagggaaattggtctgaagttctctatctttgttggatctttgtgttttttaggtatcagagtaactgtggcttcatagaatgaattgggtagagtaccttctgtttctattttgtggaatagtttgaggagagttgcaattaggtcttctttgaaggtctaatagaactctgcactaaacccatgtggtcctgggctttttttggttgggagactattaatgactgcttctatttatttaggggaaatgggactgttaaaattgttaatctgatcctaatttaactttggtatctttctaggaaattgtccatttcatccaggttttccagttttgttgagtatagccttttgtagtaaggtatggtgatgttttgcatttcttcaggatctgttgttatgtcagctttttcatttctgattttgttagtaggatactgtccctgtgccctatagttagtttggctaagggtttatctatcttgttgattttctcaaagaaccagctcctggtttggttgattctttgaatagttctttttgtttccacttggttgatttcagccttaagtttttattatttcctgccatctactcctcttgggtgaatttgattcctttcattatagagcttctaggtgtactgtcagactgctagtgtatgctctctctagtttctttttggaggcactcggggctatgagttttcctcttagcactgccttcattgtgtcccataagtttgggtatgttgtggcttcattttcattaaactctaaaaagtttttaatatctttctttatttctttcttgatcaagttatcattgagtagagtgttgttcagtttccatgttaatgttggctttctattatttatgttgttatggaagatcagccttagtccgtgatgatctgataggatgcatgggataatttcaatatttttgtatctgttgaggcctgttttgtgaccaattatgtggtcagttttggaggaggtaccatgatgtgctgagaagaaggtatatccttttgttttaggataaaatgttctgtagatatctgctaaatccatttgtttcataacttctgttagtgtccatgtgtctctgtttagtttctgattccaggatatgtccattggtgagagtggggcattgaagtttcccactattttgtgatgtgcaatgtgtgctttgagctttactaaagtttctttaatgaatgtggctgcccttgaatttggagtataaatatttagaattgagagttcatcttggtagattttacctttgatgagtatgaagtgcccctccttgtcttttttgataactttgggttggaagtcaattttatttgatattagaatggctactccagctttttttccccggaccatttgcttggaaaattgttttccagcttttactctgaggtagtgtctgtctttatccctgaggcgggtttcctgtaagcagcaaaatgttgggtcctgtttgtgtagccagtctgtctgtgtcttttattgggggaattgagtccattgatgtttaaagaaatcaaacaaaagtaattgttgcttcctgtcatttttgatgttaaagttgggaatttgttcttgtggctgtcttcttttagttttgttaaaggattactttattgctttttctagggtgtagtttccatctttgtgttggtgttttcccattattatcctttgaagggctggatttgtggaaagatattgtgtgaatttggttttgttatggaatactttgttttctccatctatggtaattgagaattttgctaggtatagtagccttggctggcatttgtgttctcttagtgtctgtataacatctgtccagtatcttctgactttcatagtctctggtgagaagtctgcagtaattctaataggcctgcctttatatgttacttgacctttttcccttactgcttttaatattctgtctttatttagtgcatttgttgttctgattattatgtatcaggaggaatttcttctctggcccagtctatttggagttctgtaggattcttgtatgttcatgggcatctctttctttaggtatgggaagttttcttctataattttgttgaagatatttgctggccctttaagttgaaatcttcattctcatctactcctattattcgtagttttggtcttctcattgtgtcttggatttcctggttgttttgagttagaatctttttgtattttgcattttctttgattgttgtgtccatgttccctatggaatcttctgcacttgagattctctcttctatttcttgtattctgttgctgatgctcacctttatggttcctgatttctttcctagggtttctatctccagaattgtctccatttgggttttcttcattgtttctactttccatttttagatcttggatggttttgttcaattccattgcttgtttgattgttttttcctgtaattctttaagggctttttgtgtttcttctacctgtttagccgtgtttgcctgtagctctttaaggacttctacctgtttagcagtgttctcctgtaattccttgacggatttttgtgtttcttctttaagggcttctacttgtttagcagcattctcctgtaattccttgagggatttttgtgcttcctctttaagggcgtctacctgtttagcagtgttctcctgtatttctttaagtgagttattaatgcccttcttaaaatcttctaccaccatcatgagatatgattttaaatctgcgtcttgctttttgggtgtgttggggtatgcaggactccttgtggtgggcgtactgggttctgatgatgcccagtattcttggtttctgttagtaagattcttacatttccctttcaccatctggaaatctctggtgttaatgttcaagctgtttctggttggagcttgatcctcctgtggttctgttagcctctctcagcactcctcagagtccaactctcacctgagttccagtggtcaggaactctgcaggcaagctctcctcttgcagggcaggtgtccagtagtctggagttctgatccacctcctgagttctggggtcagaactctccttgtagcctgactctcctctggcatggaatgtgcccaggggtctgggtctcagctttgccctctggctgaggatgaagactggatgggaccctgagcaagaagctctcttgcttctatcacccacatgctctcaggtgatcaggaggtcctgggtatgctacattcctgctgcctggagagtcctctggtgtcttagagaccctcagccaggttcatgcagcagatttcagggctggccccgacttgaatggatcccagcctctagtttggccgggttcctttgtccctgttcctgcaggcacaagaccttatgtgatttttgaagctggtgtttcgtaccattcacccgtgatcccgaggtgatcctgaggtcctgtggtgtggagagcactctggagcccttagtggcctccgctgggctcagaaggaagatggcagggtggctccgacaggaaaggatcccagcctctggtcaggtggggttcctttgtccctgttcctgcaagcacaagactctccgagattgttgaagctggtattgcgttgcacttaccagttatcctgaggtgatcccaaggtcctgcagtgtggagagcactctggagcctttagcagccttcactgagctcagaaggaaggtggcgggggtcactacacccacttctaaatatggttctaatgctttaaatgaaagaccgaagaacgtcctaagcaatttcttttacaggaatttatttagtaataacttgttctgtttggcctaagactacagttcaccatttattcagcccagccctttcccaatttaaatggcgaatcaaatgcctgtagcattgatttgtttcacttggatgcataatttacttccaaagagagagtctggtttggagtttttaaaattggtaatcaggcccccaaatgcctgcctctacctgccttgcattctgcaattgaaccaccaggaaaatggcagtatgagttacaggactaggtgattttttggctgaagtgtaagtaaaaaggttggaggacttgggggtgggagactggcttggtagtaaaaccacttgtgtcctaagcataaggacctgagtttgatcctcaggacccatgtgcaaggttgagtatcatggcacaagttggtaagcagccaggcctacttggggacgctccaggccagtaaaggactgcctgaagaacattcaggatctttagttgtcctctgaactcttcccacctaccacacagacatgtggtagagagttttctgaaatggtaaacaaaacaaaacaaaacaaatgcaaaaaaacctaaaaacaacaacaaaaaaaaaccacaataggctcacaaagcagcagtacaatgcccagtgacattagccttccagttattaagaatatatatatatatatatatatatatatatatatatatatatatatatataatcaaataaagtgcccaaggctacttaaagtattcgtgcaaaagaaggcacagttggttgaaggaaacctagctactgcacatggctggaggccactgaaaggggtctggataaaaagccacttccagaagagtgttggcccagtttgagtgtctttacagtgtaagaaataaagatggcagcagtcatgacatccagttaagtatgctagcaaataaacatttgctacagaattgagttgatttggttctgtataaagagctggaaataattccagtagacgtgttcaaactaacagtaggaaaaaagatatccaagctccagatgacagggtcataaaaggaaatgatacaagccatagtaatgccaagagccactctatgactaaggacctgatttagggcctagtgctctaatatagacttgtagaatctaatttcccattaaaggaaagatggaaaactttgtgttaaagtatgatgcaagtgttttctaagagtttccttctggacgtttgcatcatagaagaatttaaggaccaagaaaaaatctgggaaagcattgatgagaaccagagcagagagcagagagcagagagcagaggcaaggcaaggcaagcacacacacacacacacacacacacacacacacacacacacacacaaacacacacacacagagagagagagagagagagagattcaagcacatagccacacaaattcatacacacccacacacccacataactcacacacatactcatacactaacagacactcaaacatatgtatacacatgtgcatgcacacactcacgtgcacacacccaaacatacacactcacagactctctcacacacataccccatgcatatacacactcactcacatgcacacacattcacatactctcacctgcatgtacacatatgcacacacactcacctacatgcacacagatacactcatgtaatactctcacacactcacatccacttgcactcaagcacacataccctcacacattcctctacacacactcacacatactcatgcatatgtacacacatgcatacacacatgctcacacttgtacacaggcacacacatatacacacatgcacacacatgcttgaaaaagaatgactaaagagttgaaaacagataaaagatacgcattaattaacaaacgatcagtgcttaaaaattaaagcattaatctagcaatcctatcttgtaacttacaaggttaagaactatgggatgcttcaaaagctgcagatggagatcactgaggcagggagagaagttgatatccaaatggttaactccacagccccccttagagtgacaggcagtctaccatcttgggaagtttttggaagtacaagtcttgttaatgtgggtgactagttatgaaattactagttattcctattagttatgcctgtcttaaagaattagctaaagttagttgaaacctaattaagaaagaaacagtttaaaacactgaagtggaaagtaaaaaccacaattatgaactctgtgcacttggaaggctgaggcaggggaattgtaggtttaaggccaacctggtccacactgacagacccccatctcaaataaaaaagaaactaaacaaaaccaaacaaaagggaaactcaagacatttttgatgtttaatgaaacattgaatgttttcttgaaaatcttttatttttttattggtattctcttacagaaaaaaaattgcttttgaattctagaatttgttataatttttcttcgtagttgtactttgaaatcagtttctgaggtccttccctggccacacaccagagacttacttctctgtgttgtcttagcagttttaaagcttggtgtttctcagatctcagcggttgcttcacctaatctgtgcgtgtgtgaggaaggaatatatctttgtcttttcccatatggacagccagactgacctagagttcaggagatagcccccagctcccagtgccgtgagggttcaggagatagcccccagctcccagtgccgtgggggttaaggagatagcccccagctcccagtgccgtgggaagactcttttatcccagcacggcagagattgccttgaagcttcctttgcagtttctgtctctgccttggctcaccctgtggtttagagtgagtttgccatgatgagaacttcacagtctttctgaaaaaggaccttgctcgtcttcacatttgctttgtctatttatggctacatctctttcgaatgaattttaaatcaactgctaatgaaattgcattacatttatgagcgaagttgacaaggactgacatctttctgatgctttgtctttccatctattaacattttgtaactccttttacgttagttcttttaaaaaaaatcaatttcaataaaaaattcagatttctccaaaaggtcttgaagatttaagaacagtcgtacccaactcattctgtagtgttttaaagaaataccttttaaaaaaatgataccatctaattatttcaacggtaccatgcattttttagaaattttgtaaatttgggttacacggcctatttattgaacattattctatgctgttggtcatacttcaaagagagagtatacgagggctacatgaatatcttaatacagaaatattatagtttatttctggataattgaatacttaccaagtttctaacttttaaaacattgaaatatccaaatagctttaacttcgttaaatctttgtattcattgcatttaggatttacttctagaacttactttctagtagtttaaggtcacagagcctgggttgtcttttttttttttttcattttatttcctgtctgaagatagattaaattatcttggttacagaagttgcccaaatagaaatatttcaaaacagcctgtactcagaatgaaagtggggtgaacaatcagagtgagctccctgaaacctggtgtaaatgagagtactcataagcagggaactccaaaaactggagatgtgggctctattttatccactttacaatccgattaagggcagttgtgagtggtggaaatcgcctacagaccaggctgagcaggctgcagcacgccgccttgttttgaaacccagggttgactctgaaagaacattagaaggagttgtgaagatacagagaaacaatggaggaaagacaccggaagaaagaagagtcagccactgagcatgacagataatgctcacgacaaataaaccagcccatacagtgaccgatgctgtatgtgatgtgacgatgtgacaaaggtcacagcatacaaacatcttcccttctcctgtatgggaaatgtcaagttacatcagccaacctatggatagcttcttctataaacacacttctgacctgagctccaagcttttgattgtccatatctactaggagaaaaatatttacacgagaacacccaaaggatatgtgtgttttggattatattaatatattggggcagtaagtaggattttattaatgtaactttttttttaaaggcattcttttattttcttcccacactttctgctttcagttgcctgtttgcaatctgctttgaaaatcattactgtccaactagagtgagtgtttagacattagcctgtttgtcatctactgcttaatgagggcttcaatgtaaattgatcagtctgtgaaagacagacatgtggtggcataatagaggtttcaaaaattagtctagcttgtcctaagtgttgtgctgtgattactagataggcttacattttttcaaagttaaaagtgagtgctactttaaggggtcagtatacctccaggagtaagacccaggcgagctgcttcttccttccagtgtacttagaattcctaatttacatgattctctacttaagttcaccagctatcatggcagcctgtggaaccatacgtcgaatccagccactgccagctatgtgatgctaattaaacctgaaggtaatttaagttgaattgcagtgtcagtgtctcggtcacacttgctcaaaacatagctacttgcatctagtagcaatgaagtggccatagaccagaacacttccaccatccctgaaaggtctattgggtactgccttccatatgcttctggagcagtttcagaggacatagcctccgcctaaatgcacaggtgtggccatggtaatgctacctcctcttggttgttgttaatctgtagtcatggattcctgtagctgcttttgctggtaacacccatctactgtccagtccattcctggacctgggaataccattgttcccagtttctttatctggtgaaggttatgtttaaattatgctcacaggcaaagcattcatttcacatcctcacctcaaggcccaggcaaagagctaacggcattcaccaagcatcccactgtcatcttcacgtctacacactgactcagttggtgatactggttgagtcatattagttgacccagagattttttggtgtgcatctcagcactgatccaagtgacaatttggagaatgttctacagaatgtagttaacacttcttcctcagtcttcatccgcagatctcttgtagatcatggaagttcctttttacagacagatggtcaaccctgacttatttggtcactgtcatctgaaagttccattggtgctagaaaactcatttatttggtgaagccattggctgcctacttcctggaccaagctcaggttttcttattcttttcttttctttctttctttctttctttctttctttctttctttctttctttctttctttctttctttctttctttctttctttctttctttctttgagacagggtttctctgtgtagccctggctgccctggaactcactctgtagaccaggctggcctcgaactcagaaagccgcctgcctctgcctcccaagtgctgggattaaaggcatgtgccatcacgcccggctaggttttcttattcttcattctgttctgccccaaggtactttctcgagactctccctcttgaacttccaactagaatcaagttggtgactctatacaccccgacatgatttccttaaaaacccactgccactgcctagctgagtatggggagcagatgtctctgagagtctgagccaatgccatgagctgttccattgggattcattgctctgtaatgggatagaacccacagccttggcatcactggccccaagctctcaccagctgagctaagtggataaaatagagccaaaatctccaatttctggaggtccctgcatgtgaagactctcatttactgttctgatttaaaggtagtagcatgaccctggggtccaccctcagccagagtgtcacattctaaggacattccagctattagaattgttcttgtcgtcccccaggtgactgtaacatgcacccagggtcatccttgagcaatggccttgcgtcatcgggtatcagttagcagctgccctttatcccaacccatggtctaatacgtagtctctagccatatgtgctcactcagtcaagggaaacaaaattaaatgcaagtggatttctagaaatccagctttggggtagcggccacatccaggtggtcagtaacccacagggttagtggttatcacattagacagctcacttactgaggagcagtgctggccataggggaacaggaggatagaaacaaggagggagggtcctggtgtcactgaagccccacagcgtgggtggggctggttataggtaccacgatgacttttacatttggaactcagtttatgtatttcatcattttcaggctcaggcatgctcgaatttggctcagttcaactaaaagactgccccatgcttcttttcatctttatctcagtttggtcagctagcttttgttgaacaggactctgggtacagggtgtccagcaccgccagagtctctaaactatcattttttgtgtgtgatgtgcaccagttaaaaacaatttaatcctaaaggtcaccccttctgaaatctacactgttttacgggggaggtgagcagctggtagaaataaccctgaggtctctaatcctaccaaaggaaaatatggtataagtaattgcccctcagtgatatctgagagattccatgcttcaccagggcagacatgatcagagggcacccttaagagcctttggctctcaggaatctgagctgtggcaggcagtcactttaaagctttctgcatttatttaaaaggtaaaagtggtcattttaatagctgagcatttaccagtctgagtaaaaaactaaccgaaaccttattccatgatgcccactatgctgtagtggggattttcacatacagtgtgtattacatctcaaatactgtcctgctccgaaaggaccttgcctggagtccatctctccatgctatcagaacatattggtccactaacagacctaattatgctcatttgtctttgacaagaaatattaaaaatgatcacaaatgactgtgtaattataattataatctcatcaatgcgtatgtgttattttaaacaagttcactttgttagacctcatcctgctttgaaaagaggtacccatgatataagaaagaattattaaaatgatagttttagtgttatctgtagctgatggagccagctattgtattcaataattgtaaatattagctcatgacgtatagaaaataatacaaaatgtttgttatgttagaatactcatagataatttatacataaagcttgtgaaagtttattccattagaataatctggaaagattaatatgaacaactaattccctagatctttttctcacctttagcttcctgtcttcaattttaattttgttcttctgaagaagacttagtcttccctagtgtgacatttcagacttttttgaaaatataatattgtgacaaagaataacatacatcagatttttttaaaccatgtattgagctaaaaattataaccactgccaaattaccagaaaattcctttaacagccagctccatattttagaaatgatttctctgaagactcatgataatcttgtcattccaaagtctcatctttagaaagttattattattattattattattattattattattattattattattattattgtttccattcagagtatttcatggaacttacgttctctcctctgctgttcgtgggcttaaggtgcattcttttagaaaaataaaacctttagtttccggagccctgcgttctctccctctactttaaaatcatgggaaaaataaccgtcatttctttatcccagtgtccaattccctcatcattttctgccagccaattttctcctttttcttctgtctagtcttaggaactttttacttggcttcattctctgcaattcagggctcacaatttctttgagcttctcaggttatcctttgtccttgtgtctacttttttatgagagagagagagagagagggagagagagagagagagagagaggagctttaaaaaaacctcatcatcaaaatattgccatatttaaaatccatctacatattgattaagccaaactttacatcctgtttgtttagttgtgttgagctaaaaagctgttgcataaattcaagccatttcacattgaaaggagtttcctagcatcttcaggtaactgtggcagccaaggaagctgaagtgtaatgaacacaataccaggaattaattaaagaatttacatatcgcatgtgccaggactacaagcccacaaggtaaactgctaaggtaatagagatttaacaagccgtgctggcattgaggacaggaattgagaaatgacactggggggcgggggggggggaggtagcttttgcactccagtttttgattcagccccaactgtgtatgtttgggataagtcattgttacctctccatccatttttcattcctcccccctctcctccctgtcctttttctttcttttttaaagctctatttggtcctttatgtcttttgtatccatccacaatacattcctaaccaacttcaaagctttccaaaagcataattctctaagtggtaattctaataatttttcaaaagcacaatatttttgtgactttctttggaatcaagaaatacttatatcattttctcctgtcctttttatccttccaaccagtcctatgctcaccctgtgaagtcacatcatcatggctgcctgaacaatacctgagccaggacaacaccaagagacatccaacatttcatttctaaaatgggggctaagcttgtttcagcggagtcatgtataaagcccctccatagcccacagcatgagaaacactcgatgataccaaatctttgtcttccaaagagtgatccttgaatttgtgttgcatgaatgttagcccttctatgatcagttcaaaggtggatcactcacttcagtcactattaatcaatgcacaactcaggagggtgaacttgcttttcacttcatccaggagctagagtctagtgtggatatcccgtctcactaaacctcaattcttcttcctaggtttaaaaccatctgtaccttagttgtaaagtagatctgtcatctggctccaatgagtttttttttcttttgtggattatttctttatggaatttttgtttgttttaatttttctatgtatgtatgtatgtatgtatgtatgtatgcatgcatgcatgtgttttagctgtgcacagttgtgtacctgcacataaaacatcaccttggcatgcatgtggatgtcagagtcagttttctccttttgccatgtcggttgtggagcttgaattcagatcattagacctttgcccattgcaataacgtattggattctgaaagacttgagtcttgagttgagctgctgttagactgttttctctggcttcagaatctcaagggtcttttctggaaaggttgaattggggtccagacattgagatgttcctgtctctatacctaaaaggtaacccggtgaactgtaatggccgttcctctttgacgaatgtgtactgaactagggcgtgttcaggttgtttatggtgaacacacatatgaattgcagtaaataaaagttgagtggcttatagaaattggtacaggtacaataagatacaggactgggtagcctcctaattatcttcatcatgaaatgttcacattgcatcttcacaatgaaaatgtgcttcatatgtaaggaccatgcccaaaatacaaaagcctggaaaaggtattccttctcagtaccaagagattagataaagctgatcatgtctgaggatgtgggtcacggagacaggatgaattgagccctgcattctctctataagggaaataagcatccaaaggaaacactttcattcccatgaatgtttagaatctgcttattatttttcctacctgtaagtactgttagaacatgaactaattagctataattttgtgagcgataaacaatgtctggggtatttttgaggtcattacaataattcaaccttgctcccctttggggctaaattctccattatgattcttaattcttcatctaacttctaatttgtactaaacataggtaagatgtgtggtttttagaaatgggtacagacacaataaatacaggactggggaatatcttagttatcttcataaagtgttaggatgctcaagaatcaaatgatgtaatgcaacttgctctgataaactttacttctccttggaccatgacacatctctaatgactttcctaaaccttgtcctgctttttaaatagatttttacaagctctgaatacatctaacctagtttttttttaaagcattacatttctctctctctctctctctctctctctcccctctctctctctctctctctctctgtatgtgtgtgtatatagttgcacatgtgccgtggtctgtgtgtaggtttaaaggggttagcttttttttcaaccatgtgatttctgggtgctgaatacaagttgttgggtttgctggcaggcaactttacttgttgagctatttctctggccatcttttctaagtttaagactactgtggttattttgcaatttttcctgcatccccagctgttgtggagattgacttttgcattttgataaaagttcgttctttctctctcaccatccccaactcccatcttccaccccctctctttttcctccctcctccctcttcaattatccctcctcactccttactctccattctctatcctccttttttcctctccagtcatccctcctccctcctcacccttcatcccctccctctctttctttctgtcttctctgtgttctgcatgacagtggcacttaagtcagtctgcgaagtaaggatctttctaccaaagggtaattatttggaagcagtgtgtatttgctatttggcccttgataaacaagcttctttaagatagtttcaatatagtttctgcactcaacaattgtcagccaaggatccagttgttatctggtgaggtgaacggatgagaatctcctgcctccaccacgatgcatcacagtgttctgaaaagcgagtaagaaccagtaatggaattcatatcagattgggtgctatacttgacattcaagaataaatcacaccatgataggttcaataccttgaactttatcgggattgttcaggctgaagtagagccagaggaaaggaatgcagaaataccatgaaggaaagactggtcctaggacagggctactactctcaggaacatctagtctttgagtggtactggcttggttcattctgaaatgtgtggattattatttgggaggactcatgtgtttaaaagacacagaactaggtattaagtatacagagaagagatacattccctagtattttttatttatttatttatttatttattatattatatgtaagtacaccgtagctgtcttcagacactccagaagagggcgtcaaatcttgttacagatggctgtgagccaccatgtggttgctgggatttgaactctggaccttcggaagaacagtcgggtgctcttacccactgagccatctcaccagccccattccctagtattgactcttttaatgagaaagtctttgcttgagccaggaaatgactcctttaggaataagcatgctgaagaagactagctgttgttatgccaatgtgaagagggagatgtttctcttaaaattacagcagaacttcccaactactttgactcagtagtacccacttttttattttcctccagaactgctggtatttgtcagctcaatattttagaaactgatttcagctaactgcaaggatgaaatgagtctgcctcttaacgactctttattgcatcgctctttttcttcagtaatgtagagtatataaatcgatttgaagtgtcagagttcatccgtgagaagtcactcaaaggaatatgctgttggtaagccttaagagctagatgtgcatttgcttcacccaggaaaccattagttaggatgaactgtgatgaagtgtacggctgttactctgggatggcccaatgggcaggctcttgactgagagaatgtaattgactggtgatgactcatctgaggctgggaacagtcatccatgaccaaattaaagacaacgggggactttatgtgtacccagctcttccctcatcagcatgaggcaaatgagacacatgggacgctgagggagaccaactgtttcttttccaagttacagaaggagaaatggcacaattgagtctcaggactgttcaggaacgggcaaagagagagaacttcacaggctgaacctgagtgtcttattttttcctcttggctccagaatgcttgccagcaggaggctcatcactaagatattacagggaaatgaagccaggcaagaagaccatgtattgcttttctcctcctcgccccataaattttgttattaataaatcagattcttatagaacagcctgtcacagctgcctctggaaacaaggttttattagcagactttttattaaaataggacacacggtagttttaagggtgagcactgtacttttgagtggaaatggatgtcacagaacagtcatgtatccattgcctaccagctacttgcttaggccttaatgcttggatttcattgctgggataatgcgatatgatttgatatgtaagttgaggggtagaaacctgcggtgaagttttgcctgtccatgttttctgccacgatgtccgggtaaatgcagaaaccgttcagtgctatgtgatgacttcatctttgttcgctacatttgccacaaggaactcattttttttttccttttttttttctattttttattaggtatttaactcatttacatttccaatgctataccaaaagtcccccatatccacccacccccactcccctgcccacccactccccctttttggccctggtgttcccctgtactggggcatataaagtttgcaagttcaatgagcctctctttccagtgatggccgactaggccatcttttgatatatatgtagctagagtcaagagctccggggtactggttagttcataatgttgttccacctatagggttgcagatccctttagctccttggctactttctctagctcctccattgggagccctatgatccatccattagctgactgtgagcatccacttctgtgtttgctaggccccggcatagtctcacaagagacagctacatctgggtcctttcaataacatcttgctagtgtatgcaatggtgtcagcgtttggatgctgattatggggtggatccctggatatggcagtctctacatggtccatccttttatctcagctccaaactttgtctctgtaactccttccatgggtgttttgttcccaaatctaaggaggggcatagtgtccacacttcagtcttcattcttcttgagtttcatgtgtttagcaaattatatcttatatcttggttatcctaggtttggggctaatatccacttatcagtgaatacatattgtgtgagtttctttgtgaatgtattacctcacgcaggatgatgccctccaggtccatccatttggctaggaatttcataaattcattctttttaatagctgagtagtactccattgtgtagatgtaccacattttctgtatccattcctctgttgaggggcatctaggttctttccagcttctggctattataaataaggctgctatgaacatagtggagcatnnnnnnnnnnnnnnnnnnnnnnnnnnnnnnnnnnnnnnnnnnnnnnnnnnnnnnnnnnnnnnnnnnnnnnnnnnnnnnnnnnnnnnnnnnnnnnnnnnnnnnnnnnnnnnnnnnnnnnnnnnnnnnnnnnnnnnnnnnnnnnnnnnnnnnnnnnnnnnnnnnnnnnnnnnnnnnnnnnnnnnnnnnnnnnnnnnnnnnnnnnnnnnnnnnnnnnnnnnnnnnnnnnnnnnnnnnnnnnnnnnnnnnnnnnnnnnnnnnnnnnnnnnnnnnnnnnnnnnnnnnnnnnnnnnnnnnnnnnnnnnnnnnnnnnnnnnnnnnnnnnnnnnnnnnnnnnnnnnnnnnnnnnnnnnnnnnnnnnnnnnnnnnnnnnnnnnnnnnnnnnnnnnnnnnnnnnnnnnnnnnnnnnnnnnnnnnnnnnnnnnnnnnnnnnnnnnnnnnnnnnnnnnnnnnnnnnnnnnnnnnnnnnnnnnnnnnnnnnnnnnnnnnnnnnnnnnnnnnnnnnnnnnnnnnnnnnnnnnnnnnnnnnnnnnnnnnnnnnnnnnnnnnnnnnnnnnnnnnnnnnnnnnnnnnnnnnnnnnnnnnnnnnnnnnnnnnnnnnnnnnnnnnnnnnnnnnnnnnnnnnnnnnnnnnnnnnnnnnnnnnnnnnnnnnnnnnnnnnnnnnnnnnnnnnnnnnnnnnnnnnnnnnnnnnnnnnnnnnnnnnnnnnnnnnnnnnnnnnnnnnnnnnnnnnnnnnnnnnnnnnnnnnnnnnnnnnnnnnnnnnnnnnnnnnnnnnnnnnnnnnnnnnnnnnnnnnnnnnnnnnnnnnnnnnnnnnnnnnnnnnnnnnnnnnnnnnnnnnnnnnnnnnnnnnnnnnnnnnnnnnnnnnnnnnnnnnnnnnnnnnnnnnnnnnnnnnnnnnnnnnnnnnnnnnnnnnnnnnnnnnnnnnnnnnnnnnnnnnnnnnnnnnnnnnnnnnnnnnnnnnnnnnnnnnnnnnnnnnnnnnnnnnnnnnnnnnnnnnnnnnnnnnnnnnnnnnnnnnnnnnnnnnnnnnnnnnnnnnnnnnnnnnnnnnnnnnnnnnnnnnnnnnnnnnnnnnnnnnnnnnnnnnnnnnnnnnnnnnnnnnnnnnnnnnnnnnnnnnnnnnnnnnnnnnnnnnnnnnnnnnnnnnnnnnnnnnnnnnnnnnnnnnnnnnnnnnnnnnnnnnnnnnnnnnnnnnnnnnnnnnnnnnnnnnnnnnnnnnnnnnnnnnnnnnnnnnnnnnnnnnnnnnnnnnnnnnnnnnnnnnnnnnnnnnnnnnnnnnnnnnnnnnnnnnnnnnnnnnnnnnnnnnnnnnnnnnnnnnnnnnnnnnnnnnnnnnnnnnnnnnnnnnnnnnnnnnnnnnnnnnnnnnnnnnnnnnnnnnnnnnnnnnnnnnnnnnnnnnnnnnnnnnnnnnnnnnnnnnnnnnnnnnnnnnnnnnnnnnnnnnnnnnnnnnnnnnnnnnnnnnnnnnnnnnnnnnnnnnnnnnnnnnnnnnnnnnnnnnnnnnnnnnnnnnnnnnnnnnnnnnnnnnnnnnnnnnnnnnnnnnnnnnnnnnnnnnnnnnnnnnnnnnnnnnnnnnnnnnnnnnnnnnnnnnnnnnnnnnnnnnnnnnnnnnnnnnnnnnnnnnnnnnnnnnnnnnnnnnnnnnnnnnnnnnnnnnnnnnnnnnnnnnnnnnnnnnnnnnnnnnnnnnnnnnnnnnnnnnnnnnnnnnnnnnnnnnnnnnnnnnnnnnnnnnnnnnnnnnnnnnnnnnnnnnnnnnnnnnnnnnnnnnnnnnnnnnnnnnnnnnnnnnnnnnnnnnnnnnnnnnnnnnnnnnnnnnnnnnnnnnnnnnnnnnnnnnnnnnnnnnnnnnnnnnnnnnnnnnnnnnnnnnnnnnnnnnnnnnnnnnnnnnnnnnnnnnnnnnnnnnnnnnnnnnnnnnnnnnnnnnnnnnnnnnnnnnnnnnnnnnnnnnnnnnnnnnnnnnnnnnnnnnnnnnnnnnnnnnnnnnnnnnnnnnnnnnnnnnnnnnnnnnnnnnnnnnnnnnnnnnnnnnnnnnnnnnnnnnnnnnnnnnnnnnnnnnnnnnnnnnnnnnnnnnnnnnnnnnnnnnnnnnnnnnnnnnnnnnnnnnnnnnnnnnnnnnnnnnnnnnnnnnnnnnnnnnnnnnnnnnnnnnnnnnnnnnnnnnnnnnnnnnnnnnnnnnnnnnnnnnnnnnnnnnnnnnnnnnnnnnnnnnnnnnnnnnnnnnnnnnnnnnnnnnnnnnnnnnnnnnnnnnnnnnnnnnnnnnnnnnnnnnnnnnnnnnnnnnnnnnnnnnnnnnnnnnnnnnnnnnnnnnnnnnnnnnnnnnnnnnnnnnnnnnnnnnnnnnnnnnnnnnnnnnnnnnnnnnnnnnnnnnnnnnnnnnnnnnnnnnnnnnnnnnnnnnnnnnnnnnnnnnnnnnnnnnnnnnnnnnnnnnnnnnnnnnnnnnnnnnnnnnnnnnnnnnnnnnnnnnnnnnnnnnnnnnnnnnnnnnnnnnnnnnnnnnnnnnnnnnnnnnnnnnnnnnnnnnnnnnnnnnnnnnnnnnnnnnnnnnnnnnnnnnnnnnnnnnnnnnnnnnnnnnnnnnnnnnnnnnnnnnnnnnnnnnnnnnnnnnnnnnnnnnnnnnnnnnnnnnnnnnnnnnnnnnnnnnnnnnnnnnnnnnnnnnnnnnnnnnnnnnnnnnnnnnnnnnnnnnnnnnnnnnnnnnnnnnnnnnnnnnnnnnnnnnnnnnnnnnnnnnnnnnnnnnnnnnnnnnnnnnnnnnnnnnnnnnnnnnnnnnnnnnnnnnnnnnnnnnnnnnnnnnnnnnnnnnnnnnnnnnnnnnnnnnnnnnnnnnnnnnnnnnnnnnnnnnnnnnnnnnnnnnnnnnnnnnnnnnnnnnnnnnnnnnnnnnnnnnnnnnnnnnnnnnnnnnnnnnnnnnnnnnnnnnnnnnnnnnnnnnnnnnnnnnnnnnnnnnnnnnnnnnnnnnnnnnnnnnnnnnnnnnnnnnnnnnnnnnnnnnnnnnnnnnnnnnnnnnnnnnnnnnnnnnnnnnnnnnnnnnnnnnnnnnnnnnnnnnnnnnnnnnnnnnnnnnnnnnnnnnnnnnnnnnnnnnnnnnnnnnnnnnnnnnnnnnnnnnnnnnnnnnnnnnnnnnnnnnnnnnnnnnnnnnnnnnnnnnnnnnnnnnnnnnnnnnnnnnnnnnnnnnnnnnnnnnnnnnnnnnnnnnnnnnnnnnnnnnnnnnnnnnnnnnnnnnnnnnnnnnnnnnnnnnnnnnnnnnnnnnnnnnnnnnnnnnnnnnnnnnnnnnnnnnnnnnnnnnnnnnnnnnnnnnnnnnnnnnnnnnnnnnnnnnnnnnnnnnnnnnnnnnnnnnnnnnnnnnnnnnnnnnnnnnnnnnnnnnnnnnnnnnnnnnnnnnnnnnnnnnnnnnnnnnnnnnnnnnnnnnnnnnnnnnnnnnnnnnnnnnnnnnnnnnnnnnnnnnnnnnnnnnnnnnnnnnnnnnnnnnnnnnnnnnnnnnnnnnnnnnnnnnnnnnnnnnnnnnnnnnnnnnnnnnnnnnnnnnnnnnnnnnnnnnnnnnnnnnnnnnnnnnnnnnnnnnnnnnnnnnnnnnnnnnnnnnnnnnnnnnnnnnnnnnnnnnnnnnnnnnnnnnnnnnnnnnnnnnnnnnnnnnnnnnnnnnnnnnnnnnnnnnnnnnnnnnnnnnnnnnnnnnnnnnnnnnnnnnnnnnnnnnnnnnnnnnnnnnnnnnnnnnnnnnnnnnnnnnnnnnnnnnnnnnnnnnnnnnnnnnnnnnnnnnnnnnnnnnnnnnnnnnnnnnnnnnnnnnnnnnnnnnnnnnnnnnnnnnnnnnnnnnnnnnngtctatttggagttctgtaggcttcttgtatgatcatgggcatctctttttttatgtttgggaagttttcttctattattttgttgaagatattagctggccctttaagttgaaaatcttcattctcatcaattcctattatccgtaggtttggtcttctcattgtgtcctggattacctggatgttttgagttaggatccttttgcattttgtattttctttgactgttgtgtcgatgttctctatggaatcttctgcacctgagattctctcttccatttcttgtattctgttgctgatgctcgcatctatggttccagatctcttacctagggtttctatctccagcgttgcctcgctttgggttttctttattgtgtctacttccccttttagttctagtatggttttgttcatttccatcacctgtttggatgtgttttcctgtttttcgttaatgatttctacctgtttggctgtgttttcctgcttttctttaagggcctgtaactctttagcagtgctctcctgtaattctttaagtgacttatgaaagtccttcttgatgacctctatcatcatcatgagaaatgtttttaaatctgggtctagattttcggttgtgttggggtgctcaggactaggtggggtgggagtgctgcgttctgatgatggtgagtggtcttgatttctgttagtaggattcttacgtttgcctttcgccatctggtaatctctgaagctagctgttttagttgtcactgttaagagcttgttcttcaggtgactctgttagcctctataagcagacctggagggtagcactctccttagtttcagtgggcagagtattctctgcaggcaagctctcttcttgcaaggcaggtgcccagatatctggtgttcgaaccagactcctggcagaagttgtgttccactcactagaggtcttaggatcacatgtggaatcctgtgtgggcccttgcgggtgtcaggcgactcagctggcaaggtagcccggggctcaagtcgagcggaagggacttgtgccccagatcaggcccgggtagccttcttccctatgtaccacagtctcaggttccgcgcgattggattggggcaggcgctgtgttccactcaccagaggtcttaggatcccgtggggagtcccgtgtgggcccttgcgggtgttgggcaagactctgctggcaaggtagcccggggctcgagtctcgagtcgagcggaagggacttgtgccccagatcaggcccgggtagcctgctttcctatgtactgcagtctcaggttccgcgcgattggattggggcaggcgctgtgttccactcaccagaggtcttagggtcccgtggggagtcccgtgtgggcccttgcgggtgttgggcaagactctgctggcaaggtagcccggggctcgagtctcgaaaggaactcattttaagcaaggtgacaggtcagagcaggatgatgtgacactttctatggattcagttgggagtaaatgccattccaatgtgacttggttaaagaaagagaggtttctactctccatgcatttgctttgtagaattaatttcaaaagttgaattgatgtctacatatgttcatggtatttgtagagaaaagtctccacggtatcctgcagtggagtctgtcctgtgttttctgttagacccttggctttctccaaggcataactgggctcttgtgaatttgtaaatcatgtcctgtgctggagcaggcatggcccggcagtgtgctaattacatttctctactcacacagctgcagctgttcctgtccctcactggtgagtggctattgccatagcatgcaggaagctagctgagggcctttaaatcagaggaacttggtctgggcttgggctccggttggctccggttctcctgctgcaaatggacagtggggtagggggacaagcatggtgaaattttactctcagaaggaaccatttcccatccagacctatgcaagctcaagggcaatgggctcactactgttcatcacgccagaagaccctgtgttaaaataatgggccagtaaattggaatttgggatgtggcagatgacactagaggacattgtggtcatgcataaatgagttggttattgagaagttgcaagatagatgtctgggctggaagatgacagaattaacttataaaaaataacacttgaaacagctgaggttaacacatggttagttgggatagtagcctggtgggagagttggtgattaactaatttcaaggaaaattgaatccatcctattatacactaatgaactaatcttgtctattcatctgtacaacccctccctcacattgacagatttccagtaaatttagataatgagaacaaaatgtggtgataggggaacaggagaaggattcaatcacaaacttaaatcataaatgatttaggcagatgactataccaaagagtcaacacagaaaggctggctagaactgacttcttatacctagtagctactctgactttgtgaagggaggtgcttcaacagacagactcctgtagtcattgcttttcagtttctgtgataaaacaccatgaccaagggaagttatagaagaaagggcttattggaatacaattccttcatggcagggaggcatgacagcaggtgggcgtagaggttggaggagtaagttgagcattccttcaggtttcaaatgcaaacaagaaataaagacagcaaactgtaaatggtggaaggctttaagccagtggttctccaccttgtgagtccttgtgggttgtatgtccaatattctgagtatcaaataattacattatgatttataacagtagcaaaattacagctatgaagtagcaatgatataattgtatggttggaggtcactacaacacaaagaactgtattaaggggtcatggcattaggccatttgagaaccactctttaatctctcaaatttcactccccagggatgacacttctgcagaaaggctgcctcttaaaaccctcccaaagagtgccacaagtggggactcagggttcaaataccagagaacaaagggaacgctctaaactacctcagcctgctttaagaattgttaaagattcatcaataactgatagcacctcaaacacatttaatatgtccgagaagttattatatttttcattatgattgtcaggtatgccctgtgatgtttaagtattgaactaatgtctctccatggcagtctagcagagactcgggtcaaaagcaatggtgtaaatggcagatgtagtttgtactcctgatatctgcaattgagccatctgtgaccatttgttgtgatcattttatttctctaactggagaagtttttgatttaaaattgtgttaaagcagaaaaactggaagctgtacgtctagaactcagtaatgataaagcgtttcattttctactgggggggattagtgtaaatggggctcgaattgggggggggggttatgtaatctatcatctgggagtgaatctttttgcagacatgtttgtagtggtctagaactttctgagagtgttaactctggaaattgctataatcacagtacaatggctaatgaggcctgggacagaaagaactgggttacattttataagtgagcttgcagcatgttatcccttcccccactgaatgcgactctagctgtgcaatcaaaccattaagctgtaaggtaacttttttttattttaatttggacaaggaagagaggcattgtgtactactggtttcgtgattagtccagagagtctgaggagatgtcctggggggtgggggacatttggcaggactggaacagatgggtaagaactaagtaggtatatcaggaacatgcaatggagaaagagtaacctaggcacacatacctgtataaacacacacacacacacacacacacacacacacacacacacttaggacagtggcttgtctacccaattactaaccctgagtctgaacactggggtagaatgctttttagcaacaggtagaatctctgtcattttgatttacaggtgttttgatggctttatttttcaccattactaacacgttagtgttcaacttctacaatgaaatcattcttatgaaactacaattcgacttaactgtcaagtagggtgactgtgcctccctcagacagtacaaatggcagaaactgctcattcctgacatgacaagacagcagaaagccagctttaacatcatgcaaatgttcctgtgcttaactacattcaaaagcaaatgtattttggattagttaaggatttacagaaaatttgcaaagatgacatgatgattaatttaattgtaactgaattgcagcaagaaatacctagggcattgttgaagcacagctctcaggaattgtcagagaggtttagctgaggcgagtaagccccatcctcaattctatccatcccacaagctgaggtcccgggcagagtataaagggggagatagaagcagttgacaatggacactctcctttctctgcctccaagctgccactttgctgcaccttcctttccaactgcatgcctctgaagtggaagtcaggatggactcttctccagggcttgggcaatggcccagttggtaatgtgcttgctgtacaaggctgaaggcttgagcttggatcactagcactcatgaaacaactggagatggtgaggaacttgtgtaattgtagccctggggtaggagtgtggaaacaggtgagttaagcagccagtctagctaattgatcagctctgagttcagctagaaaccctgtctcaagtggtaagaaagaagtaactgaaaaagttaactggttttgaccttggcctttatcacacacacaggcacatgcacaagcagacaaagaaagagagagatagagagacagggagacacagagagagatcacatccacacacacacatacaattggtaaatattttctcatttaatttgctttttgtcaggtatttgatcaatgaagagaaatgtaactaacatggacccagggaattctcatgtcctgctgacatccctccattattaacatcttacataacatggtacactcttcacagcatatggacaaattctatagcatttcatttactaaagtcatactttatgctgccaaatttctgcctaagccatcagaatttagtacaattaaaagccacacctccttaaataccccttaatggtacccatgtttaatgtccagggtgcatctagtagctatggatcaagctttcatagaatgtctcaccatgtggattgggtgatggttttcacatgatcagagtgagggcagtgttttggggggtggggataccaggaacgttacacatggttcttattacatctgtatgaagagagttatgccagcatggcctagcaccattgaagctcttaaataccagcctttggaaggaagttaacatgggagcttgcacttaaagactgtgaagtcatgttccattaacataagagtggattaactacacaatatttttaaaaggacctgctgtatctattaaccaatttatttgtttatataattataaataattattttctttcatctacaaaatctcccgtgttccccatgcctgttctgacccttcttaccccttagactcaagtcctcctatgttctagatctttctggtatcatctgttttgggatagcctatcattgctgtcatggctgaggtttcagtctggctgcttgtacttagccataggcgccagctttgttctcatcttttcatggcttgataactcattattgttatgcaacaaatggtgttcttttatatgtaccttaaaaaaaaaaaacattgactcagttgtgatggacatcttagttgtttcctgtctctggcaattaagaataaaattgctgtgaatattttcatacaggcttttctatcagcatgttttcaaaacaggaagaggctacaaaatgatatctcttatatcacttgggttatatttgctttgcttcataagaaacagccattttgtttctctaagtagccacaacgctttgcatcctcaccagcaagaaaccatcacttgtgcctctccacagcttttgcagtaactggttgtgttatgtttcagattttagttatcctggtacatgtcatgagacttaatggcttctgcttttatgaagaagattataaagaatttatatttgttatttcttaaatgcacagtagcaatcattgcaaagccatgtgattctggaagtttcttcttcgacacattattaattattcacgttacaatcttcctttattgtctctttattgtcagaggggccctaatggtgatcctttttatgcttacgactgctagtttgtgactttccttttcttaattattcttgataaaagtttttaaccaacattatcttgacgaagaaacagtttatatttaactgacttctaatgtgctattgcctttctactttatttttattcatattttattaattttttgagaatttatgcactgtattttggtcacactctcttctgtaggtctgcatccactctgtccaccatcacctacccattcacccaattgtgagttctcgcccgccccactcccaactgagagccattgatgctgcccaactactcatgggagtgggtcaacccaagagagtggttgacctatcaggggtcacaccattacagaaaggcaacgctccatctctcagcagttatcaaatgtctgtagttcctctgctactggtgggctcacatgtctagtttctcattccgtgctgggattttgcctggcttcacactgcagggatcttctgtatgccatccccattaccgtgagctcactggtgtgacaatcttgtgtgcagaaaacactgtttccttgaattcatcccctatctctggctcctacaaagtttctcactctatctcccatgtaaaccactgagccttgcacaagtccaatttacggatgaaagcttcacagtccccgttctgcatggtgaccagggctagttgttttctgtggcaaaaagaagtctctctagtgaggggtgatagattcactgatctttgcatgtaacaataaggcaccaggagccattttagtactatgtccatgtagcagaatgattatgttagatgacccctagggccaatgacttgcttagccacaggtgcttagccctgttcacatctcacaaagcaggcctaattattatgcttttatgtttcctttgggatccccaactgttaaagcctctttattgaggtttctaatgttaggttacaaatatgatattttccctcttattcatatattcatttacatctctggatttttctataagcacctttcccttcacctcaatatgttttatatttcatttttatttttacttcattcaaaatatttacaattactttgagtcttcattttccagacacaatgccctttaaaagtgcactgtttaatctcaaaatatttgggaatttcccaagaatctttcacgtaaccaatttctggcttattcttattctggtgtgagaagcatgctctctatggtttctgttttttatattaaaaatgtgttttatgttctaaacctgacttaaatgtttcataaaagctcaagaaaaaatatgtattttactgttgtttgatggcatattttagaaatagcaattagatctacttcactgataaagtgctcagctgtatctatattgatttttgcttggtggaactccacattttgagcagggaagaaaagtctaaataaatcgatgactttgactttccttccaattctaaagctttattcttaggtacatacataatcacccttgtattccatctggagaattgatgtttatattgtcctgtaatccacacataactcttcatcatgtctgccttttgaaatctcttcggccccaattaatatggaggctacagctatattttgatcagtgtcatagggcctccctctctgtccttttatgttgaacatatccgattcttgataattaacggacattcttgtacaaacccataatccaatcttgacagtctctgtcttttaattggagtctttagaccatttacatttaaagtgtttactgatgcattatttttgccatcaaccagatgcatctttttgttctcccctggtttcatttgagcattttatataattctgatttgtcattgcccttcaaaaatccaatatatgccaaaatgatttcatgaagtgtctccgctgaagtttacactatacattcttagctagttggggaacctattgagctaacacaggtccattttacaagtagcatagacacatcctggcaccacatgcccatcttccttctgtcttggaaccattgctgtcaagcccgttcactctctgcacattacactgaatacatggcaattattttaaccacagagatttttcaaaagaactttccagaaatttaatatattttcttttgttctctcttactccttccatgcttaggtagttataaatctctgccctttaaataaaagaaaatcttaacatctcccatagggcaaacttcctggtaacgtctctcagtttttgcttgactgattttttttaacttctctttcatgtttaacagataatttccctaggtctggaattccagactggccacttcctcaggtatctgatgtgtttcccggtgcacatctctgatggcttctttcctcattctctattagcagatgatccccatctctgctggtctaaaaaatggttttctttgttcttccacaccttggaggtgttgttcttttcctgagtgattggaattgatagtttgctgtctgttactaactatggaaagttctcggccacataactgacatgtttcttgctctttctttgttgtcattcattcaaaccttacactttttattctgctggacttctatatttgctggtttggcacacagctattgatttatcatccagcttactaatgtttcattggccacactgaagaactgaagacatcctttatttttactacagtgtttggggcctgaggacatagtagacagtagataactgattaacccttgtgaattctgggttccatctctgagtacaaaaaagtactcatagcaaactttaaaaaaattctaacatttgctttcttaaaaaaaaagtcttgataattttgctctatgcctctcttattttcctatgttgtcttttgctctattcctcttctattctcctatgttttccatcttcccagtcaggcatcctatgctttgattgatgctatcatgtgtttgaacatttgactgtacaaacaggttgctagggacaggccctgggggttatagcctgacatcacttctgcttcctgtaccatcaaaatgtgaacccaccatgcttttacctcctagttatattaaaagagctaccctagttccctatgctaaactctatccttttaacatgtgagccaaaacaaagccttcatcctctcagttactcctttcaggtacctgttcacagtgtcaagactgttcacaagaaatacgggaaccttaatcacgctgttttaaaaattcctctctcttcaaagtccacatccaactcacctgccagtctctttggctttactttcacaatatacgcagagctcaggtcctctcagccctcagtttcctcatcattacgtcaagtgtctatgatctactacctggtcattgacatgatgtcaaaaggcttcttattctgtagccttgcctttgtctctaaagtccactgtgatggtctgtgtatatttggcccagggattggcatgattagaaggtgtgaccctgttggagtagttgtgtcactgtgagtgtaggatttatgaccctcatcctagctgcctggaagagagtattctgttagcagccttcagatgaagatgcagaactctcagcttatcctgtactgtgtctgcctgaatgctgccatgttcctatcttgttgacaatgaactgaaccactgaacctgtaagccagccccaattaaatgttgttctttataagagtaaccttgatcatggtatctgttcacagcagtaaaaccctaaataagacatccacctagaagaaacacagtgatattttaaaactaaaagttctatcaggtctcttttctgcacataatccctggcctctcccgtctcaggattcagtgcatgtcttagccctggtctcctgggctctgtgcttccctatctactttagtggggatgaatgagtgggaggggtgctgtaacagtggtcatgtttcccatctctgtcccatcctccttcttgtctactgatagccttcagagttggttcttcctccagttccagagctgagcgctctgctcactctgctctgatctccaatctcagagatgcatttcctgctttaactatctctcctatccttaccacctcagtcttccctctcgggacctatcaattcctgatattatttatttgtttaatgtccatcttccttgtacaattaaagaatattggagtagagagactgccattttaccccacagcagtgtctggccataagtattttgggttgtatgaataaatttaaaaaattgaagctgaattatagtacatcatttctgtgaccatgcattagtaaattacacagaaccttgtccaaggaacagcggttcttccagcagttgtccctcagtcctggctccttaggagacaagtcatgggaagcgtgattgggagagctaactttgataagcccattctagcctgactactacatgtagggaaaatagcccatcttaatatatttaatattccaacacctaaggtctatgtaaagtgcataaataatattattagtgcaaaaacgaggaaatgcccttttaaatgtttccagaccagggtttatagaatttagaatcactaataagaaacatcacagctggtaattgcagtaattatacattcatgattgcatctacaatgggacagtagaagcagtgacctccagggattccaggatcatttgtaaacagagcttacttcatttattttatggattagcactgttcataggcttgcacacattgcagccatctgtgtttcccgagacaggttgctgtgagatgtctaagtgtgggcctgaagccagtgtgactaggtttaagccccagttctccatctctgtttccattctactttctgtagtgaggattgaatacaaggccttgccgttggtaggcaagtgttctaccactgagctacacacccagtctggtctcagtttccttggctattgagagagctgtgctactactaaactgacattgtgtctttgaaaattaaattatgtcatttaggccaagagcttagatgagcacctgctatgttgccaatactcaacaaatgccagctatttttatttttatttatttattttttaattaggtattttcttcatttacatttccaatgctatcccaaaagtccaccataccctcccctccactcccctacccacctactcccacttcttggccctggcgttcccctgtactgaggcatataaaatttgcaagaccaaggggcctctctaatgatggctgactaggccatctactgatacatatgcagctagagacataagttctgggggggtactggttagttcatattgttgttccacctatagggttgcagacccctttagctccttgggtactttctctagcgcctccattgggggacctgtgttccatccaatagctggctgtgagcatccacttctgtgtttgctaggccccggcatagcctcacaagagacagctatatcagggtcctttcagcaaaatcttcctagtgtatggaatggtatcagtgtttggaggctgattatgagatggatccccgggtatggcagtctctagatggtccatcctttcgtctcggctccaaactttgtctctgtaactccttccatgggtgttttgttcccaattctaagaaggggcaaagtgtccacactatggtcttcgttctttttgagtttcatgtgttttgcaaattgtatcttgggtattttaagtttctgggctaatatccacttatcagtgagtacatatcatgtgagttcttttgtgattgggttacctcactcaggatgatgccctccaggtccatccatttgcctaggaatttcataaattcatttttttaattgctgagtagtactccattgtgtaaatgtaccacattttctgtatccattcctctgttgagggtcatctgggttctttccagtttctggctattataaataaggctgctatgaacatagtggagcatgtgtctttcttaccagttggaacatcttctagatatatgcccaggagaggtattgcaggatcctccagtagtactatgtccaattttctgaggagccaccagactgatttccagagtggttgtacaagcttgcaatcccaccaacaatggaggagtgttcctctttctccacatccttgccagcatcttctgtcacctgaattttttatcttagccattctgactggtgtgaggtggaatctcagggttgttttgatttgcatttccctgatgattaaggatgccagctatttttataatgattattagtgttaatggtttcaagtaatacacattggatctttaaagtgatgtggttaggtcacagatttgatgggcaaactcaagaaccagactttggcaatgggtaggacatggcagccacccagacagcatagagttggggagcaggctgtgggtggggcccgtgagtgatccattctcaccctagacttcaaggccatagagagcagtggttatccagtttgtacttaaaggcaaaatttgactcctaccagctcatagtagagaaattactcaatgtaggacgatgcttaggaatccaggaagccaagaattaacaaatgcctattataacaattattgaaattttatttcaatatttgttgatgaaatctcccatcatcccccagtccttcttaattcctgtcattttaaatgctttgtggtgtgtctgaatgactaaaatcctgaaactgcacgtgttccttgggcatcaccttgccaatgtaactgtctatattgagtgggatgatttatcccctatagaggaatgggttctcagtacaagctgggaaaacattcctgtttaggataattgatgaaataaagcacagattggcatgattgaattgtgtagggttttaataaatctacacatatgcatttggaggtgcacctgcctcttttgcagctactggcatgagctacagttccaagtttcacttcaaatataggcagtgatgctgggtagagtgaaccataagatggcacggttggacaaggaatggttttttttctacagatgtgggaggtagaaaactgtccaaagcgtaggcagactgcaagcagtgaaccacaatgtgaagaggctgagggagccacagagtgaagaggccaagggagccagtttctggagcctgtgcctctgagcttaccacattgaggagagggaggtcacgggatgtgatgtggttgtcttgacttactgaaatatacttttccttctccccaccaagatgtgctaagtgggtcttgaaattaattttgctcactattctttaccaaagagggaagggaagtaagatctatgatgggaaaatcccaaaagagatggagaatctcacactgacagtttgatagtagagaaaatagaagaacaggagggtttttttcccactctaaagatgaaagtaattcttagactctctgcatatgtttgaaacagagggatggacctaagttaccatcctgttagaagtactatttacaaataaaacctggaaaatgataaagacacaacttgttttaaatgtcagatgcctagaagcacatgatggtatttcaaggaaataaacctagcaattcctatttaaactagcatcatcccctaaacccaatacctatctgtgcatgagctcacactgtcctggtcctggacgctcatcataccctctctagattgcactctctcttctgccacctttatctgcttgacttctagacatcctaagcttgttaactttgtgcctatggcaatgagtcagtttcaaaactggtttatctaaaaatcagaacaaagtcaactccctctcagaggcagcagtgagttcaaagtaatcgctgagagggtccaggctgcagtctattagcatgtggcacccaaggagaaccatcaccgcaagtcttgcctggcactttccaacattcctcccacaggacttttgtgaggtctgattactttaaaacagccttctgtatagtgcacataaagtacttaagatgggcatcacatgctcagtgcacattagtgatccaaataacaatctctggtgctggagagacagatcagccattaagagcactagctgctcttccagaggactcagatttgattctcagcacccacaaggtagctcgcaaccacctgtcactccactcccagagaatctgacaccctcttcttgcctccttgggctccaggcatacagcggttcccaggcaaaatatcacccatatacatcaaaataataattcaaaatattagtgtttattattattacttaatccaagatgtgcatgcagtaaatgctcatttttgtggatgaataattaatgatttatcactcgggacagatatgagaacttcattcttcattgtcacttgtcaagaaactggaacacatatatagaaggatttttaaaaagatataattttattgttttcaggtctgaattagatatattaactgacaatgtattcctctgacaaaacaattgatatatgatgtttatttttcatgtgttcagtgttaaaaatatttgaattagccaagcacagcagtacatgcctttcatctcagcacttaggaagcagatgcagatgtatctctgtcgttcaaagccatcctggtctacacagccatcctgctctacacagcaagttctaggacagccaggcctatatacagaaaccatgtcttaaaacgaaacagagcaattgtagtaatgttttactaaagtgataattccttccatgtaagtctaaaacttcatctctaacttagtatctaattttggagagataagtttggaagaaatatagaagctcagcttcatctttggcctttgaaatagttatttttgttgataacatttggtcaggacagaatggcctttttctgggtaagactctgagtcaaaggctcaaagaatacacagaagaaaaattggtccacctgctccctttgtgtctctaatttagttagtgagagtcacaggtgggtaaacctttggaagaagattatttgaaaactatttgaaactttcatatttcaaaaaatgtatttgtggcaaacttgtagccacaaacactgacagacttgggccagttcctattaaaacagcacagcagccatgagaatttaaccaagctgacccagggtccaggaccatactgcatcatgagtagaacagcagctgtagcgtccccagctaggagtctgttaggtgatgtagttacctagtggtgtgtgtgtgtgtgcgtgtgtgtgcgtgtgtgcatgtgttgtactgcatgtgcactgcagatgttcgtgnnnnnnnnnnnnnnnnnnnntgtttgcagaagtcagaagatgtctagtaagattacacacacacacacacacacacacacacacatgtcaagaacaatgtactaatgtacatggtgtaatatttacaccagagaaagcatttcagtttcctcagaggcttatcatgactctttactgtttgttaatatttttagcttctttatgacacacagttgggtctcattacctggtcactgcactgtgcaacagaaccctgaagcttacttctcctgtgtggctggaactgtgacctggctacacttactgcacgcttccttcagccccactctcccggcttccagggacaagcattgtgctgtccgtgtctgggatgactgtttacaatgtgctcgaggagcttttcatccaacacaccaccttccagctccacccagtttgttgcaatgacagaatgccactccttttgatggctgaatagtgttctgtggtgcataggtaccacattctttttactcatcccttgctttatgggcacttactttgcctctatacttgcagcacagtattcattacttagtttatgggcacaacactgtctctctctctctctctctctctctctttttttttctgagacagggtttctctgtatagccctggctgtcctggaactcactctgtagaccaggctggccccgaactcagaaatccgcctgcctctgcctcccgagtgctgggattaaaggtgttcgccaccaccgcccgccctgtctctatttcttagggtactgtattagttcatcagtttatggacattgcctctatttcttgggggcactgtgaatggtgttgcaatagacatagtgataccaacatcttatcaacatactatcttggttttctttgaacatctggccaggagtgagatgctggggtggaataatagttctatatttaatttaataattatttttaaagatacttattttctgtgcatggatgcttttcctacatgtatatcaatacaccacatatatgcctggtgcccatggggatcaaaagaggccattggattccctagacctgaagttaaaatcagctataagtcacagtgttggtctgagagctgagccctgtcctctgcgaagcaatgtcttctcagctgccatcgctcagtgagccatctctccacactttaacttttcacaacaaagcttcctattatttttatagctactgtgctaacttaccaaaggccaaagtatgctggcatcaagtttctccaggttctaatccatgtttcttgtcttttgttcttttggtttccatttatctggttattagtgcagagcatttttctttttttttttcttcttttttatttttaattatttttattagatattttctttatttacatttcaaatgttatcctcctttcctagtttcccctccaaaaatctccatcccctcctcccctgctccccaactcacccatacccgttctcagtcctggcactcccctatactggggcatagaacctttacatgtcttagggcctctcctcacattgatgattgactaggccatcctctgctacatatacaactagaagcacaagtcccaccatgtgtttcctttgattggtagtttagttccaaggagctttgggggggggggtactggttagttcatattgatgttcctcctatggggcttcagactccttcagctccttgggtactttctctagctccttcattggggaccttgtgctctgtccaatggatgactatgagcatccgcttctgtatttgccaggcaatggcagaggccctcaggagacagctatatcaggctcctgtcagcaggctcttgttggcatctgccatagtgtctgggtttggtggttgcttatgggatgtatccccaagtggggcagtctctagatggttattccttcactctgctccgaactttgtctctgaaactccttccatgggtattttattcccccttctaagaaggattctaagcttctgggcaaatatccacttatcagtgagtgcatatcatgtgtgttcttttttgattgggttacctcactcaagatgatatcctccagatccacccattttctaagaatttcataaattcattgtttttaatggctgagtagtactgcattgggtaaatgtaccacattttctgtatccattcctctgttgagggacatctgggttctttccagcttctggctattataaatagggctgctatgaacatagtggagcatgagtccttattacatgttggagcgtcttctggatatatgcccaggagaggaattgctggatcttctggtagtactatgtccaattttctgaggaactgacagactgatttctagagtgattgtaccagcttacagtctcaccaacaatggaggaatgttcctctttctccacatccttgccagcatctgctgtcacctgaatttttgatcttagccattctgactggtgtgaggtggaatctcagggttgttttgatttgcatttccctgatgattaaggatgttgaacattttttaggtgtttctcagtcattcagtattcctcagttgagaattctttgtttagctctataccccatttttaatagggctactcggttttctggagtccaacttcttgagttctttatatatattggatattataaccctatcagatttaggattggtaaagatcttttcccaatctgttggttgccttttggtcttattgacagtgtcctttgccttacaaaagctttgcaattttttgaggtcccatttgtcgattcttgatcttacagcacaagccattgctgttctattcaggaatttttcccctgtgcccatatcttcaaggcttttccccactttctcctctataagtttcagtgtctgtggttttatgtggagttctttgatccacttagatttgagctttgtacaaggagataagaatggatcaattcgcattcttctatatgctaaccaccagttgaaccagcaccatttgttgaagatgctgtcttctttccactggatggtttcagctcctttgtcaaagatctagtgaccatagatgtgtgggttcatttctgggtcttcagttctgttccattgatctacctgtctgtcactgtaccagtactatgccatttttatcacaattgctctgtaatacagctttaggtcagacatggtcattccaccagaggttcttttatccttgagaagagtttttgctatcctaggttttttgttattccagatgaatttgcagattgccttttctaattcgttgaagaattgagttggaattttgatggggattgcattgaatctgtagattgcttttggcaagacagtcatttttacgatattaatcctgccagtccatgagcatgggagatctttccatcttctgagatcttcttcgatttctttctttagagatttgaagttcttatcatacagatctttcacttccttagttagagtcacaccaaggtattttatattatttgtgactattgtgaagggttttttcatgtacatgttgaccattatgtcttcattcgagaaggatttcctttggttggctggtttctaattgagttattgtttgctttgccatttgaacttatatgacttatatctcttttgagggtatttttttctgctaattattgttaaatcgatgtttctgttaggatttggtcactggtactccacttcattacttaaaaacactgttaatttgctatttaagagtacccataacagaagcagtctttgatagtaagccatattttttgtaactagttattataattttgttattttataacatttgctgcatacacaagtacacagagacacatgtacatatatactcacatatgcacgcacatacacatatgcatacatacatgcatacatgtacacatatagacatatgtacacatatacctacataaacccataaaatacatacacagatacacacataaacacaaatgtaagcttacacatacagaatacatatgcacagataaatacacatgtgccatacatatttatgtatatatacatgtatatgcttacacacacacacaaacacacataattactagcatgttagagacaactactactcacacactggtaaaattccattgttaaattctgagatgcttgtacagctcttgctattaataagttacttgagacttgttatattgacattatttaccccatgaatatcaacaagtgccacaaatcaatgctgttccttttattcatttgaagaggcagttactcaacacttataagtctgcatgtgctttctgtatttattgtaatagaataaagcgctattatcttggaagacagtgtttgctctgaagttgccaggtgaaaaaggtaatcgaattcattctttatccttctgcattttcaggcatacggaaagaccgccgaggagggagaatgttgaagcacaagcgtcagagagatgacttggaaggccgaaatgaaatgggtgcttcaggagacatgagggctgccaacctttggccaagccctcttgtgattaagcacactaagaagaatagccctgccttgtccttgacagctgaccagatggtcagtgccttgttggatgctgaaccgcccatgatctattctgaatatgatccttctagacccttcagtgaagcctcaatgatgggcttattgaccaacctagcagatagggagctggttcatatgatcaactgggcaaagagagtgccaggtaaggatgctaaactcaacttctatgttaagagtgaataactttcaacagtcagctgtggtactgtggggggaaagtagtagtgtgctatgggattagggagatggctgtattgggatttgtcaattgtcaatattaacccgctgtatttctcttgaaactaggaaatagcctttaaaattaaactcccagcagactaaaaccttggacatgctaattttggcccgtctttgctcaaaacacttggatgaacacttcattacaacatgcccatgtgttctgtcatcaaatgtcatatattaaaagtacttaatgctcagggatctatggaattgtttttatttctaatgctatccttcaaaatacctttattgagaaccaatttttccataaataatctcatcaaatattggcctacactaaagggccaatagtttatttgtggaatgctaactatttattcagtttgttttctgcatggtatgttcagagaaacagaaatacagtggcagaacaaacacagatgatattccaaggagctttcagaaagttccagaagctgaagtgacactctgctcctcttattggtctctcaagtgctgcttttatgtctcttgactgttcttgtctaaggagaaggattctaggtatgatggaaacaagactgccccatgcctcaaccaatgggtttcatatgcaaaaggctgtgctgaagcaagaaggggtggagtctgttttctggcttatggattaaatcaatgggggtataaatatagagctttttctccttgggcttcaatagatctgaagctattttctgtaacacatgggatattttatctcatttcataaaactaaagtgtgagtggcctttggggccttgatttccagagtcactaagagagcctgagttaatgtggatctccccttggggaatcttaatgcatttgtagaaatccacatataaacacgctgtcctttgagtaggtggaagcagtaaaatgagccaaacttattatagggcatccatctaggtggtgtgggtaggagagattggagtatataaaaagtaggatggatagaaatatttaagtttgaggatagttctattggggaaaattcttgagatggttctattggccatctgaagaactgaaaattttattgagtgcctagatattttagcattgttttgtgagacagatacaaataccccaggattggaattatgtgaggttatacatttttccttgaattatgtttgtttttatactttgagaggaaagaaaagaaagaaccagttcgtggttacagttgtttttataattctgtaaacttatcccttatgagaccctgaaaatactatttccagacctgaactatggatatatgctgaacccaagcacatagtttccatgtttatttgtaaagtcacatctccacattttacgattgatattttgttgttattattgttgttttatgtcggggcacttgctgggtagtccaggcaggcattgaacttatcttcctgcttcagcctgaataagctgaaatatattactcagtgatgggagattcatgaaaataaccttaattcagaattaaaatataagtcaaggctaaaaagatactgtgtccaagtttagctattccattgttaaactcagaattagacaagtgtgctaataaaatatctaggaaaactactcttaaatttctttatgctaattcacagggcctagcatctttgggttaaactatattttgttaattggtcccttagaaaaaattatagaaacataatgcaattatgtatagtcacgtgccctgtaacaacattttgcattgcaacagctcttgtcaatggtgttagttaggtctgtatgttctatgggttaaggtgagggcaggtgtcattgatggtgggtctgaatgttatatggagtggaggcagggctcattggtggtgggtctgtgtgttatatgggttagtttgtagagactaacagatccacccaggcatgcgtttctctgatgtgtctctgtcatgaagtgacatgaagacatgcatttctgtctgtctgtccttgaatatcgactctgtttgtctctgtctctctgtctctgtcagtcaatcagtctgtctccctgtctgttttttctctctctttgtgtctctgtgtctctgtctctgtgtctctgtgtctctgtctctgtttctgtctctctctctgtctctctgtctctctgtctctctgtctctctctgtctctctctctctctctctgtctctctctctgtctgtgtgtgtgtgtgtgtgtgtgtgtatactattaaaatgcagctattgtaagtccaaagcctacttgtctgggggaaaccgaatgaaaatagccattgatttaaaaagaatgaaaagaaaaaaaagagcagaccaaaggccttcgggagggactctgaagatgactgttgaagtttgcagtgaaaattgtatttccaaaaggttttatatacccaaatacctctgtcatttaaaaagatagttcacactgaagagccgtttaggcaatgtcacatttatgaggtgataatttagggatagtaatggcaatttcaaaaagggaaagagaaacatggctaggaagaacaatagcaatggaaccagcaatgtgatttggatgtgaaagaggccagaggagaatttagggagggcttggagggaggaaacaaatgttggggaaaatgatgtaactgcattgtgctctccaaagaaataattaaacaaatatacacaacaggagataaacaaaacatttcaataaagaagtcagaaggcaaaaacataactgtcactgtagcagtgtgaatagacttcaggttagatggtaaatttttaataaacattttaataaatatttaataaacataaatattttgggttctttaatgttttttcccccaatagattattagcattctcaagctttgctgaataaaactggattttcttttgtcttaccctctggccccatcttctgacttgatatgtggggagtgagagatgaggaccagtagataagaggcaggcatggttgtcaattctaatgcacaagggacttagaaaggaggactataaaggattagtgctttcctcaccatgtctcaagagcagctgtgagaaaagcaatgatttctagctttccagttctgcagaagactttaaaacatatttttattgttttgacatttaaatagggtgatattgctgagatgaaaggatggtccatgtagagacttccatatccagggatccaccccataatcagcatccaaacgctgacaccattgcatacactagcaagattttatcgaaagtacccagatgtagctgtctcttgtgagactatgccggggcctagcaaacacagaagtggatgctcacagtcagctaatggatggatcacagggctcccaatggaggagctagagaaagtacccaaggagctaaagggatctgcaaccctataggctgaacaacattatgaactaaccagtaccccggagctcttgactctagctgcatatgtatcaaaagatggcctagtcggccatcactggaaagagaggcccattggacacgcaaactttatatgccccagtacaggggaacaccagggccaaaaagagagagtgggtgggtaggggattgggggtgggtgggtatgggggacttttggtatagcattggaaatataaatgagctaaatacctaannnnnnnnnnnnnnnnnnnnaataaatagggtgatattattttctctaccctttcctccttctaaccccttttatttgaaattcatagcctttttattttttaattgctcttaaatctatctatctatctatctatctatctatctatctatctatctatctacctatctatctatctatctatcttcttcatcatcatgatcatctacatctctatcatctacctacctacctgactatctacctacctacctacctacctacctacctacctacctacctacctatttacacctaaatatataaacacaaccttttcaacctctataatgttatttatagatatatgacttcagggctgaccacttggtattggataaacaattggggagctatatccagggaagactatttctttggctctcagcattccttaattgcctatagttcttagtctagggtggaaaccttgtgactaacatttccctcttccatgttagcatgtcgattggtctcttgttgttgttgttgttgaggtcttgtttaggcagtcatgttgatgagattttctgggtagtttctctgtcatttccaggagactcaatttcacaacagacttgtgcttcctctttccatcagcatgcatcccatttttccagagccctaggttcaggaattgtgttgtagaagcatcagttggggctgggcaccacagcagtcacttgttctttgtattttgattggttgtgcctttctgtaatggtctccatctgttgcaaagagaaatctctttgataaggggtaagatggctacacttctctgtgaatataaatacaaatatttagaaggcagttacgaattacatacgactagaaaagtggtggtagcaggacctcctccaattggccagatttttaataccaggcatggtttccttcttgttgagggggtcttaaatccaagcagagagctattggttaccaccaagatattcatgccaccagatatgtagtgttgttattgtgccatgctggtgattgctgtgatccataggtgtcatagctcattaggacgactgatgctccctctttggaagcttgcacggtgcttctgtttccgtgaaagctttgcttcagggaggaggcttcagttcagatgcagcttggatgctttggatcctgtgtctgaagcacaggtgatgtcagcaataggtgcttaactttccatttctgagaggcgaccagggacaatggcaatagcctataatgttttgtgagtctctcagactcccctgaccaaaactataaagggggtttcttatgcctgatagatagaccactagtattgtgagcctatataggaaattttcacttaaagaatgtatgtatgtatatatatatatatatatatatatatatatatatatatatatatatatacagacttagcttactttactcaattttaggtaaataagtaatagattccttagacttttcagacgtccttactgttggtttcctctcttctgcctccttttaatcctgctgttaaagctcttcctttcccctacttctcctttcaagtcactcgtatcctgctctttctaactccctatccacaactcaccttgactctattatccctttttgctttcctggtttctataattatacgctcacccctgaagatcaggacctaggagccattgacaagaaactgagcacacaataagaagacttaaaaaccacagggtgtttctgaactttttttttttttaatattggttattttattcatttacattgtaaatgttataccttttccaagtttcccctcctcaacccctctatcccatcccctccctcctgcttctatgaggatgcttccccactcacacacccactccggcctcagcaccttagtattcccctacactagggcatcaagcctgtacaagaccaagggtctcccctcccattggtgccagataaggccatcctcaactatgtatgtaaccagagccatgggtccctccacgtgtactctttggttggtgatttagtccctgggaactctggccgggggtctggtcagtttatattgttgttcttcctatggggttgcaaaccccttcagctccttcagtccttcccctaactcctccattggggtccctgtgctcagtctgatggttggttgcaagcatctgcatctgtatcagtaaggctgtggcagagactcccaggagacaactatatcaggctcctgtcagcaagcacttcttggtatcagcaatagtgtctgggttcggtgtctgcagatgagatggatgcccaggaggggcagtctctggatgacctttccttcagtctttgctccactctttgttcctgcatttcctttagacaggagcaattctgggttaaaatttttgagaagggtgagtggccctttgcaccttaatgtttggttgtagaggcttgctcttcattgtgtgcactataattctttaatatttaacagcaattttcttgtttacctatggaagaaggtttactttaatttttttatttttacttattctttgaagacttcatgcatgcatatattaatctggaatatatccatcactcactacccttcaaactcttgccaggacccccacatacttccttcccaatttcatgttcaccttttatagtaaattgattaattattgctcttacacctgcttcccacttgtttctttcttgccctcttgggctctttccttccatttttccttctcccctctctccaagtggtcatgacctgactctacgcccctcccctcccctcctcttctttccccttcccctgtcccctccccttctctctctctttctgcctttctttctctctctctctcccccctccctctccctctctctctccctctctttctgcctttctctgcctctactaccctcttaactcccctcctcatgccctgaaaaaaaaaaaactctattctatactaaaaaaatgattaattattttaagccactgagctcattagtgtagctcatatgcaaatggttatgaggtcttacttattaacacatgaggaactgaccagcgaccataatctttaaagaaaaatgactcttccttttgtagcagctttcaactatcaataggacctcagctagagttgggtctttgggagcacactttccaatctatactaaaatgttaaactgccttgatctcataagtaaagatgttgtgaggtcatgcatgccacagccatgccactttgacttataagttaaacccttcccaaactttattggaacatttgcatcaaaaccaatttagttgctaaaatttttctctagtttcgcatattgaatgatgacttcgatagatatatgtgctcctaatgactggcgtgagaagtctggtggtgttgattattaatcataggcttaagggatggctcagaaaaggggagggagggaaaatatggcttgaagtttgagctcatgaagacttgctgccttagctactctctttcgtgaagtggcaaactcctgactttccccctgggttctccctgtgaaaataggtatcaattttcccttttagagcatccccatgccatatcattttgctttggtttccttcttgctcacctttggaccttctcttttatgaatatgtctgctttaagtcccatgtacttaaagcacttaagttcatcaggttctgggtcatctccaagagaggatggttgtctaggccatcccatagctcaggacttcttgttctcaagtatctccaggaacctagcgatcagtatccaagtcctaatgttcgcccttgtcattcacacagtggtgaagagaagtctagagacacacgaatagatgggcagatgaaggttaccttggcaaccttctcatttgaagaagtctgagccctgtcaaactctcagttgacctctaaataggactgggacgagctccagggctgggacgatcctcttcacacctcccttcattgtctacctgatactgtaccatttacatggcagccatggcacctaccacagtgagacccagtttccaccctttcttattgaaaggagtagagtgatttgaggagtgtacagacatgagccctgagaatcctgtgaggtgttggttgtctatccatagatgaggtgtactgtaaatagaggtgtgcaaggacaagggggaagggagagggctcagtatcactgtcctgggatcaggagtgaacagcgttttctattctaggaggttcctgtgcactccaggaatgtggcaaaatgcctcagtatctgattcccagttatagtcagaccagcagaccctgccctcgggctgttgcagaattctaccacattagcaatggtgtggtgatgtgacagaatgtggcatgaaagtatgggtgtcatcctggagagatgacaggtgccattattaagggcaagactttcttagaatttggaactgttctatatgaagatcctcaggactaggctagtatttgctcactattagtacagtactcttggctgtggtgcacagctataatcttgatcagctcaacccagcttgcctgtgaaattccaggcaaaagtcaaggaaatcagctacttgactgatcttttatgtacaactctcatgctgacatagatagttcaggaccagatatatgaagcctctgaaagtgcctttctcatgttgcgcgtgttctcatctgaagtcatagaaaataaatatctgtgtaccacggaggaggttctgagtgtccctggccacacttcagggactgttgtttgcagcattgccatttccaaagaggatgtgcattatctaaccattcaagtgcttaagcaaatgttactcctaaattgtgttgaactgtattttctcaaaaacacatattaaaggcctagctcctcacatctcaggctgtgatcttaccgagaagaagaaaataagatctattcaaagccccccccccccacgcacacacacactcactcaccatatatcatatatatatatatgtacatataaaacatatatcctatatatatcatatctgaatgtgccagaaaggagaacatagatcactaagcataatggatttaaattttaccccaatccattgtattataatcttaactttattacactagcaaacactttttcaaaattaggttcaggtggacattaaggtggaaaaacaatcaatagaaacttggcattaagactttattatcatacgtttaaaatctctgaggaaatagataatagtatctattttaagcttcctagagcttaaaatgtagagctaaatgatgcctttgaattcctaactcatggctgacatgctgtagactaaccttcagtagccccttatgtactttctactgaacttgctctctctattgaatttgagattccctgggcccatccttccacctgccatcctttctctgtatattatatgcatttatgttgctttccttgatcacctgcatccagttgtctctgcccaaattccttgctcaatttttttttaccctaaaggagtatcacacattctaggtttttttttgtttttgtttttgtttttttccaaaacttcccattttattaccagtgtagcactagattgagtttgcctcccagggcagcactggttgaccagatgtacattctacaattatgtcaactgttatgtaaagcccaaggataactctttattgctttcttatttccttcatggtagatttgtttattgctggatagttcatttattaaataaacattacagaaagccatttttttttagaccatgttccctcagatgaagactcaaaaatcaagacagagtcacttactatgaaagacaaagcaaaaccaagttgttaatctgggagtctaagtaatgaggagaaaaagaaataatatgaaaataatctcctttccattgatgtgccaccaataccccttggattgagtgtttacacctcaggccggattgtagcttacttagtagaatgactgtctagtgtgcatgaagccctaggttcattccccagcacagtataaactgggtgtggttgtgtacccctgtaatcacagccttggtgtagtagagacaggaggatcagatactctgggtcatcctgatcttagaggttgaggtcagcctggcctacataaaaccttctcttaaaacactgttgctataagtggttgcatcatttaattcttacaataagtaaaactgaaatcatcgaatgctaaccaatcatgtatttttcggtctccttgactaaccttgaagtgaataaaccattttttatttcatgatttcttcagcctgtgtctatccacaaagcccatctcttcttcttggtccattgtaccatatcccatttcatcagatgaatcactgacctgattgtagaatagcaaaataatgtcccttaagaactccacactggttgttgtcattttgtgttctgacaattctgtagttgaaattcttctttcaactgaaagatgctgtttttttggccacctgaatttaatttgtttaagccactaccttgcttttagaaactatatatattggctagtgaggtgactcagcaggtaaaggtacttgttgccaagcttggtgaactgagtttggtctctttaatgaacatagtggaaggagagaactgatcctgcctgttgtcctctgacctccgcattttgtgttatggtatgcctgtgcacacaagtgtgtgcctgcaaacatacacacacacacacacacacacacttcaataaataaaaaaatgtaaagagagattaaatgactgtgcaaatctttgatatccaattagtcaaattgtaatataaagatatcttctaattaaataaaacggtcagaaactcatttagaataagtattcctggaacaaaacaaatgtttccttttggattaaaatatctttcttgacaagcaggtgtttttaacgagatgacaatttgccgctttccatgtttctagagggttgagtagctttctgggatgactggtctaggtttgggggctttaccttttgtgtgcctagatctctgggatctatttactcccaacttggtctattaaactccaaaggccaacttgtgcaccttcagtgtcaccatggctgactgagtttggcttgaatttccctaatgtgcaagaaatttacgccccagtgatgacagatgttagtttttgtattttttttagggcttaaccactggtgaattatagaaaggagagaatgtcattattggccctcaagacagctaagatagaggaaagataagaatctgtgagtccactagacaacatctctattggagtctaattaaaagaacttactatttcccaattccacctacttataatactgcaagcaaaacaacaacaacaacaacaacaacaacaacaacaacaacagcctcatcaaagatacttaaagtttatctcatacaggagtctacggtttgactttatgctttgtgttaggctctagtagaaacctggctgtttccttttggcatacttcttaccgttctctgttcaaccatgcctagcttaaaattactcatgctaagattttttttttcttactaaatccacagcctcaaggaagtgcttggacactgaaattgatcggcaagcattagacttgggtgagatggaacttagatatgtgtttctttctttcccacagcagatggtcgctcaggtaagtcacagctgaaaggtcaaagtcattaggaaagcaaggccgcacttccacccttgtggccatactgaggatgaagaggtagagagtttagtggtaaaagttttgtttttgatttttcctggcttgtggtgtttgaactttgacagcagatatcacagcttcaggggtgttgatactgcatctcacaagagtcatgagctgcttggtattgacattctgtttttttcagatggatcattgactgtgttaactctttctccttccctagatccagggaatctgagctttgcttctgtggctaaccaaactcttccacacagtgtgttcaattctaactcattcaaatttgcctttttgttggtgtttggtatttggggttgaacttgggaccttgtacatactgaacacatagtcttccactgacccatgtccctagtccctgttcatctttggatggatactcctttgtggtataagagaggtgaatatgtgcaggtacacatatttgttagtatatatgcacacaaaagccagaagtcaaccctgggattgtttgccaagagttatccaccttaattttttcaaggttaattttttaatggtctatctctggtctggagtgctgggatgcctgagtgagctcctgtctctgattccccaaccagtacccacatggtgctggaattataagcatgtaccaccttacctggctttctatgtaagggctgggaattgaactcatagcccaggatttggcagcaagcacttcacctactgagctatctgccaagcctgaacggttacttctttgaggaacatttttcctggtgagctgattgtttggtgtgttaaaacctaagtgctgtttaataattcttgaggcaaactccctgtgatttaatttgaaaagatcaaatgaccttgttatttcaatctagcacttatcactcaaccgcatccaggagagccctaacataatggcaaagggaagagaagtggggctgcttaaggaaggcaaaatctaatgaaatggtggcagcgccttgctctggagcgaagcaaggtttcctcttgtggtagcgcatgtattcattagggcattattttataaacataaaatctaataaagaggtggacggttcctgtgctgtaacgagggcaggcatctgttcttgaacagcttaagctggctgttaaagtgtaagtaactctacaggagccgaaggtgaaacccggttctccgaatagttttctaccttacagtattggcagcaacatttccttgtagaacgtttgtttgcattcttaccataaaggggaaaaagaaagttttggatgcaacaaatcacttttgagaaacttagtgttgttcctgtctatttcgttttgccacattgtttatttgacttggtccggatgtttgcctctgtttcctcaggccattcaaacataggagatcaatagtttgaattgagaaagctcatttaaggccttcggctgtgggaagatgctttctgaagtatgggttcaggttctaaatatgtgtttctctcctctcatctataaggaatattttcctcaaatggaatagagtgatattcgatttttgtgtgtgggggggagggcttcactgaactggttaaaaaggcttcaaattgaagagacttccagtcacatgggtataactgggtaagccaaatgctctaccactgtctaatccatgcctgtaacactcatagttccaacctcaggcagtcaaggtaagctgctccagagtctgtaactgctttgccccacaggtagtaacatggcttggagcaatatttagaatgggtgtgaaagcgacagtggataaagtcattattgctctagtttatttggactatttgcaatgtactgaacttaagaatgtataatggaagacatttttccccttttttattattatttttttaattaggtattttcttcatttacatttccaatgctatcccaaaagtctcccatactccctcactcctcttcccccccagctcccacttcttggccctggcgttcccctgtactgaggcatataaagtttataaaaccaatgggcctctctttccagtgatggctgactaggtcatcttctgatacatatgcagctagagacacaagctcggggggtactggttagttcatattgttattccacctatagggttgcagacccctttagctccttgggtactttctctagctcctccattgggggccctatgatccatccaatagctgactgtgagcatccacttctgtgtttgctaggccccggcatagcctcacaagagacagctatatcagggtcctttcagcaaaatcttgctagtatgtgcaatggtgtcagcatttggaggctgattatgggatggatccccaggtatggcagtctctagatggtccatcctttcgtctcagctccaatctttgtctctgtaactccttccatgggtgttttgtcccaattctaagaaggagcaaggtgtccacactttcatcttcgttcttcttgagtttcatgtatggaagacattttaaaaagtgcattcaagaggcagatattggcacaacagtgtggttggatgtctttaatagcactaaactgaatactttcaagtggctaaaacaataaggctgatattgacatgctttaatgtaatggaaaatgatatttaatacatatttatatatgtataatgcatatgtgtatatatgtatcgaatatgcatttgaaacagacattgattgcatggtgtgctgcatggtgtgttagctttctgtcactatcaaaattcctgaaataatcaattcagaaagacaagtttattttgacaccctgcctcaagacctttgttttccctgaggctgtgagtgtgtcagttgcacatcacagggcagggaagatgcagtggaacataactgctcatcttgtggactcaaagtaggagacaaaaagaggaagagaccagacccacaccctccttctagcccatactctcaaaggcctagagacctcccattaaagacctcccactcatagactcaccaactgtgaagctttgccaccttacagtagtgccaatctaggatcaaacctaaggcacaggggctgcttagagactacacacacacacacacacacacacacacacacacacacacacacacacacacacactcatctctatggatgtatatgtgtatgtggtgttcatgtgtgctttgcatgtagagaccacatgtcagcattagatgtcttctattgattttattatggactttattaaaggtccaaccgagtcatgccattataaatttcacctctcctgtgctgaccattactgggtatgttattataaaccttcttttgtctacgctgtccattataataactagaatcaccttgtctccggcgattcaatgctgccacctggcccttgttacctcggaatccaactaaacccagtgaatttaattcatctaattgagcagaagcatctccaatgctaagatctggcactaggaaaagggaaagaacaaaacccttcaaatgtgctggtgcccctctcaccaatttgcgtcttatagagctagtgaaaggcatatcttctggaccttcccattgtggacaattatgctttacacaatatatnnnnnnnnnnnnnnnnnnnnnnnnnnnnnnnnnnnnnnnnnnnnnnnnnnnnnnnnnnnnnnnnnnnnnnnnnnnnnnnnnnnnnnnnnnnnnnnnnnnnnnnnnnnnnnnnnnnnnnnnnnnnnnnnnnnnnnnnnnnnnnnnnnnnnnnnnnnnnnnnnnnnnnnnnnnnnnnnnnnnnnnnnnnnnnnnnnnnnnnnnnnnnnnnnnnnnnnnnnnnnnnnnnnnnnnnnnnnnnnnnnnnnnnnnnnnnnnnnnnnnnnnnnnnnnnnnnnnnnnnnnnnnnnnnnnnnnnnnnnnnnnnnnnnnnnnnnnnnnnnnnnnnnnnnnnnnnnnnnnnnnnnnnnnnnnnnnnnnnnnnnnnnnnnnnnnnnnnnnnnnnnnnnnnnnnnnnnnnnnnnnnnnnnnntcctttccttccctccctccctccctccttctcttcctccctctttccctctctcccttccttcctttctttctcttgtgtgtggagggctgacaatgggaagtccatggcatgcctgtagagctctgaggacaattttgagggagttacctctctccttttaccatgtgggttccagggactgagctccaatcctcaagcctggcatcatgtgcctttacacaaagagccatcttgctagctcatatttggcttcttgagaagagtgtcttgctatattgcccaggctggccttgaatttttaatcctcccacctcagcttgctaaatactgggattatatatgtgtccaccacacccagtgtgagtccaactttaagggatattaataaactgtacaccaaaattataattttgtagaagtataagaggagccagtttttagaacatttgaacatcaactcagcatggatatctctttttatttgtactatgtggtctgctgtcacaatttaatttttgcttttaaaataattgtcttaccactatgcagagataattcaagtttgactgttgtttctctgttttcatatgttttgacaatgtactatgataatgaaaaagagaatatttgctgagctccctaagcccctgtcgaatctccaagtcaatattaactagatttgggccatatttgagttcttgaacatatttgacttaatgtatttatacatacaacatattcgacttaagcttaatgtactcatctgtacaaatattcaaatgaggtagagaaagaatatataggcagggaaagtatcagctgaaggatgaatcctacagttagtaaaactgactgaatattaaaaccaaacacatgtaacagcaagctccaagttatagcagctcaagcaggacataaaatatgttttaattcacataaatgaatctgaactcatataacagtagtgatattatgtttactattgtaaactttaagaaagaatttaataataggacatcccactcagggaataacaatgtaaattcaatgtaaatgtatgtaaaattcagtttaaatgaatgtaaaatgtcatagtcagattatcatccatttaaaaaagtcaaaactttatgttcaaagctaggccgatagctcagcctgtaaagttcttgccatgtaaacatgagggtctgagtttgaacccatgtcagaattatgcagccttgtaatctcagctcggggcagtggagacaggcagatttaagggtctaagtccagccagcctagctgacttgctgaattctaggcctgtgagagagatcttaactcaagagaaccaatgcaatggctcctgaggaatgacacttgttgtcccctgcctgccaaacacacacacacacacacatacacacacaaacacccatagagtccatagtaagctcatagactaccatgtattgtttattatcctcaaagcatatgtgaagcttcctgctactcctattgccattttacgaataaagaaacagaaatatatagacaactagtttcccaaataagtcaggcattgaaaaatcacagggcattttggttcccagctgtgtggtcataaggccaccatggaattctgcttcattttatcactcaaaaagtatcccatgaacttatgtttgaccatcacacccacagtgggtcatctttgagggcttatgtaaacagatgtaattgtactgtgggcatatttctaaaaaattcacaccctgaatgaaaatatacacattcacaagttactataagttcttcttggctacgggaaaagtgttcagaaaacaagcatgaaacaaagttctttatagtcctgtcttcagaaagtatcaaaaccctaaactgcagaaatgcagctttcatgttaaaaatgaacatttttgatattccaacatgacttgttactattattttccattttatccttttagggagttccaacaataatgaattggaagtgagtcttattgtttccattgaaagcggtaaatttggggggggggacactatagagagacactgaatgcgtctgcaaggggagatgaaattccaagaagcacagacccaggagatgccagagggcagtgaggagttcttgtaccactgaactgaatatgtagctggaaatactctccaatgtacgaacaggccaccgtaagactaaagtgctagcagggaatgccttccttcaggcattgccttcagaagtgtggagcttggcttgccttttctgtctttgaatagtccattaatcaggattagtgagagatcgctcagtcacctgtgaaacataagctcttcattgttagaaatcactggtgcaatgcacagtttcttaaaaacccatgagcagacacaaatacctattttctcatgaatattttttgagagccttgaatgttaaccaatcaccactcccccttactttcctgctattgtcttctcggtctctgtattcgccatgacatggagatgcatcccctcccctgccccacagtagtctgtgttgtgtggctggcctcctcctagcgactagtcctcagagggtacaaggctggattaaaggaattttctgaaaaaaaaagaaaaaagaaaaatataaaaaaatggatagctaactggaggtcccgagttccagaagtttcacacataatgttgatatgcttcagattccccccccccccccgataattaacacctcttacatcaggagaaacatggaatagatttgggatggaggaactacatactaaaaaagagttcatcacggaggttgagcactgagagaccacaaacaataccaatgtctaagatttcttaactccaggatcaggcttttccctcctgtaatgacttcttgattcccttcactaaccttggccccattagagatgaacttgacttaatgggtgtacacattcacagaataagtccattgctttgcatgaatattaaacattaataacatgcctctatgtgtatagattatgtgattaaatgtttataaaaccatggaacccagtgaagagaaacttttataatgcaatatttcttattccttttagttaatgataagcttctagaacagtacttagaacctactaggtgattatgaaatatttattgaatgttgagtcattgataaaataaaaacctagctggtacaaggccctggacacatataaagcagagaactgcgttgtctggcctcagtgagagaagatgcacctaaccctctagggacttgaggtcccagggagtggggaggtttggtggggtgggaggttggggggggcatcctcttggagacaggggaggaggaatgggatgaagaactgtccaagggagaactggaaggagcataacaattggactataaaaaaagtttaaagataattaaaaacaaaacaaacaaaaagttaataaactatgtttgtcatgggaaagaaagaaagaaacaaacaaagaaatagagagagggaaggaagagggaaagaaaaaaagaaagaaagaaagaaagaaagaaagaaagagagggaaagaaagaagaaagaaagaaagaaagaaagaaagaaagaaagaaagaaaggaaggaaggaaggaaggaaggaaggggaagaaagaaaggaagaagtagagagggaaagaaagagagagagagagagagacagaaaggaaggagggaagaatgacgaagccaatgcattgctaatcctggtatctggggattacttgaacatctttttgccttagtaagcctttgtatagtcattgctttgcttcttctgtacattttctggttatgttttgagctgaatgcttgagatacatccagttccatctctatggtgcttatagtctataagggagaccagaaaggggtgaattctatagtctggttgattttggaagatggcagatgtatggatgaagggaaacaaacattgcagatagaacagccatgatgacacgatggtcagtgtaagaaatcaaattagtgaacacttcattgagaggtcatttgaacagcactcaaaggaaaggaaattgttgtctatgtggatagaacagggttccaggcagcgaacccaacaagtagagttctgacatggaagaggagttctagaaacaagaagaaggcaactatgactggagtagggggaagaaggaggaacagaaaacaaattttgagaggaaaagggatgagaagtcacatgagcctgtgtgacagctggcactttagcttttattctgaagaacatggggatgtgtggcagaaattcgaggggcatgctttatttggctggctgggtgggggagagaagcaaagattaagagcagccaggggagtaaagaaccttcgatggcaactcaagacagaagtgagggatggtggcagttctgaggggaaccgtagagaccactgaagggatagtcacatcctggaattatcttagggtagactgatagtctgggtgaggtatctgggaggaagaaaggagtcacagatggctatctgagcctgaacacttgtaaagtataaattgtcaacagtaaaggaatggaagtctacagacaaagcaaacctttgaggaggagcatcaactcagtgttggacgtgtgttgcgatgattcaggaggagctctctggggttggaaagtaggtttgtgcttgatgtaaagttttgagttcacaggagacaggtcttcatcaggtgatgaatcagatctccatcacagtgaatacaggcaccttgagaagatggagggaaatcacttggaaaaagcaagtcaagtaaaatctttcagaggaacgagaaggaaaattctatggccatgccaccagggagactgaagatggattctcatgaactgaatgaggaaagtcagtgtgggcagtgtacctacagctgggcaacgtgcttcaatgaagattctcttcagattgtcctggttcttggatatcaggaacaaggtttttgacttagaatgaatggaaaggagaacgtgtgagagcctggcatggtgagattgtctccaaagggacagggagagtgaatggattaaagtattgtatgatgagtctggagagtgtctagtaccatctgatgtttcggtccagaaggtgtcagtgtgtcttctagcatcagcatgtctgcttgactgtctggtgagttgaattcagcctagtaagcagttctgcagaatgaactgaatgaattaagagatgaaccagggagtccagactaggttcaaacaatgactctagaaatgacgagggtaagaatggttgttgagtagtgggggtcagggttttctctaggagtggttagtttctctaggtataaaacaacccagacttttctcaatcagaaaagcatgtcttcttgtttgatggaactaaaggcaaggctggaatgaaggcaccatttaggttgcagactggtttgcggttttgttctccattccttttcgaatgtgcttggaatcccaaaggacaagttagcacagagcatgattttccagagagcaagagtattcatatcctttgcctagttgtttattttcttgatatttaagcatttaatctccccatatgtgaatacataatatgtattctgtcaatttcttactagatttgaggtttgcatatattctcccacactcttgggctgcctcttaacctctgtatttcatttgcaatgaggaagcttttaaatttgatgcagtacttaatgcttcaatgttatgtcccagaagttcttgcctacaccagcatttcttttggtagttttttattatttctgtctttactccattttgcatcgatttttgtatatggtgtgagacaaaagttttattgaattctcagcatgtgaaagctagctttccaaactatatttactgaaaagataatatagttgtgtgttcttggcacctttaatgaagttaatttactacagatgtgtgggtttattttgagtttcttattgttctattgattaatgagttgatttttatgccagttccatactgtttttattataatcactttctaatacattttaaaaataagtaagtgtgatatataaaactttgggtttttttctcaagatagttttactaatcaaggtctttgtgacatctgataaatttaaggaatgttccttctatttatatgaaaaatataatatgataggtattgcatcaaatactataatgatttgagaaaagaaatgtgaacaataacaattcttccaattaatgaacatggggcgtttttctactgttcatgttttcttctttattttttcactgttggttaagtctatccccacagtttttttttctgtatgtgttttatcttttgtttgtttgtttggaggactattataaatgggattatttccttttagataacttattattagtatacagtgataaggatgctttatgtatgtgaatcttgtaccatgcaacttactgaatttttaaaatacatttctaacatcttcttggtagcaactttaggatttttctacatcaaagtttataatatcataaatagagataaatttcaatttatgtttctgcaattatgtggtatatgtttatatgtctctattatatttatatgcatatgcatgtatataataatatatgtataaatatatatgtatccttaagcaatattgaacataaagaaaagaagaattataattcttaatttcaaactatataataaaattattgtaatctgaagagcatggtagtgttgtaaaacaggcctacctattgatcagcagaagaggatagttgaaaagtcttatgattttatacatacatacatatacacatacaacatacatacataaatacaacatacatacataaatacaacatacatacatacagacattattttttatagatttggagaatcaaacccagggctttgactatgccaagcatgtgctcacctgctgagctatttctggaccgctagttcctgattttgattatattgaatcaaatcagatttgaatgtattgaataatatactccgcttaagacatctattagtgatcttcgtagaactaaaggatctgtttatttggccttctttccaaagctctctctttttcccttatttttctatctttctgttttttgactgataagactttagattctgttctaaagttacaaaatgcattttatgtattataaagatgctcattttacaatgagctaccacaacagtttgggtagatactggtggtcattacacagtgatgttcccaaaggaattttttgattcccccttctaaatactggaatatatacttaagaagtttttcagaatagatatacacacagtttatatatgttttgaactgtccactgatcaaaagtaaattgatttcacatttactaattatttgattgactataaaattctaggttcaaattcttgccccgtctggactttgaagacactgacaactaactatgttctaaaccccactgctgcagatgagatattcccaggtcaaccggagtcttttctttgcttatcgggtcgggtcaggaagctgtgattcatgttgtgagtgagaaattcctctattgtacgtctgagttctggttattgccctgtttaatagtgtaagtctttaatgggtttttaaacgtttagtggaattttctgttagatttggatcatcttattccacttggtgttgttttgatttcctcctctaccttcttgattttgtccctctttacttgcatgtctttaataccaacttcctttttctttcagacttagtctccgtctattgtctaggctggtttcaaactcataacccccctgcaacaacctctcagatacctagggtcactgacattacactactctaactggctttggctgcctttctttctttcttcttttctgcaatgtgtactagcatgtggtacatgcatatgcataggggagtatgcatgttttgggactcaaatgaatgtgaatacatgtggaagcctgagattggcatcaggtgtctttctcagttgagagagcatctgtcatttgaacacatgttgagtttgcaccagcgatcctctttctttttctcttgatggtggggattgcagatgggcttgtccatgactactagggatctaaatctcagtcttcaggttggcagagcagatgcttcatctgtggctgtcagcagcacatccagtggcaagctgaatttgctttctctattgtttagagtatgtgaggaacagaatctgaaagggggaagagtccacccatgtagtgttaacctcgttataattttctcctgtgtttcccatgaaaaggcatacatctaaactgctcttccattcttctttgctttgtctgcagtgattgtccatcagtctattttcttgctttcttccttgtccagtagttcatggttggcctatttggattgttcatatgcatcagtaagtcaaagttggcatgggcaactggccagagcttgccatatggttgtgtagtcttgttcccctgtgatgcttctcctcactgtgagtgagctgatgtggttccaggtcagtagatggagaatttcgtcttacaaacaagtctctggactaagggaagcagctgacagggagacttactctgcttggtcctggcagagctgccttctagattaacattttcatcttcttttagatggtgtgtttgtgtgtgtgtgtgtgtatgcatgtatgtttgtgcaagtgcatgtacagaggacaatgttgggttccttccttggatgctcgccactctatatattaatcatttaactaactaatttttgatagagggtctctcagtgaatctggagctcacagactggctagattagccagggcactccaaggattgatctatcctcctacccaatgctgcatacccacaactgtgccagcttttatatgtatgtgtgtgtgtgtgtgtgtgtgtatgtatgtatgtatgtatgttagagatccaaattcaggtcctcatgctgagctgtctccctagccattaggtttcttttcttcttcactactgtctccatctagtatcaaaactttggggcaagaagttccttgcacaatcacttgcaactttagccaccagagctctgactatttaccaaggcacaggtttattgagttatctgaccacgataaggtgcctgtgaatgaatggccccatggtgtccactcaggtggtttgtgatgagaaatttctgccttctagaaagtctttctacctctccgtgggggttgtgatttcctttgttctaacttctggaggctgtcccatctgcctctgtccacacagacagaagaagcacatggtctggtctttctccttcattcaaaaaacaaacaaacaaccctccggcttggtttactttaaataaaattttacatttatagagattaattgaggtttgctgtaagcccacagcaaaggacgaatgagctagataatcaaaatggtcttagtcctatattatgcaagggaaattcagaccaaattaacatttgtattctgaaatgatttgagatacctttacttttttgatacagggtatggtggtttgagtgagaatggtctttataagctcatatgtttgaatatttagttcatatttagtggaacagtttgggaatgattaggaagtgtgtcactagaggtgagctttgggtttcaaaaggcattcccaactaacattctctgctttgtccttgcgtttcaagatgtgacttcctaaatattgctccagcagtcatgcctgctgccatgctccctatcatgttggtcatgggctctagtcccctgaaattgtaagccccaactttcttctataaactgcttcagtcctgatgtattatcacagcaatagaaaagtaactaagacacagggcctttctatgaaggcttagctggtatggagcttgctatgttggcctggctaggctggaactcatagaaattggcctgtctctgcctaccgagtgctgggatttaaggtgtgcaccaccatgcccagctcagatgcttgctgagaaagtcattcagatgtatagcagacctgagtctttgcaatggaatgtgcatatatacatttggacacacaggtgagtataaacacgcacgcacgcatgcacacacacacacacacacacacacgaggggcatcacttctcaagtttctcgttacctaaccattcctgcacatgtaggttggcagagagtagtttttgtttgtttgttttgtttttatacctgtttccatggtgagtcattaatgtttctgtccttctagaatattgggactcaatgaactgttactgcacacaacaagcatatctttgttgctggcacacactctacccacttggctttcctttgtgatacatcactctttgtcctccttcctgttgaattaagttattcattgtcttccctgagcatccctttctagtgatactttccaatctctgctgtctgagctttctaagctctctgctggcttccctgcctctgactccagacggttccttcccacttcttgctttgatggtgacaatactgggcacttctcatggacacagccctgttcttttcctcgttgccttgtgccttacactatgctttgcattcgggcactaaggtcaaagggtaccaatagtctacagccagttgaaagaaaggtgagctagggggtggcccctggagttcactggaaattggccattttctcactctggaacgcagatctgggttaattaaggaacagttataacaggaagttatttcattactattttcaaaaggaattactcacacgtttttattggtaacagcatggagacattctggactgagaaacaagtcctcagtattttgctgtagcctcaaccctgtgtcttgtccctttgcctttgctctttgcttccactcctcactccagggtccaacccagcagaaactttccattctggtacatttgtcatatatatatatagcccttttccttttctatgtctttccttataacaatctttctttaaggggcccctacttttgttttccaaacccttcaaggctaactgtaagtggtactttgtttttgatagttctagcccttgtcacactgcggatatctagacccatctttgattcttgtgtttacaatagtgtatctcaccttgatcttgatcatgagtgtacactcatttttatagactctaagaatacatcactaacatttgaaccccagatagtgctagtataatctagacaactaatgctatagttaagatctatatttatattcttaccacttatttgtcttgactggtgaaggcgctagtatgtggaggtaggatattgctaactgattaagtgtggctcattagtaagtagatgttaatagcaattccacgatcatctccttgactctccctactgtgtgatctaggaacctgcctgcattttaggaggagaaaacagagtggaagggtttcagtcacttgctgctgagtagatggcagtagaatcacccattctgtcttcacttggaagggcatgctatattaatcattcctggatcataaacaatctaagaaacgaatccggatttttagttgactcttattcacagagtgcagggtgagcagatggaatgaaatgggctaaggagagtatgaagtggtggcagtgagtctgggatacaaagaaagaaagctgtcagctgtttgtggggtgacaccaggaattcccccaggttccttgggttgtgtctaggatccacagttgtcactaagctgctgctacttttcctgaggtctactatgaaggcagcaacaaccctctcagtcacaggcatcaggttgactcttaccccttcctgcaagctacttaaaagcaagcattggtgatcagtgagatggctcagaggttagaagcacttctgcaccagccaggcaacctaagtcctgtatcctggacctacagaaatgtggaaggagagaactgactctaccatgatgtcctgagcaccatagcacatgcccctcctccaacatcatgcatgtgtgcccccccacagacacacacacagacacacacacacagacacacacagaaacacacacagagacacacacagacacagacacacacagacacagacacacacagacacagacacacacagacacacacacaccactgatgcattgagaaagttagtgtttcctttttcacaacttggcagaagcttctggaagctcaaacacagcttcatatgccagctaatgagggcatcttatttgatagtaaggcttcatatgacagccagtgagggcatcttgttgatagtaaggcttcctatgacagccaatgagggcatcttattgatagtaaggcttcatatgacacctaatgagggcatcttattgataataagtgaagttttacatactgtaaatattctgaaacactccccaccaaacggctctgtggctgtctccagtcacagatggatgccggacactttctgctcattaattccttttacctcactttagatgcatggcagcttgtgtgaagcagaagaagtcagcagcatttctgcaaaggaccagatactatatataggctttgcaagtactgtttctttatcacagataatccattctgccactgtagtgtcaaattagctgcatgtaacatataaacaaatggtcatggctgttccccaataaaactttactcaaacaccgaggggtcatcaagggctgtaattttctaatccctgatggaaagacaaagacaaaatgtgctcggcccattaacaccgtcactgagttttctctaattttctaaaacgcattgagcaggaaatggcaaaaatgacgacagagcgatctaatttaatcattgtgataatggtggctcacactgcatgtttgctgtgtgccaggcattttgctaagcactttacatgttttatatgatctgtaaagtgagtgctctcattattcccatttacagctcacggctctgagtcacagatagcataaatagactgctatgctcatacatcgaactggatgtctaattctaggtttcttgggctatcatgcgaatggaaaaagatgtcattaaactgagaggaggggcatgaggtttgctctcagtagtctcgattaatatcccaaggctgccctggaacatagcacattaccactgagcctcacctctcttgcctatgagcaattaattagccttagcatctgcccttctccctgtgagattggtgtcagggtagaaggctacataagtgtgttctctgaactgtgagcattctgtacatgttattagtgtgtgtttgcatctagattagtctttttcttacatgaaatgtaaaccttttaagtgaaagtctttcaactagaaaagctttgccttttgactctttgctacttagctagttccatctctctgctcccgcaacacttgctcctctagggttttgatctgttgtatctagatttgagactctctcctcactacctcattatgatgggaaaggaagcaaacatgtacacacacaaatacatatgcacacatatgcatacatgcacacacacaaatgcacacacacacccacacacttatgcaggtatgcatatgcatatctatgttaagaggggaggaaagagaatgctcgattccaagaattgttgagataaagcaggtgacaggaaggatgagatggagagaatgcatggttaggtttacacaacccagcaatcatccccgtgtatctaagtcttataaatggttgactaggctagcacagtttcaagacaaccatatagtttccttcagcatggcatctggctaaattctggtagctcagtcactgggattagatactccatgtttccccatcttggtggatgagtaaagcagaaaaatggaagtaaccctgaatgtgtcctttctaaccaggcaaagtctgtcatgatactgtgttcaggaaattttccatttatttatttttcagtattagtgttttaataattcattatctaattatctaattcattagctctcctttatacctattaaaaaatctataaccattcgatgcaatagccaaggttcttcaggaaaacaggtctataaggatttatgtatatttctgtctgtctgtctatccagttatctccttccatccattcatcatctattaaagattttttaagtctttttgtttatatgatgtgtgcttgcttatacagtgtgtatgttggtgtgtgtgaatttgaacttatgaccacaagctgtgtataaagcactttatttatggaaccatcttcccaccccatctaagattagcttttgaaggattgcctcatgcactggaaaatctgaaatctgcaggtcaggctggtaggtcaaaacaggtagactttgtgtaattattgtaaggcagtattctttcgtagagacctcctggtctttgccctcaaagccttcaacagatggggcaggtcccatacacccaaagaaatgaattcagtctaagtcaataccatttaaaaatggtaattacctctaagacaactttcacagacacaagattagaaactgaccaacaactgcatctgatactccagcctagttggtgcatacaattagccatcacatatggtaaattatcacattctgtctataaacctgaactagagagaaaagctagagtttgagtagacatggtggaaggattgcagggtaatgagccttgtagctcactcactggtagatgttcccttagtttgatttcagcgtatagcatgtacattaatgtaaataatattctttgttaaaaatagagatgataactaggtgcattatttgaaatatccaaggaatcctaaggagtccctttctggctcatcttttagggttgtgaattttgttatgttcaataaagtagactctacaattttcatttaaaaccccaaacctagggagaataaagaggaagaaagattgtcacagtttgttttcatcaaaatcttggtgttttagcttccgtgatatttggggtgatttcagatactctctctagtcattggaagtaaaacaagtctatcaacaggaagtccattgacaacatgcttggagaggtgactgacgtaatgaggcaagtttgtacctaagagctcacagtgaattgactcagtgaatgcttctttcactaagaacactacaactacaaaacttctttggcccaaattgtttggaagctgcactgatgcagcatgtgataataatcatacttattacagtgttttgtgatgctcaggtttgggttaaacgagaaatacaattaggagcagcagcaattcccttacatttagattttatttcacattttgaaaacacatatagcctcaaagtaaaaaatgaaattaagctatctttatctattctcatatttaatcttttatgtaacatctttgtcattatttgattatctcccaatgacaaaatatatttataactaccttttgctccaagtttatatatatatatatatatatacacacacacacacacacacacacacacacacacacatacacacacacacacatacaagaattacatctaccattcaacataatggaaaacattgaattgagacttcttgaaatctaaaagtgtttattatcaatttcctttgctggtattacaaatgctaagtgctatggaaagcccattgaaaacaactgtaagtactggataatatgttgaaaactatctttaacaatgcatcactgagctggcaaaagagtatggcattgtaaaagaacaaaaggatgtgaaaacaggagccctgggagccaagagagtctactcatgtttctacgacctgacagcatcaagatccccattctgacctgtactcagaacagcaggacagctttacataagtcttaagccacatgagccacgccctggaatggcattggagtgaatggaaaataaacccaacacaggaaggaacactaaccaaacttgcctaatgtaactttggctgagaatagaggaaaagatgcacctttaatacgtgggcaccccaagctaatctactgtgtgcttgcttcaaggatgggggttatccttgccttctgtagaaaccatagtcagggtccttcaatgtgaacctagggagagagtgatgacagaaatctagcaaagacaattcatgaattgatactggggaatggaactccatgttggttctcaaggatttctcactaaaaaagatttcaaaggacatgtgtctgatcagaaaccatagagcaaacatgaaatgccttgcacaagccaccaggattgtgagaaaagtaaaataaacttgtagaaccagcctcagggcttcaaccaggggtgcttttgacatggaagatgataggtatgcatgaaacagaggtaaggaatgaaagaaggcttcgatgttagcagcaagaaggaagatgaacagctggctgaacagactagaagacaataaaaacagtctttgataacaaaatagtgtaactatggtggtaaaaaaaagttatagatgggccaaagatggaatgaatggagcactagaaaaattatttaactgaagaatatccacatatcctggattgaacaaagctccatgtggtttctttgaagagttattccagggatgtttcagcttcagatttggagataaatttttctacagaggacaccaagtaccaataagtttgtatgttggagagctgttcttaaattactccagttcaagattttatacacacacacacacacacacacacacactcctgtgaggattagtttcagtgcagtgtatggaagtaccaccattttaaccagggttacataaggccaccgagcagagaaaggaaacacacaatgttcagagagcatagcagccacatagctcctagaaatgttgaaagacagcagacattggatttagaagcttgcgatatgcaagcagaaatggaaaaaaaaataaatcctcagcatggacccatatggtggagtgagcagaacaccgagagtgaaaagcttaccttgaatacagctggagaacagacagatccttcaaaggcagaggcatgccagtgagaagccagcgcacaactccaataggcagaaggacataactgctgagttacagcttcgatagggaagccatctgtcaacctagaatgatgtgatgatgtcagcagacagaaagtttcgtgagcatgagtgtgtgcatgcctgcatacatgtgtgtgagaccaaagataatttggagcatgcattttaaacctaggaaataagattctagcaataatgtctgatcttgtgttggggctagatattgagatgagaaaaacaaggatgaattcatgagacaatggatgaagctaaaataccacagtacgataatgatttataggttgggatgaagaagaggcaaagtgtcatgtgaatccggcatcctttgcaacctttctgtgtgcctgactgttatcttattgtcagggtatcagatgaactgatttgggctcagctagaaatctcacttgttttttttcagggatagggatataaatcttgacatatttgctttctaagtactaggtcatataaggaattaaaattcaatgagatttgactgccatagtcttactaaggataatatttgatgttgactgttcaataagtgttattttgattttgctctaggtgatatatattttttcttttaatatttttaattttttaaaaaaatgtagggatgattttgcttcagattcaaagactatttcattattttgactttcaacaatacatagtgcttttaaaattcaaatttttccccaataagactttgagaatagtctcatcaacattcaggataatttatccgttttaatttttctcttttgggtggtattaatttttttaaaaattatttttgccatttatttaatagtttagtacctcacccaaattcatctgtaagcatggctgattttaaaatgtattttgaagtgaggcctcactccttcatgaagaggtacagtcaatggctgtagagagagggagaatcaatcagttttctctaggaatgagccccgtgatgacttattcaatcccaagggtcagccctaaaatcatgcacttgtaagcaacactaagtagaccccacagattagtgtgcaacaagaataattatgaaggaagagagcatgaagttgtcagggagtggggggggcacaggaggagtcggagaagaagggatagaagtgatataaatacagtattcatgtgtgaaattccccaccaaaataaaaaaaaaatgactaatgaaagagaaaacaacacagcaatcagccaaaagctagtcatggctggtaaagaggatgaaatatttattcagttttgcatgtttactttgaaagtaaagctttgatgagttgcatgtaacagtactgtccagtctttcgcataaacatgtatatgacattttattttatatttgctgagtagaagaatgtagacaaggcctttttagccatcccgttttagaatacatatggagcaaggacagaaccctttagagtgttggtgactgatgagatttcttggaacctactgcatgctgattttactaggcaagataacaacttcagatggtcagctgcattccagttcatatctcctttaacatccctctctcttgcattcttggattgtagcactcctacatactggttaagaagtcattactctgtacaaagaaaactcggtggaattaatttcctggtatcttctctctttgatgtgtcacgataaggctctgagtaagttttggtggctggcatcaattcaaagaacaattcttgacctaggtgtgggggaggagcaataaaagaaaaaaatgttttttccttaaataggttaaaatatctattttttaaaaatagccttaaatcgtttttcttcttattaggtgacctaagatggataactaattgagagagttaagtacaatagagagctctttgaacagcatcgtgtgtctgggttatcttgcccaaaagctcagacagatacgacttgtaagccagactcatctgaagttttcaaatggctgcaggtgtcttaggaagagactaattttattttctgatgattggaaagaatgaccagatcacgaactctgaagctcctcttggtccctcatgtcctggacaacgcgttctgagtttctattttcagttggacagtgacttcgtcttcctgctcattctgtatctccatcttaaggctcaggagcatctcatctcactcgctccttataaacttatatgccaccccacccctccattgctattcctataatggtgactcatctctaggagagtataagtgagaaacgacatgacacattccgggatcttcaggagttactgtgtttatggtcttattcactttttaataaactgtactgtgtgtagtaagtgctacccagctgggacttggccaatatttgtgacatggaattatgtttggtcttcagataagtgataataaaacacaagatgacagacaccttcaacccaagagaaatatggactaaagattttctttctttggataaacccagagttttgaaaaacaacttcatatttagttgtaagacatttttgctcacaggtcaagtttaataaagtagacttgaaaaatatgtggataatatctattaaattgttatgaaataaatataaatgtggtatctacaaaaattattgcatctctaagaatgttgaactataaagatttagacataggtgatatttaaaatctgttattctgttgagatattaaatcttattcagcatggtttgtttgtttgtttgtttttgattttgttttggtttttaggttttttttgagatagagtttctctatgtagccatggctgtcctggaactcactctgtagaccaggctggcctcaaactcagaaattcacctgcctctgccttccaagtgctggcattaaaggtgtgtgccaccatgcccaggtagcatggtttgttgttgatgtgtcatttcttggacacttgccttcccatctttgattagtattcttcacatgcatcatgagtccctttctttaaaacagatttatttcttaggtcaattgtaaatgccaagataaatagttcacaaatggtcccaggcaaattgtgacccattttcgttctctctgtttaacttgacattgagactacacaaattcctttacatcatacaaacatatttctacaactttattttactcattttctctgtgcttaattcattcaataaaatgtatgatggctgctacaaaggaatagagtgtgctaaaatgctcccagccaaggtaacaggactgtgcgtggagtactcccagccaaggtaacaggactgtgcacagagtgctcccagccaaggtaacaggactgtgcacagagtgctcccagccaaggtaacaggactgtgcacagagtgctcccagccaagtaaacaggactgtgcgtggagtactcccagccaaataagcagaattgtgctcagatgtgcttccagccaagtgaacaggactgtgcacagacagcagggatgaacaggtggaggaaggaggagggactaaaagcttgagagactggtcaaaatcccccctcaaatacactcctgggctaggaagaatcagatactaggaggttgctgggtgagcagtctacccatttggtgctccagtttcagcaagacactgtcaaaaattgcactcgcgcgtgtgtgcgcgcacgcgcgcgtgcacacatacacacacacacacacacacgcacacacatacacgcacacacatacacgcacacacacacacacacacacacgagagaggttgtatttacacatgaggaaaaaaagtaaaatagactctttggaatctcatttactttacaactctaggcccctggaagacacctggatttgaagatttccattcagtcagctctgtggactgtatctattgctttgtttcagttaaactgtccccaaggattaaacagacaaaccaaccagaaaattaaaatcaaacaaccaaaatcttgctaataagaatgaactggcaccaccagagagattagagaaatcctctagactgtgctgtgcaagactatgctccttgttttaagccattcagcgaagggtttttcctgccatcattgatgatgcttttgtctctttatcaggttttcagcaataggagttgtttcttaaaatccagcctgcatgggtgtttttccccctcatggctgtctttgtcaaggctacttcccatttatcacaaaatttcctttgtctttggagaaacacaggttaaggcaaaatcagagacgtttcatagaaagctgggctaaccattcaaacccaagtatgaagacatagcatatctaagcaggatttaatttgagagccaaaatactagaaataacaaacttggtaatcagttttggcacttgaacccgggctgaaatcaaccgcaatggcacctttgcacaacttttcacacaaagtgattttaacctctgtcattatacgctcgccccgtctccatagaaagctcagccccagtcctcgtggccccccacgggctgtgtaatttgtgcactggggaattattatttgtgagtgctgttctgtccttctgctcctttgtctcagagctcgagatgcctattttcttaataagaggcttcttttcacatagtcatactctgtcttggcatggcccctctttccttgaagcagacgcacagagcaaaatcccagacgatttttaacaaagcacttgattttcccttctcttctgaatgttacctaactcaagctcaccatgcaagaaatccctggaacaactttagaggaaacgggccatgaagcttgatttaagggctggtctcttgtgtaattttgcccaagtagtttaataacatctgcccttagctttattgtcactaagatgccattagactccaaccacatgagggacatgatgtgatgtagcataccatgtatgtatacatattatcacataaagtactaaataaatggaacacatcactccgtgtcagctcatgtgacactgctcatggtgacgaggttgctctgttcttgttttctacatcggtaggatgaacatgcaggtcttgtgcttagggaatccattgttgaaagggagaatctcctacaggaaagggtcttctgcagggttaccgggatggaatgagcttcagatagaataaagcaacagtaaccagagctggcgcaactctttgccctcaggcattagaaatacgttcattttcttggtcaagttctttcgggaagagaaagttgaagacttttattgctgctgatgcacagtggcatggatttagaacagggccagggctgaggtgaaatgcataaagtgtgacaccctagtattggacaaaaaaaaaaaataagacaagagagactatattcaagacagttttaaattcagccttttataaatcacattcatgcaaacatctacgatgataaaactttaaagcaagaccttgcatttttcatatgttctaacataacattgtttaagggagaatagcactagctggtctcctctcttcatagagccatttatattcatttcaagttctccttttccatgcctgggggttcctcagaaacattgatctgtattggtgaggttatagagacaagtcagcaaagtgtgccttattataaattggggttataaaatgtgattaaatgggaaaatgcgcagcattttgtagaccaaatacctgttaaaatatatttttgaaatccatggagaattgtgcctaagactccaaaacatttgaagggtatttacttttcatgtttaatgaaaaagtgacatgttcctttctaacatactctttttagcatctttgccaatagaaatcacaatgggacagttctcacagtagcaagcatttcagtttgcctctgaagtcctttctggaatttgttatatgccaatggtgacagcacttttaaaaatttgtcccttttgcatgtttttattattttaatacagttttgtatctgagtgctaattattaaaagcatactaatagcttttaagtatttgttgccttgtttgtaggaattttcattaagatctatctatctctatctatctatctatctatctatctatctatctatctatctatctatctatgtctctgtctatctgtctgtctatccatctatctacctatcaatctatctccatctccacacctgtctatgtataatttatttatatcaacatctgtacatcttattgatcatctaccattttttcttcaaatagaaaaatgtttgcagttatctcttttgctcattgtttgggatcaattgagctaaaaacctaatacagtggtaaaggttcatttccatttatatgagctctcagaaatgtatcatcatattccatttctcggacagtcaagtcatatacattgttcagttctttcaccaacatatcatgcaaaataatagctgtgggtgataaaggtgctttctaaaagatcccgtggctgcttgctcaagcactgcctcaatgaggagtgaacccctgcccctccttgctgcccatttagcttcatgccccttgattctgttaaagagctgctcagtggaaatttaatatggatgttttatttaattattacttcctctggcttctggccaattaaagtccaagaacataaagtttaagacctattgagaatatacaaaagtatactctctatctcagttataaatattttctagtttgtaaaataatttatagatatatgttgtaaaccaaaaccaatgttacttgatttgagtttaataaatatatttatgattacagcatatttgcttttcattatcattgttttcttctacctttctctagaatgaacttcaaacaaagcaaatactagtattatttgcctctaagtattgtcactagtactgttttgccctctaaacctaaaaagcaaacaacttcaaaaccatcacaaaatgataataattaaaagtattgctggcttaaattgtttttttcacagaagcaaaaagcacccaatgataaacacaagattaaacttcaccataagtattgttctgaaattgagataatctctcaggcataggtaagccgggcaaggggctggatagtcacaatactggcaccgctatttactgcttacatttgattaatttctctcatgtctttaagtcaagatttcctgcatagaagcactgtttcggttggtcttaatgtactttcacaccatgtgacaatgacagtcggaagctgtattctctctgttatgattattatccaccatgttttgcatttctttggtaagggtggggtgatgatcatgtactcagcaaccaaactctcttctctggtaccgcactgtcctcttgcacagctgaaatcttattgctcatgttgaggatgagtacacaggcagctcagctgggacacagctcttaccacatatcctggattgaacaaagctccatgtggtttctttgaaaagttattccagggatgtttcagcttcagatttggagataaatttttctacagaggacatcaagtaccaataagtttgtatgttggagagctgttcttaaattactccagttccggattttacattatatatggtaaattgtcatctttgcatctttaatttgccagctggattcctttccatagtcagaagtgcattctttaccatgtaggctaactgcacgtccgtccacacaaccatgctttgtgggttcttgagtcataactgtggtgttagccgaatgacactaaatcacatctatactgtcactaaataaaaacttaataaaagtctggcagtttaaagatcttctgagaggtgctgaagatcatcattagctgttaacagtactgtgtttttaacttattagtgtaatctctttggggaatattctctctctctctctctctctctctctctctctctgtgtgtgtgtgtgtgtgtgtgtgtgtgtgtgtgtgtgtatgtgtatgtgtgtgtgtgtgtgtctgtgtacagagggagaaagaaaaaaacacatatgcacatcatcttttaaaaagaaagttagctgtcctagcaaaacttccaaatgtaagcgatttattataataaaaaattatttattgctcacagaatagttcgtttctcggtattttatagagctgtaactgcctctgttctacatggtaattcagaaaaaacgcagacctattccttcttcagtgacactgttttgtgaagccctgtgtttctagcttgaggaacaagaagttcaaggttgaatccttcttgataactttggccttgaccatcacatttttctgttctcattcagttgagaagaccttggtcatgatgggtcatagatgcaggcatgggagagattgagaagtgtagtcctcgcatatgatacctactccggtggaaaatgtaactctaaactacaggagtggtacatgcaagaccttttaaatcccagtattaaaagctaaaagccaaatgctatagagtcagataagcaagagctcatctggatgtctcatacatgtggggtcttaagtgggggaagaatgtgttggcatgtgtgtgtgtgtgtgtgtgtgtgtgtgtgtttgtgtgtgtatagtgatcacatgatgggagacggtgttatagtgtgagatccttgccctgattcttctttccagaaggatgttcatcgctataacacccttctcatttggcctcacttcttaaaggttatgtgacatcttagcgccttctccctggggattaactttcagcacattctcttaggatacaaacccatgcaaaccagagatgagattatctatgaacagaaaaagttttattgtatactaagcataaataaccaagaagaattaagttcatttttccaatccacacaagatttctacaccagaatcccaaatattctgagtccagtttcccaccattcttaatgcactacattttacataatccaatctcatagtgaaatattgttttaaaagtatatgctggtagcattcttagccctcctgctgggtagaggacagagccgcattaagtgagcacataccgaagctccccattttctttttgaggtccaaacacaatcacatcatttctcccttccctttcctctctctaaacccttctgtatgctcctccttgctcttttccaaatccataccccccttttttattaatggctattacacacatatactgagattcccccatcttgacgtaagccatctctctgatgtttccaccaacgtgcttttaaaatgtcttgatttacgacttccttagttctattaccataaaaactccataaaactgtttccactttggaacacgatctttggggaaaccaaaatctatgttccaggaacatggtcatttatttattggcttcagaatagactctctcttaatccctttgggacaaaaagtaaatgttttggctagtgaaataactcaaaagataaagacaccgttagccaatcctgatgacctaggtttaatctcccacactcaggtgtgggatagaagcagaagtcggactcccatcaagctcttttctgacctttaatatcttccatggcaaacacattccccaccccttacacacacacacacacacacacacacacacacacacacacacacacacacacacaaagtaagtaactgtaattcaaggttaatgtagactaaaaaaagcccatttcacatcaattctatactgataacaaactaatttctggaatcctggtacttttgtttttcttttttgatgtcaggtaagatagtgccaggggcacagatcttgaaccacaatgtactgcctttgaacttcattatctatgtatgagttctcaggagggaacatttcttctgcagaatttggttttatgttccatttctctttgggattctggtttgaaaatatttattgaacaggattttctaatttcacctgctagatgcttcaagagagaaagcagtcgaaggcctctgcccttgaaggccttgaaatacatagagttggagagaaataagtcacagaacaggaagatggtactcaaatattatgagtttagagaaagggaaaagatcataaattagatgggaggagaactgcggagacaaagcagctctgagctggttatgagtcaagcctgttcgggtttgagcactgcagtcagtcaggaaaccatctcaggagaggaagtgatatgaacaaaagcttgtcttcgtctggcctgcttcctgcctttcgcttttgttactatgcaaaataatggatttctctggggcattccctatatactcgcttcgtccttatgctcctctatccccactgcagacacggcccttccacaccccctctctcatctctctcccatttcttcagtactaatgtccttgtgtcacccaacataaaccaaagcctccttgtctgcccaggccactctctgtgaatgggtgtaaccatggctctcaatctattcccacccttactttctctggacgctgtgaagactcatggctgccttccctttcacctctagtaggaataggtcattgcctccagggattgtccccattattaagctgaatatccccaaattcctcaactgctgtttttttcctgatatggttgtctttttcacccacctagttgggagcaccaaggaggaagcacattcggtcttttacattttttttccattttctattaggtatttagctcatttacatttccaatgctgtaccaaaaagtcccccatacccacccaccccctcccctacccacccactccccctttttggccctggcattcccctgtactggggcatataaagtttgcaagtccaatgggcctctctttgcagtgatggccggctaggccatcttttgatacatatgcagctagagacaagagctccagggtactgcttagttcatattgttgttccaccaatagggttgcagttccctttagttccttgggtgctttctctagttcctccattgggggccctgtggtccattcaatagctgactgtgagcatccacttctgtgtttactaggccctggcatagtctcacaagagacagctgtatctgggtcctttcagcaaaatcttgctagtgtatgcaatggtgtcagcatatggaagctgatcatgggatggatccctggatatgccaatcactagatggtccatcctttcgtcacacttccaaattttgtctctgtaactcctttccatgggtgttttgtttcctattttaagaaggggcaaagtgtccacactttggtctttgttctcttgagtttaatgtgtttagcaaattgtatcttatatcttgggtatcctaagtttctgggctaatatccacttatcagtgagtacatattgtgagagttcctttgtgatagggttacctcactcaggatgatgccctccaggtccatccatttgcctaggaatttcataaattcattctttttaatagctgagtagtactccattgtgtaaatataacacattttctgtgtccattcctctgttgaggggcatctgggttctttccagcttctggctattataaataaggctgctatgaacataatggagaaatgtgtccttcttaccggttggggcatcttctggatatatgcccaggagaggtattgctggatcttccggtaggactatgtccaattttctgaggaaccaccagactgatttccagagtggttgtacaagcttgcaatcccaccaacaatggaggagcattcctctttctccacatcctcgccagcatctgctgtcacctgaatttttcatcttagccattctgactggtgtgaggtggaatctcagggttgttttgatttgcatttccctgatgattaaggatgttgaacattttttgaggtgtttatcagcctttcagtattcctcgggtgagaaatctttgttcagttctgatccccatttttaatagggttatttgattttctggagtccaccttcttgagttctttatatatattggatattagtcccctatccgatttgggataggtaaagatcctttcccaatctgttggtggcctttttgtcttattgacggtgtcttttgccttgcagaagctttgcaattttatgaggtcccatttatcgattctcgatcttacagcacaagccattgctgttctattcaggaatttttcctctgtgcccatatcttcgaggcttttccctactttctcctctataagtttcagtgtctctggttttatgtggagttccttaatccacttagatttgaccttagtacaaggagatagtaatggatcaattcgcaatcttctacatgataacagccagttgtgccagcaccatttgttgaaaatgctgtcttttttccactggatggttttagctcccttgtcaaagatcaagtaatcataggtgtgtgggttcatctctgggtcttcaattctgttccattggtctacttgtctgtcgctataccagtaccatgcagtttttatcacaattgctctgtagtacagctttaggttgggcatggtgattccaccagaggttcttttatccttgagaagagtttttgctatcctaggtttttttgttattccagatgaatctgccaattgccctttctaattcattgaagaattgagttggaattttgatggggattagattgaatctgtagattgcttttggcaagatagccatttttactatattgttcctgccgatccatgagcatgggagatctttccatcttctgagatcttctttaatttctttcttcagagacttgaagttcttgtcatacagatctttcacttccttagttagagtcacgcccaggtattttatattatttgtggttattaagaagggtgttgttttcctaatttctttctcagcctgtttgtcctttgtgtagagaaaggccattgacttgtttgagttaatttttatatccagctacttcactgaagctgtttatcaggcttaggagttctctggtggaatttttagggtcatgtatatatactatcatatcatctgcgaaaagtgatattttgacttcttcctttccaatttttatccccttgatctccttttgttgtctaattgctctggctaggacttcaagtacaatgttgaataggtagggcaagagtggacagccttgtctagtccctgattttagtgggattgcttccagcttctcaccatttactttgatgctggctactggtttgctgtagattgcttttatcatgtttagttatgggccttgaattcctgatctttccaagacttttatcatgaatgggtgttggattttgtcaaatgcnnnnnnnnnnnnnnnnnnnnnnnnnnnnnnnnnnnnnnnnnnnnnnnnnnnnnnnnnnnnnnnnnnnnnnnnnnnnnnnnnnnnnnnnnnnnnnnnnnnnnnnnnnnnnnnnnnnnnnnnnnnnnnnnnnnnnnnnnnnnnnnnnnnnnnnnnnnnnnnnnnnnnnnnnnnnnnnnnnnnnnnnnnnnnnnnnnnnnnnnnnnnnnnnnnnnnnnnnnnnnnnnnnnnnnnnnnnnnnnnnnnnnnnnnnnnnnnnnnnnnnnnnnnnnnnnnnnnnnnnnnnnnnnnnnnnnnnnnnnnnnnnnnnnnnnnnnnnnnnnnnnnnnnnnnnnnnnnnnnnnnnnnnnnnnnnnnnnnnnnnnnnnnnnnnnnnnnnnnnnnnnnnnnnnnnnnnnnnnnnnnnnnnnnnnnnnnnnnnnnnnnnnnnnnnnnnnnnnnnnnnnnnnnnnnnnnnnnnnnnnnnnnnnnnnnnnnnnnnnnnnnnnnnnnnnnnnnnnnnnnnnnnnnnnnnnnnnnnnnnnnnnnnnnnnnnnnnnnnnnnnnnnnnnnnnnnnnnnnnnnnnnnnnnnnnnnnnnnnnnnnnnnnnnnnnnnnnnnnnnnnnnnnnnnnnnnnnnnnnnnnnnnnnnnnnnnnnnnnnnnnnnnnnnnnnnnnnnnnnnnnnnnnnnnnnnnnnnnnnnnnnnnnnnnnnnnnnnnnnnnnnnnnnnnnnnnnnnnnnnnnnnnnnnnnnnnnnnnnnnnnnnnnnnnnnnnnnnnnnnnnnnnnnnnnnnnnnnnnnnnnnnnnnnnnnnnnnnnnnnnnnnnnnnnnnnnnnnnnnnnnnnnnnnnnnnnnnnnnnnnnnnnnnnnnnnnnnnnnnnnnnnnnnnnnnnnnnnnnnnnnnnnnnnnnnnnnnnnnnnnnnnnnnnnnnnnnnnnnnnnnnnnnnnnnnnnnnnnnnnnnnnnnnnnnnnnnnnnnnnnnnnnnnnnnnnnnnnnnnnnnnnnnnnnnnnnnnnnnnnnnnnnnnnnnnnnnnnnnnnnnnnnnnnnnnnnnnnnnnnnnnnnnnnnnnnnnnnnnnnnnnnnnnnnnnnnnnnnnnnnnnnnnnnnnnnnnnnnnnnnnnnnnnnnnnnnnnnnnnnnnnnnnnnnnnnnnnnnnnnnnnnnnnnnnnnnnnnnnnnnnnnnnnnnnnnnnnnnnnnnnnnnnnnnnnnnnnnnnnnnnnnnnnnnnnnnnnnnnnnnnnnnnnnnnnnnnnnnnnnnnnnnnnnnnnnnnnnnnnnnnnnnnnnnnnnnnnnnnnnnnnnnnnnnnnnnnnnnnnnnnnnnnnnnnnnnnnnnnnnnnnnnnnnnnnnnnnnnnnnnnnnnnnnnnnnnnnnnnnnnnnnnnnnnnnnnnnnnnnnnnnnnnnnnnnnnnnnnnnnnnnnnnnnnnnnnnnnnnnnnnnnnnnnnnnnnnnnnnnnnnnnnnnnnnnnnnnnnnnnnnnnnnnnnnnnnnnnnnnnnnnnnnnnnnnnnnnnnnnnnnnnnnnnnnnnnnnnnnnnnnnnnnnnnnnnnnnnnnnnnnnnnnnnnnnnnnnnnnnnnnnnnnnnnnnnnnnnnnnnnnnnnnnnnnnnnnnnnnnnnnnnnnnnnnnnnnnnnnnnnnnnnnnnnnnnnnnnnnnnnnnnnnnnnnnnnnnnnnnnnnnnnnnnnnnnnnnnnnnnnnnnnnnnnnnnnnnnnnnnnnnnnnnnnnnnnnnnnnnnnnnnnnnnnnnnnnnnnnnnnnnnnnnnnnnnnnnnnnnnnnnnnnnnnnnnnnnnnnnnnnnnnnnnnnnnnnnnnnnnnnnnnnnnnnnnnnnnnnnnnnnnnnnnnnnnnnnnnnnnnnnnnnnnnnnnnnnnnnnnnnnnnnnnnnnnnnnnnnnnnnnnnnnnnnnnnnnnnnnnnnnnnnnnnnnnnnnnnnnnnnnnnnnnnnnnnnnnnnnnnnnnnnnnnnnnnnnnnnnnnnnnnnnnnnnnnnnnnnnnnnnnnnnnnnnnnnnnnnnnnnnnnnnnnnnnnnnnnnnnnnnnnnnnnnnnnnnnnnnnnnnnnnnnnnnnnnnnnnnnnnnnnnnnnnnnnnnnnnnnnnnnnnnnnnnnnnnnnnnnnnnnnnnnnnnnnnnnnnnnnnnnnnnnnnnnnnnnnnnnnnnnnnnnnnnnnnnnnnnnnnnnnnnnnnnnnnnnnnnnnnnnnnnnnnnnnnnnnnnnnnnnnnnnnnnnnnnnnnnnnnnnnnnnnnnnnnnnnnnnnnnnnnnnnnnnnnnnnnnnnnnnnnnnnnnnnnnnnnnnnnnnnnnnnnnnnnnnnnnnnnnnnnnnnnnnnnnnnnnnnnnnnnnnnnnnnnnnnnnnnnnnnnnnnnnnnnnnnnnnnnnnnnnnnnnnnnnnnnnnnnnnnnnnnnnnnnnnnnnnnnnnnnnnnnnnnnnnnnnnnnnnnnnnnnnnnnnnnnnnnnnnnnnnnnnnnnnnnnnnnnnnnnnnnnnnnnnnnnnnnnnnnnnnnnnnnnnnnnnnnnnnnnnnnnnnnnnnnnnnnnnnnnnnnnnnnnnnntatgtgttttcctctttttctgtaaggacttctacctgtttgattgtgttttcctgtttttctttaaggacttgtaactctttagcagtgttctcctgtatttctttaagtgagttattaaagtccttcttgatgtcctctaccatcaccatgggatatgcttttaaatctgggtctaggttttcggatgtgttggggtgccctggactgggcgaagtgggagtgctgggttctaatgatggtgagtggtcttggttcctgttagtaagattcctatgtttacctttcaccatctggtaatctctggagttagttgttatagttgactctgtttagagattgttcttctggtgattctgttaccgtctatcagcagacctgggagacagactctctcctccgagtttcagtgctcagagcactctctgctggcaagctctcctcttacagggaaggtgcgcagatatcttgtgtttggacctcctcctggctgaagaagaaggcccaaaacaggacctttcccagaaggtgtcagcttctgtggagcacactctcacctgtgcagactaatttcctaagttcggcggagtcccggaaccaaggtggcacccgctgctcctgaggcagagggcttccgagccaggcagacacctgtcctctggtcaggacggtggccggctgttattgttatgctccacaacacattttaatcttgaataaaatgcacgtagcacatagcttctactctaaaccttttaggtgtggagttgagcatcttgggtataatcatgccgcatagacactgatgtcacccatctgaaggacctcagattgcaactctaagtccattagacagtaactcgccctcctccatctctggtcacctctaatctactttctgtatccacgaatctgactattcaagataatggatttaaatggaattatactgtataggtccttttttttgctagtttacttcaatagcatatgaatcatatgcgcgttttctttccttctttatttttatttatatcttaatttttttacttattcactttacatcccacaatactctcacccctcctcttctnnnnnnnnnnnnnnnnnnnnnnnnnnnnnnnnnnnnnnnnnnnnnnnnnnnnnnnnnnnnnnnnnnnnnnnnnnnnnnnnnnnnnnnnnnnnnnnnnnnnnnnnnnnnnnnnnnnnnnnnnnnnnnnnnnnnnnnnnnnnnnnnnnnnnnnnnnnnnnnnnnnnnnnnnnnnnnnnnnnnnnnccccccccacgctggcataatgtttttaaggctcatcctggtagcttaccatatattgtcacacatttggttttaatgtttaaaggtttttatttatgtgtctgagtgtttgcctacatagaatgtatgtgtattgggcatgcgtatgtgtgcaggccttggtgcctatggaggccaaaagaaactatcagatacctaggagttggaggtgattgtcagctgccgtgtgagtgctgagatccaagcacaggctgtctgagaacaacagcaagtgcgctaaccactgggcaatctcgccaggtgctcctcacatggtttcctcagcctttctcttttctaatagctggcaccataggaagtcacacgaaatcaatatgaaaagacataaaggaaatacagtttcatgttaaatggacactcagagacatttttgggaacagagacactgtagcttagagtctggaagacacctggaagaagtgaggaaggcaaggaagacaaggatgggaagggttgtagctcttgaagtatctgcattcttctgtgaaaaactctcatccctgctacaaaaatgagaggggtgtttggttgttttcttgttgttgttttgtttggctgtaattcatgtgtgaaactttgtgttagctcctccattgctggggatgagaagaggagtgggaaggaggttagcatccaagcaagcaggcggcatcttcatttgtgtcaatatgtttgatacacgctgaacgtcattgagtattcactgtgccccaaagagagcatgctgcactgtgtgacactgtgtgacacacatctcatcccacttctctcgttgggtcagatctggctcacagtaaaaatacctgcatcttccttcttcctgtccacagctttctggttgatgtgcaaaagtcaaatgacaatgaagacaagccacgggaaggatggcagaaggctgagggcagtgaggtattcctcagcctggcctagctcaggctttctcactgccgctcttccttccgctctcagtgatctcatctccacaggtcctaacacgcacagtgcttaccaatttacagtgtgctttattgttaagtgacttgattgagcctttgaatagtgtggaaggaagatgagtggcttacacaagactgaacaatacccagcagaaaagcaagggcatgctctgatgccatctcttagatcacagggccacttcattttggagcctttcacgatgaagcaatactagggattcaattacagattttgttcacttctttatatggtgatatgataacggatgatctagaacattatgtcgtgatttatgagctccatatgaagtaatttatctataatcttcctgtcaaatgattgtcacttttcccaatagggccacagagaagcaaatgtatttaaatgttcatgttaacagcagctgtcaagcaagcagcaaaagtaagaattttggtttgagtccaaatgttcctcatggcactgtctattaagaccaccgatgctcacataccacttgagttttttgtttccctatgatgtaaggaacaaacttttgattgcctgtgaaggatacagacttcatgacgacctgctaggagttccacatcgactaccataaaatcacattcaaacatcccagcaaggcctggaggtcctctccaactagcctagattctattcaggctagtatttcttttaccaaacatatacctctgctacccagccctcaggatgcttttgtggtttctgcttctctttacccaaaatgtatcatcccccagtacctagactattgtcattcatgttgttctataattaaggtcagctcatctcccacttgacaccagttcacttcctttctcaaacatgtgagcttgcagttgtgcttagtcccagaacaggtgctgagtcatgtcatgccgtgtgttgataaactgtgaggtcatgtcacgtgtctctgaatacacagtcaagcaatcaagagcagtgagcatgtgcatagcaggtataactttaaaatccatctcaatctatgaagtacattaaaccacactgaatctcagctcttaccacagtgcttggaatgtagtgggctttcaacaaatatttatggaggtagagaaagacttttgtcatcttcatttgattatgtaaacctggaagtggcaaagaaatctgttgttttgggtcatttcaaatgtatgaaggtcttctctagaaggcttcaagaccatctgaagatgttattcctgtatcccagataacaagatggtgcactaagaaccttttctcttcctaaagtagtcttcccagatcagaccaaaccaaaccaaagcaaaaagcactacaaaatataaccactgagaacaacatttgagttttggttggcctaccctacctttgcaaatcccaggatctttgtgtaaatctttgcagaattagtatatttctggcttttgaatttcaacatataattattttgagtctgttcaattaatgtatgatttatcaatcaaccgctaaataaatgaaggattctgtgatagaaattttcagaaataaaaatgtgagacattaggaaatggcccaacatcacactatactcaagttaaagaatatgactaaatagacgtgtgtgtgtgtgtgtgtgtgtgtgtgtgtggcagcctcaggaaaaaattgaagtgaattttaaattgataaaaagagtaaaataagaaaaatcatatccccagtgttgcaaagtgagacagaaacaatgtctggaagttgttacaggtgtaggagcttcagatggacaggtaaaatccattatgtctgctaattctaacatgtcagaagaaaaactcaccctgagaaatacgtgccgaggatttacaattgctggaagctaagaaacacaaggaccaagggtatttttcagaaaactgttgtttcactttctgcctctttcctgacagtgactgcttttagcagggcaaaaggtatctgaaatttccttgagtttgaaatttaaatcgtggccactttgctcacacccactagaagcagcggaagagaaaaacaggaacctgagtgcatggtggtgaagggaggagcttgaaggatgtcaccagcccgaagtcttagcagggcagagactggcaaggggatgcaaggaacacttggcgtagacccccaagtctttcaaaaatgacaagagaagtcctagcaaccttttttttatgctgacactttgcccctttgcttactctgggtaatcttgtgggcttcttagtctctctgtttcattttaagtcagagaacttccacatttcaatgaagagagagagggtcccaaggaatccagactggtgtcaggcttgctatgtctctcaggatgactcagaacttctgttcgccctgcctctacctctggaatgctggcattgccggcatgcatcattctatcagtctgtggtgctgggaattaaacaaagggctttgtgtagattagaaaaaaactccaccaactgagctgcagccacagaaataatttaaattcagtttaaacagattcacaaaacaggaaaatcatgcataatatactcatatatcacataataatgcatatagcatatgatattgcatgtagcatatgataatgcatgtagcatatgcattagttgattttctgttgcgtaaaaaaaaaaaaaaaaaaaaagagcggtcgccatcttggtccgggacccgccgaacttaggaaattagtctgaacaggtgagagggtgcgccagagaacctgacagcttctggaacaggcagaagcacagaggcgctgaggcagcaccctgtgtgggccggggacagccggccaccttccggaccagaggacaggtgcccacccggctggggaggcggcctaagccacagcagcagcggtcgccatcttggtccgggacccgccgaacttaggaaattagtctgaacaggtgagagggtgcgccagagaacctgacagcttctggaacaggcggaagcacagaggcgctgaggcagcaccctttgtgggccggggacagccggccaccatccggaccggaggacaggtgcccgcccggctggggaggcggcctaggccacagcagcagcggtcaccatcttggtccgagacccgccgaacttaggaaattagtctgaacaggtgagagggtgcgccagagaacctgacagcttctggaacaggcagaagcacagaggcgctgaggcagcaccctgtgtgggccggggacagccggccaccttccggaccagaggacaggtgcccgcccggctggggaggcggcctaagccacagcagcagcggtcgccatcttggtccgggacccgccgaacttgggaaattggtctgaacaggtgagagggtgcgccagagaacctgacagcttctggaacaggcggaggcacagaggcgctgaggcagcaccctttgtgggccggggacagccggccaccgtccggaccggaggacaggtgcccacccggctggggaggcggcctaagccacagcagcagcggtcaccatcttggtcccaggactccaaggaacttaggaatttagtctgcttaggtgagagtctgtaccacctgggaactgccaaagcaacacagtgtctgagaaaggtcctgttttgggccttcttcttcggccaggaggaggtccaaatacaagatatctgcgcaccttccctgtaagagagcttgccagcagagagtgctctgagcactgaaactcagaggagagaatctgtctcccaggtctgctgatagacggtaacagaatcaccagaagaacaatctccaaacagagtcaactataactactaactccagagattaccagatggcgaaaggtaaacggaggaatcttactaacaggaaccaagaccactcaccatcaccagaacccagcacacccacttcgcccagtccagggaaccccaacacacctgagaacctagacctagatttaaaagcatatctcatgatgatggtagaggacatcaagaaggactttaataaatcacttaaagaaatacaggagaacactgctaaagagttacaagtccttaaagaaaaacaggaaaacacaatcaaacaggtagaagtccttacagaaaaagaggaaaaaacatacaaacaggtgatggaaatgaacaaaaccatactagacctaaaaagaaagaaaactcaaagcgaggcaacactagagatagaaaccctaggaaagaaatctggaaccatagatttgagcatcagcaacagaatacaagagatggaagagagaatctcaggtgcagaagattccatagagaacattggcacannnnnnnnnnnnnnnnnnnnnnnnnnnnnnnnnnnnnnnnnnnnnnnnnnnnnnnnnnnnnnnnnnnnnnnnnnnnnnnnnnnnnnnnnnnnnnnnnnnnnnnnnnnnnnnnnnnnnnnnnnnnnnnnnnnnnnnnnnnnnnnnnnnnnnnnnnnnnnnnnnnnnnnnnnnnnnnnnnnnnnnnnnnnnnnnnnnnnnnnnnnnnnnnnnnnnnnnnnnnnnnnnnnnnnnnnnnnnnnnnnnnnnnnnnnnnnnnnnnnnnnnnnnnnnnnnnnnnnnnnnnnnnnnnnnnnnnnnnnnnnnnnnnnnnnnnnnnnnnnnnnnnnnnnnnnnnnnnnnnnnnnnnnnnnnnnnnnnnnnnnnnnnnnnnnnnnnnnnnnnnnnnnnnnnnnnnnnnnnnnnnnnnnnnnnnnnnnnnnnnnnnnnnnnnnnnnnnnnnnnnnnnnnnnnnnnnnnnnnnnnnnnnnnnnnnnnnnnnnnnnnnnnnnnnnnnnnnnnnnnnnnnnnnnnnnnnnnnnnnnnnnnnnnnnnnnnnnnnnnnnnnnnnnnnnnnnnnnnnnnnnnnnnnnnnnnnnnnnnnnnnnnnnnnnnnnnnnnnnnnnnnnnnnnnnnnnnnnnnnnnnnnnnnnnnnnnnnnnnnnnnnnnnnnnnnnnnnnnnnnnnnnnnnnnnnnnnnnnnnnnnnnnnnnnnnnnnnnnnnnnnnnnnnnnnnnnnnnnnnnnnnnnnnnnnnnnnnnnnnnnnnnnnnnnnnnnnnnnnnnnnnnnnnnnnnnnnnnnnnnnnnnnnnnnnnnnnnnnnnnnnnnnnnnnnnnnnnnnnnnnnnnnnnnnnnnnnnnnnnnnnnnnnnnnnnnnnnnnnnnnnnnnnnnnnnnnnnnnnnnnnnnnnnnnnnnnnnnnnnnnnnnnnnnnnnnnnnnnnnnnnnnnnnnnnnnnnnnnnnnnnnnnnnnnnnnnnnnnnnnnnnnnnnnnnnnnnnnnnnnnnnnnnnnnnnnnnnnnnnnnnnnnnnnnnnnnnnnnnnnnnnnnnnnnnnnnnnnnnnnnnnnnnnnnnnnnnnnnnnnnnnnnnnnnnnnnnnnnnnnnnnnnnnnnnnnnnnnnnnnnnnnnnnnnnnnnnnnnnnnnnnnnnnnnnnnnnnnnnnnnnnnnnnnnnnnnnnnnnnnnnnnnnnnnnnnnnnnnnnnnnnnnnnnnnnnnnnnnnnnnnnnnnnnnnnnnnnnnnnnnnnnnnnnnnnnnnnnnnnnnnnnnnnnnnnnnnnnnnnnnnnnnnnnnnnnnnnnnnnnnnnnnnnnnnnnnnnnnnnnnnnnnnnnnnnnnnnnnnnnnnnnnnnnnnnnnnnnnnnnnnnnnnnnnnnnnnnnnnnnnnnnnnnnnnnnnnnnnnnnnnnnnnnnnnnnnnnnnnnnnnnnnnnnnnnnnnnnnnnnnnnnnnnnnnnnnnnnnnnnnnnnnnnnnnnnnnnnnnnnnnnnnnnnnnnnnnnnnnnnnnnnnnnnnnnnnnnnnnnnnnnnnnnnnnnnnnnnnnnnnnnnnnnnnnnnnnnnnnnnnnnnnnnnnnnnnnnnnnnnnnnnnnnnnnnnnnnnnnnnnnnnnnnnnnnnnnnnnnnnnnnnnnnnnnnnnnnnnnnnnnnnnnnnnnnnnnnnnnnnnnnnnnnnnnnnnnnnnnnnnnnnnnnnnnnnnnnnnnnnnnnnnnnnnnnnnnnnnnnnnnnnnnnnnnnnnnnnnnnnnnnnnnnnnnnnnnnnnnnnnnnnnnnnnnnnnnnnnnnnnnnnnnnnnnnnnnnnnnnnnnnnnnnnnnnnnnnnnnnnnnnnnnnnnnnnnnnnnnnnnnnnnnnnnnnnnnnnnnnnnnnnnnnnnnnnnnnnnnnnnnnnnnnnnnnnnnnnnnnnnnnnnnnnnnnnnnnnnnnnnnnnnnnnnnnnnnnnnnnnnnnnnnnnnnnnnnnnnnnnnnnnnnnnnnnnnnnnnnnnnnnnnnnnnnnnnnnnnnnnnnnnnnnnnnnnnnnnnnnnnnnnnnnnnnnnnnnnnnnnnnnnnnnnnnnnnnnnnnnnnnnnnnnnnnnnnnnnnnnnnnnnnnnnnnnnnnnnnnnnnnnnnnnnnnnnnnnnnnnnnnnnnnnnnnnnnnnnnnnnnnnnnnnnnnnnnnnnnnnnnnnnnnnnnnnnnnnnnnnnnnnnnnnnnnnnnnnnnnnnnnnnnnnnnnnnnnnnnnnnnnnnnnnnnnnnnnnnnnnnnnnnnnnnnnnnnnnnnnnnnnnnnnnnnnnnnnnnnnnnnnnnnnnnnnnnnnnnnnnnnnnnnnnnnnnnnnnnnnnnnnnnnnnnnnnnnnnnnnnnnnnnnnnnnnnnnnnnnnnnnnnnnnnnnnnnnnnnnnnnnnnnnnnnnnnnnnnnnnnnnnnnnnnnnnnnnnnnnnnnnnnnnnnnnnnnnnnnnnnnnnnnnnnnnnnnnnnnnnnnnnnnnnnnnnnnnnnnnnnnnnnnnnnnnnnnnnnnnnnnnnnnnnnnnnnnnnnnnnnnnnnnnnnnnnnnnnnnnnnnnnnnnnnnnnnnnnnnnnnnnnnnnnnnnnnnnnnnnnnnnnnnnnnnnnnnnnnnnnnnnnnnnnnnnnnnnnnnnnnnnnnnnnnnnnnnnnnnnnnnnnnnnnnnnnnnnnnnnnnnnnnnnnnnnnnnnnnnnnnnnnnnnnnnnnnnnnnnnnnnnnnnnnnnnnnnnnnnnnnnnnnnnnnnnnnnnnnnnnnnnnnnnnnnnnnnnnnnnnnnnnnnnnnnnnnnnnnnnnnnnnnnnnnnnnnnnnnnnnnnnnnnnnnnnnnnnnnnnnnnnnnnnnnnnnnnnnnnnnnnnnnnnnnnnnnnnnnnnnnnnnnnnnnnnnnnnnnnnnnnnnnnnnnnnnnnnnnnnnnnnnnnnnnnnnnnnnnnnnnnnnnnnnnnnnnnnnnnnnnnnnnnnnnnnnnnnnnnnnnnnnnnnnnnnnnnnnnnnnnnnnnnnnnnnnnnnnnnnnnnnnnnnnnnnnnnnnnnnnnnnnnnnnnnnnnnnnnnnnnnnnnnnnnnnnnnnnnnnnnnnnnnnnnnnnnnnnnnnnnnnnnnnnnnnnnnnnnnnnnnnnnnnnnnnnnnnnnnnnnnnnnnnnnnnnnnnnnnnnnnnnnnnnnnnnnnnnnnnnnnnnnnnnnnnnnnnnnnnnnnnnnnnnnnnnnnnnnnnnnnnnnnnnnnnnnnnnnnnnnnnnnnnnnnnnnnnnnnnnnnnnnnnnnnnnnnnnnnnnnnnnnnnnnnnnnnnnnnnnnnnnnnnnnnnnnnnnnnnnnnnnnnnnnnnnnnnnnnnnnnnnnnnnnnnnnnnnnnnnnnnnnnnnnnnnnnnnnnnnnnnnnnnnnnnnnnnnnnnnnnnnnnnnnnnnnnnnnnnnnnnnnnnnnnnnnnnnnnnnnnnnnnnnnnnnnnnnnnnnnnnnnnnnnnnnnnnnnnnnnnnnnnnnnnnnnnnnnnnnnnnnnnnnnnnnnnnnnnnnnnnnnnnnnnnnnnnnnnnnnnnnnnnnnnnnnnnnnnnnnnnnnnnnnnnnnnnnnnnnnnnnnnnnnnnnnnnnnnnnnnnnnnnnnnnnnnnnnnnnnnnnnnnnnnnnnnnnnnnnnnnnnnnnnnnnnnnnnnnnnnnnnnnnnnnnnnnnnnnnnnnnnnnnnnnnnnnnnnnnnnnnnnnnnnnnnnnnnnnnnnnnnnnnnnnnnnnnnnnnnnnnnnnnnnnnnnnnnnnnnnnnnnnnnnnnnnnnnnnnnnnnnnnnnnnnnnnnnnnnnnnnnnnnnnnnnnnnnnnnnnnnnnnnnnnnnnnnnnnnnnnnnnnnnnnnnnnnnnnnnnnnnnnnnnnnnnnnnnnnnnnnnnnnnnnnnnnnnnnnnnnnnnnnnnnnnnnnnnnnnnnnnnnnnnnnnnnnnnnnnnnnnnnnnnnnnnnnnnnnnnnnnnnnnnnnnnnnnnnnnnnnnnnnnnnnnnnnnnnnnnnnnnnnnnnnnnnnnnnnnnnnnnnnnnnnnnnnnnnnnnnnnnnnnnnnnnnnnnnnnnnnnnnnnnnnnnnnnnnnnnnnnnnnnnnnnnnnnnnnnnnnnnnnnnnnnnnnnnnnnnnnnnnnnnnnnnnnnnnnnnnnnnnnnnnnnnnnnnnnnnnnnnnnnnnnnnnnnnnnnnnnnnnnnnnnnnnnnnnnnnnnnnnnnnnnnnnnnnnnnnnnnnnnnnnnnnnnnnnnnnnnnnnnnnnnnnnnnnnnnnnnnnnnnnnnnnnnnnnnnnnnnnnnnnnnnnnnnnnnnnnnnnnnnnnnnnnnnnnnnnnnnnnnnnnnnnnnnnnnnnnnnnnnnnnnnnnnnnnnnnnnnnnnnnnnnnnnnnnnnnnnnnnnnnnnnnnnnnnnnnnnnnnnnnnnnnnnnnnnnnnnnnnnnnnnnnnnnnnnnnnnnnnnnnnnnnnnnnnnnnnnnnnnnnnnnnnnnnnnnnnnnnnnnnnnnnnnnnnnnnnnnnnnnnnnnnnnnnnnnnnnnnnnnnnnnnnnnnnnnnnnnnnnnnnnnnnnnnnnnnnnnnnnnnnnnnnnnnnnnnnnnnnnnnnnnnnnnnnnnnnnnnnnnnnnnnnnnnnnnnnnnnnnnnnnnnnnnnnnnnnnnnnnnnnnnnnnnnnnnnnnnnnnnnnnnnnnnnnnnnnnnnnnnnnnnnnnnnnnnnnnnnnnnnnnnnnnnnnnnnnnnnnnnnnnnnnnnnnnnnnnnnnnnnnnnnnnnnnnnnnnnnnnnnnnnnnnnnnnnnnnnnnnnnnnnnnnnnnnnnnnnnnnnnnnnnnnnnnnnnnnnnnnnnnnnnnnnnnnnnnnnnnnnnnnnnnnnnnnnnnnnnnnnnnnnnnnnnnnnnnnnnnnnnnnnnnnnnnnnnnnnnnnnnnnnnnnnnnnnnnnnnnnnnnnnnnnnnnnnnnnnnnnnnnnnnnnnnnnnnnnnnnnnnnnnnnnnnnnnnnnnnnnnnnnnnnnnnnnnnnnnnnnnnnnnnnnnnnnnnnnnnnnnnnnnnnnnnnnnnnnnnnnnnnnnnnnnnnnnnnnnnnnnnnnnnnnnnnnnnnnnnnnnnnnnnnnnnnnnnnnnnnnnnnnnnnnnnnnnnnnnnnnnnnnnnnnnnnnnnnnnnnnnnnnnnnnnnnnnnnnnnnnnnnnnnnnnnnnnnnnnnnnnnnnnnnnnnnnnnnnnnnnnnnnnnnnnnnnnnnnnnnnnnnnnnnnnnnnnnnnnnnnnnnnnnnnnnnnnnnnnnnnnnnnnnnnnnnnnnnnnnnnnnnnnnnnnnnnnnnnnnnnnnnnnnnnnnnnnnnnnnnnnnnnnnnnnnnnnnnnnnnnnnnnnnnnnnnnnnnnnnnnnnnnnnnnnnnnnnnnnnnnnnnnnnnnnnnnnnnnnnnnnnnnnnnnnnnnnnnnnnnnnnnnnnnnnnnnnnnnnnnnnnnnnnnnnnnnnnnnnnnnnnnnnnnnnnnnnnnnnnnnnnnnnnnnnnnnnnnnnnnnnnnnnnnnnnnnnnnnnnnnnnnnnnnnnnnnnnnnnnnnnnnnnnnnnnnnnnnnnnnnnnnnnnnnnnnnnnnnnnnnnnnnnnnnnnnnnnnnnnnnnnnnnnnnnnnnnnnnnnnnnnnnnnnnnnnnnnnnnnnnnnnnnnnnnnnnnnnnnnnnnnnnnnnnnnnnnnnnnnnnnnnnnnnnnnnnnnnnnnnnnnnnnnnnnnnnnnnnnntccacccccataatcagcttccaaatgctgacaccattgcatacactagcaagattttatcaaaaggacccagatgtagctgtctcttgtgagactatgccggggcctagcaaacacagaagtggatgctcacagtcagctaatggatggatcacagggctcccaatggaggagctagagaaagtacccaaggagctaaagggatcttcaaccctataggtggaacaacattatgaactaaccagtacccctgagctcttgactctagctgcatatgtatcaaaagatggcctagtcggccatcactggaaagagaggcccattggacacgcagactttgtgtgccccggtacaggggaacgccagggccaaggggtgggagtgggtgggtaggggagtgggggtgggtgggtaagggggacttttggtatagcattggaaatgtaaatgagctaaatacctaataaaaaatggaaaaaaaaagaaagacaataggcttcaaaaaaaaaaaaaaaaccattatggacaaggtaagttgtggttccagagggataagagtacatcatagcatagaggcctggcaggagcaggaagctgagagcttgaacctgcagccccaagcatcaggaagtattaatagcaaactgtaagtggagtggactgaggattttaatctcaaagcccacccccagtgacgtaatggcattcatggggctgcaccactaaacctccccaaacagtgccacaaattggaacatgaatgttcaacttcccaagataacaggggacattttcattcaaaccaccacatcatggtggcaggctttgtgatttcaaaagcccatttcaggtccagtctgtctcttctacttcctggtcaagatgtaagcactcccgtactgcgccagcattctgcctgcctgcctgcctgccgcctgccaccatgcttccagccacgataatcatggactaacccgcggaaactgttaaatgttttcttctatgttaaatattaaaggccctcagttaaatgctttcttctgtaagctgctttgatcatggtgtcttcacagtaatgggacagtcactaaacagatagctttatcattgcgtcctggatctgaaacatgagtttttgtctgaatgaaacaaagcatttgttgctggaatccgtaggtattttgcagagatgaccgagtgggcgggcagtaagatgatgacatcacctatttcaatcactctcttgactgttaggtcaatgtcaagggctgagtgagggtgcttttctcttggtttcatggtcaggtcttggttgaggcattagagaaaatgtcaattattagacaaagttttatgagagatttgcaagctgggaagcattcatttttcacggacttacctgtctacctcactaatgatatattttagtactaaaaatttatattgaggtagtaatgaaaacattttaaaaatcacatttcataagtaaaggctataacagaaatttcttgtatgacttctttttagcaggttctgctgtcatttaagtgtgaaaaaatatgcttttgagattctctgggccacttcccaatttattaaattatttacttcttcaatttaagatttaccacaagttggacacacctttaatcccaaaaagccagaggcaggtggatctctctgaattccaggtcagagtggcctttacagagtgttccaggccacctggcctacatagtgagaccctgactcaaaaaaataaattgaatactcgggacttactttttaatcttcaaatcttgctgaattttaaaacattctttttttaggtaaatacattaatgatttcaatttctcttaatctcttataaaaggagccattgggtgagtcactcaagcccttttttgagcctgttaaacagcagtcatgtagtacattttcttacctcctcttgctggccttgttgctttgtatatttccaaatgtttataatatgctttctgatcttcagtggtcttatgtggagtatttccaaaaacaatagagggcagagaaaagtatgccctacttttgacatgctatagatgagattttatttagtcagctgtgcttttacatccaaggcaacttatgtgatgacaaagtgcgtctcattcttcctggttataagaacctcccagtgcagtctgattacctggaagtcaattacttctgtccttatcctagcaggagtccttaattaggagcccatgaattcttaagatgaaattggttccactatagttctatttatcagtatgaaaatatttcagaactagggagatgtctcagtgggtgaagtggtgctacacaggcatagagacctgaatttgattcctgtacccatgttggaaaaagtaaagctgggtgtggtatcatttgcctataatcccagtactgggaagatggagacaggaaggtcccaaggtttgctggctggagagcctagctgagttggtgaacttctggctcattgatagaccctgtttcaaaaagtaaggtagaaaatgattgaggaaaaaaagatgatgttgatttttttgcttccacactcaagtgcacaatagaatgacatgcatacatacatacatacatacatacatacatacattcatacatacatacatactacatatgtatgtatgtatatacacacagacagagacacacacagaaggagccagagacaaagatatacacataggggagagagggagagaaagatagagagacagagacacacatagaagaggagagtgagggagagaaagacagacatgcacagagggaaagagaggtaggggagagtggaggagagagagaacttaagaactcttccataggtatttcagttgaaaagtccaggtcggacgcagatgcgcagaagaactcttacaccttggtaatatttgatgcacttactatgaaggacagcggttagtgtgctgtttgcttgtctgctgccagtgtgttccaagcactgttcccttacagacgctattatagctctcgttgtttagaggaagatgccgaatctcagaaaaacttatactttcattccaaaaagagccacagacagtgaaagcagaaggaagacattgtaggaaaggaagaaggctggtggcagggaaagcagagacagggtagggtagtggaggttaacctgaatgaggcacaaggatatatatgtcaaaaatatctcagtcaagcccattatttgcctgacaacgaaaaatgtaaaaattaataagaaaagaatatacagcagtaccagagactgactaactcaccaaagggcacgtgactaaccagtgacaaactgggaactcaattctgtctactgtctgtcaccagttcggcatctttataataccttatttcaagttggaaaagtcaaagttcctattgagacgtgttgaattctgagaaggtagccaacagacatttttgttctttatataaacatgaaataaaattaggacttcctggaaaacgacgctgcttttctttactttagcattgtctgagaaagctggcacctaattagtactgccctggaataaaccagtgttcttctaggccagtttctgctctcatcatgatgtagaataacggtgccattcaatgagagcatctgcatgtccttgtactgaaaaatacatatctattaccccgtcttatcaagtatttacaaatcttgccccttcattcactgtatatcactgcagtttcatgnnnnnnnnnnnnnnnnnnnntccctccctccctccctctttcttttctttctttcttttctttctttcttttctttctttcttttctttctttcttttctttctttcttttctttctttcttttctttctttcttttctttctttcttttctttctttctttcttttctttcttttccttccttccttccttccttcctccttccttccttccttccttccttccttccttccttccttccttccttcctaatcttcctttgcaatcccacccagttcaaacaaacatacatatatggccagaaacactcaggtagaaaggcctttgctgcctcctgagctggaaatactttcagtgcagttggtagcatgctgctatgacaactctaggaaactaaacagctaaagagtcttaggactgtccagtctttatgagcaactatgtggtcctgttttcccctttgggaagcactgtagttgggatctcatctaccctgaggtagggactgcactgagctagaaagaggctgcagcatttcttgcttcccagataattagcatgtatggacactgagtctgccctagtccccattgtattttcagtcattatttagttgcctggcaagatcaaccaagcttataaaagaaaccaacaggagataaaagataaaaattatttatggtctccttctagaatcctgcaattctgtttagtaattgctgacttcatatattgggagatagaggtgggatcaatcatttttatccattttggtgttgaaatttttgtaggaatgatgtgggcagcacaaagcatctcatactaaaagggaagaatccatcttttctcaacaagcccccagctaccgtatgcttgtagggcaacccctccttgatagtcagaccatggcttgtcttctcaggtcttcttttcatactcaacctgtcagaaacatctgtgttttatcttagaaaatttccattatgacatgagtttcagtaaaattatggaagagtctgcctctttaaaaaaaaactactgaaggaaaaactatcaaaaataaggaaggaacacttgctgcattggaggctttatggcttgctctcaaagtagccataattcattgccccagacatcagaaatgggtatatcaaaaatagcctgagggaacagtctattggataaaaccaaaagggaggccacccaaggcttccactgccaacatcctggttgctttaccaccccctgcactcccaaccatctctgaatattctgctgaagacaaacaacatcaggcaaaatgccaaggagtttatagaagagacggattgttgctgatctctgaaggctgcagcatcctacctaagtagttcgctaagtaactcatccatcagattcatcaagcttcataccgagacactgaaaactgaaggaacttctgtgagcagcaaggtacagaatgttcaacttaggacacttggttgatcaggtatctcagatggtaccacctgccaggctgtgaactcctcaggttccagtcaaggagccactctaggaaccagaatcaggggtcagtgtcaaggggctaattgggaaatagattatacagaaataaaaccagaaacatatgaatataaaaaatatctcagtgaattctagagttaatggtctgtggctcaatgccaaagacatgtattctagcttttaattcagatttgtgtgtgtgtgtgtgtgtgtgtgtgtgtgtgtgtgtgtgagagagagagagagagagacagacagacagacagacagacagacagagacagagagacagagacagagatatgcccttactgaagttatgagttacaccaattttggtttcagtgagggatttgggtggatcaggaataggaggaagtcatcactgttcatttggtggtggtggggggcgctctctctagacaggaggatatctacttccctcttgaggttctgtgtggttaacatttgtagtgtttatcctgatcacacagtttggagaactcaggctgatatcagaagtctctggaatgctctgcaggtctgctccaggacaaatggggaaatgaatgttccctggtacaagagcttgttgtgtttccaaacgtaaccagcctgagttctttgtgagctaatgccgactccctccacagtggctgtccttcccgaccatttgacaaacgcttaaaaggacaatcttcagtactttactttctagcttattaatatttgtgccctttaccttgcaatctactcttagaaactggaaaataatttcttttactccccccatttttcatttaagctgaaattgatttctttcttagcttgaggtgggcgagggtgggggtgggtagaattaagctgtagttagtacaattgcttttgctgaattaaaagaaaaaaacgagtttatcttcaagctttggtacatcagagtagatggctgctcagtccctcccaagagatttgtgacatgagatatacagaatatcccagtgtccccatagaataattgcaaccaactcaagaagtaatagaattgtttatttggggttgggggtggttttcagtctgcttagaaaattgggaagctaggagacactcataaattcatcagcttctccagaactcttctcaaatgcttatcgtcatgacaaccatctcttcataaaccaaggctctgcttgggatacagatggggttggtggcacggcacttttgccatctgctttgtttctcagagggacattttttctttttttgatccccaagtctgattctcagatctaaaagtcttgactcaccttcctctggggagggaggcacagatataataatgctcatgcatttctccagctgaactatttctttccttgtcctttgtcatggaacttagagtacagggatttgaaaatgataattgtgtgtgtgtgtgtgtgtctgttttggtatctctgtctctagttctgtctctctgtcactgtctctgtctgtgtgtgtgtgtgtctgtcggtgtctctctgtgtctttttctgtctgtctgtgtctctgtctttctctgtctctctatctcatctctgtttctgtttctctctcctcataggtgtgtgagaaaacagtcatgcatattggaatgacttattcctgtatgtactttgaaaaatgtgatatgaagcactttgcaatggtatagtacagtcagagtgaggcggatttaaagtaggagtgtggcagtcatctttgtaagaggaagatgaactctgggatgctgttgttgcctctcccaatggtggggctgcatgtggtgtgcaatgatgtctgagggacactttagttgacagaaaggagtacagttaggaaaggaattgtttctctggtggaatttggagagacttagccatatgaataaatatgtacataaagaatgtagctcaagatgtctctctacccttttccaaggatacaaggacattatatatcactctgttatagattctggggtagaaatttttatagggtgactcctagtatgcctcaaacttagttttgctggcagcaaaatgaaaatcttttcagcctttgaagacaaaagatgtacactaaccatgaaatttatgtggttaaactgaagtgataacagttacagggatgccatatgaaacccctatttaaaacacaactaatttaccacactgtattataattatttaacatatgccacagttcataattggaagcattaaaacattggaggttgtttatattatagatccattttttccactccaaccagagaatttctataattgatattctagactagaggtaatttatttccatatgctgttttatgacccgttgatatataaacatagaaaaatattggcagagtgaataaaataatatcacaatatgttacacacacacacagagaaagacagaaacagaaagaccaagacagagagagacagtgacacagaacgaaagacagacagagagggagagagagaggagagagagagaaacacagaaacagaaagaaaaagagacagaaaaatacagaaacagagagagacagagacaaaagcagatacacacagagagaaagagacagtgagagatgcagaaagacaaaaacagagacacatatatagagagacagaggaagaagcaggaaaggagaggatgattaaacagcaagcataggatgatgtccaaatcagtagaagttgttggaaaacttttgaagtattatccaaatgcactttagaggttaaatctaataatttctcaaaggaacattagaaggggtgtggcaaagtgtgttgccagaatagaaccccatgcccagcagcagcagcaaaaaaaaaaaaaaaaaaaaagaacctattttcacttcggttatatagccatgatattatgcctaagaccttgtcattggaatacctaccactggaatttaatatatatcttatatatgcattcgcatgcaaggtccagaaagggcatctagacatctgttgaattttctttctttttaaaatgaaattagggataagtggaattgccataaacagcaccatatctattcatcttaaatattccataaacccatcatctctaagatcatgtgtgcacaaatgacttgcagagcaaatgatacagttttctgccttgttctgaaggcactggtaatgatgtcacaaaagtcttcattatatgatataaaagaatacatgatatcattttcagaccacataatcaatgtttataagtttaggaactgaggagatggcttatcagctgagcaagcatgaaaatctgagttcagtaaaaaggtggacttgctgatgtgcacagttatcattgttactatcatcatcatcattattaagtgtgtatatgcatgcacataatgaatatatctgggtgccgacagtgcacatatgtcaatcagaggacaactttttagcatagttcagcagggaaaggcacttgtcaaacaaaccatgtgacctgcatttgggttcctagaacccacctgaagttagcacgagaaaactgacctgaattattgtttttatgcaagcgagttagctgttagttatgctaaatgtgatgtagtccttgttagtaagtaccaatgccagggccttatgcaggctgggcgaaccctctcccactgagcttcatcccgagcccagtgctatggcttgagaatatccactttaggaccatcatctccttctctggcactggttggtggcttggcatttatctgcagagcatcacttgctctctataggtaagaagtccctagagaaagtctttctgtccaaggcaagtgaagagtaccaaacagtgtagaagagtgctaggctccatagaaaccatctcctgcttacctcacgagtgctaaagacaactgcattctggagacatcaaacataatgaaatgctttgtgtttaataaaacccaaaatatgctctcttttctcatttttccacatgtatattttaggcaaaatataatccatatgcctttgttccctttgctttaaaatcttgagaaatgttgttttgtaagagctgtttgatgttcaggaagtcttttatccttattagtttttttccatgtatgaataaataaaaataaaaagaaacagaaagcacacttttgagatcatgaagtagagccactgtaaatgctcaattgaattagaagttttatacctaatgtatttttaaacatttctcttagtgcttgcagcctgtcaggacagggtaggggagaaagtagtggctctggtgtcctgggacatataataactccttttctaataatcccaactggtaggtcagtccctctgccatctgcagatgggaagggctttcagcatcttaaccttgagtcaatctacattttgcggatgggaaatgctttcagatctcaagagtaagcagaatagctagcgggtctacttgacttttcggttgatagtcatttcattattcctgtccttctcatcctgctgggggtgggtgagttgtacctgggggtgttgcatccagatactcaaaaagtcccatgttgggaagagacttgcaaaaagcttagtcattatgtcctaggacgaaggctagcatcaccacaagaaagaaagcatttggagagaagtcagttcatagagcagcggtgaggcagggaaccgcttgccagtaatggtattgtgagtcacaacatttataaacaagcacctatttattttgttgcatttttggggggctgtgtgctccaattattttatttttaatggtggcagggatttgataaaaagttctacatgacagtaacttagatgataaaatgactttcttcttgtttatttattttcatgacctatttcatattttcagttatgtacatatgtatctgtctgtgggtggggatgtagatatgaatgcactgcccacagaatcccaggtaggacgttggatcccctgaagctgcagtttacggagtgctgctcagtgtggatgctgggaactgagctcttgtcctctgccagagcagcaagtgttgctagccattgagctatttcttcagtccccaaactcgtttcttaaagattaaattttcaataaattatactattgcttaggaaatataaaatgttacagaacggaattcacagctccaataggctaccatggcattatgtataagaggacattcgaggataattttgaagtgaaagaaggttgtattcaactataccatgggggtccatggactatggtatggcagtaactccctgttttctagattaaacttataaaatgtagactgtgaagactccatttgatcttaggtttctctgacaggctctgttgtataccttctcctagaaagtccagtgtaggagaatgcatccaacctacagctgctactgtgcttttcatgatttctattcatttcttcttccctgaaaaagtcttgcaaggcagaggaaatgcatcaggcagtttcatagctgacatttcagagaacatcatggctgcatcactgagaacatgattaatccatttgaaggtcagtcaggaagctagtagatttgctgagggatccaatcacctgccttctggttttgtagacagctcctctccatagaaaagctcctcttctgctcatgctgggtttgtactgcatctctgcagattgtatcccatggatgctcatgagtttgtctcctcattgtgacagggtacttgacaggaactagtcacagacaaagagaattatctaagtgaacagttgaggggacattagtacattctggcagagaaggtatgggtgtggtggctggagaggctaaaacagcttagcatgaggcattggtacttcgatgcacacttgtcctatctttgttggccaggaagcaaagaactagagatggaagcagaaagacatcacattcaaagtaaactccaacaacctggttttgctaggaagggtccatggctcagtgttccacagtgtcacaaaacagtactgtcatctggggatgaggtgtttaaatgcacagtactgtgggggatattttacatccaaatgatgaaggttttaaaaagatttatttttatttatgtgtatgtttacatgtctgcatctttctgtgggtgtgtgcacatgtgttcacattgcatgtggaagcctgaggaggtcagaagatggtgctagatctgctggagttgcagttgcatgtagttgtaagatgcttaatatatgtgtgttgaatattaaattctggtcctctgcaagagtagtgagtgtttttaactcctgaatcacctctccattctctcaaatgattacatttgagattggattatcctggttgatcagccattcagggcagggcatgagggctgtagattgatccccttccaatgggagctgtctgctttctgttctaccgtgatgtgaggagagacccagctacatacctctgccaccacacaccctgccatgtcttcttcatcatgatagattacaacttcaagaaagcataagacaacataaaccttatcttcctcgtgttgcttctgtccagtgtggcccttgcaatgagaaaagtaaatggtgcccatgtcacaaagggtttcatgttttttttttcaatctccatagtttctatcctatgaaattaagaaattcagtcccttagttttcctcatgtctctcatgaaaaagccacttcaattcatcatttttccaagacagtgtagagctgccttgaagatatgcactttagtcattacctggggttctttgtacattatgacatcatttctaagaacctgcccatagccagcaagagaaggcaaggcctgaagggtttcattttatgccaaggcaaattgagcaacttctggagcgatgtgttgcagcccacagtagagcagaaggcttcagatcttctgaggctcaaggaaggggcttggaaatgtaaatattttaatgtaagagtgtgtgcatgtgcgtgtgtgtgtgtgtgtgtgcgtgtgcgtgtgcgtgtgcgtgtgtgtgtgtgtgtgtgtgttttcaggtatgtgtgcatatgtgcctatggagtctggtggacaaccttggatgccaccctcaggaacaccgtctcccttctttgagatagtatcttattggcttggagcttatcaattaagcagacgaggtggccaaggagacccaggggcccttctgtcttggtctcctcagtgctaggcttacaagaaaatgcaaccacacctggcatatttatataggatctagagattgaactctgttccttatgcttgccaggaaagcccttaccgactgagtcaaccttccatccctctttactcttcttttgcagtcaaaggtaagggagtaagggaaaagtaccctggaggcaaacagtcactgttgaggacagaatcagggatgtctttacttggtgtgctagtcaggtctctggcagtgtgacaaaagacctaagaaaattaaaatgaagaaggatttatcttggctcatagtttcagggtttccatgcttggctggctctgtcatgggtctgaggtgagacaaaatatcaggatattgggagattggagtgggggaatgtcttcactgtataggcctctctgtccatgaccaatagtccattagcttatagaccaacagcatccaatctattcatgtagtcagagttcattattcaattacttccccaaagaccatttctgtcaactaaacttttgacatgtggcctttaaaggacattttaggttcaaactatagttactggtctgggaaaataatctgacttttatatagtatattcctagggcagagacttccatcaagccattagctacagcatagcttgttcagggtggggatagatgtcttgggatatctctgtttgttttcagtgtatcacatctttgatgattttattaccaggcctgtgaatatcaacccatgctccctgagcttgggaaaaggccaatattatctttacttttgcttttatttcataaaataaaaattctgagtgttgttttggttgtatttcaaaaaactattcatactacttttatgtgactatgtgtatgtgtgcatatgatatgtatacatgtttgtgtgttcacatgtgaatgggcacattaacgtgcagttaagcatgaacacatgagtatgtgcatatgtaggccagaggttaacataggatgccttcttgatagctctacctgtctgtctttcttcctctacacacacacacacacacacacacacactcacacacacacacacacacacacacacacaccacatatatacacatatgtgtgtatgtatacatatatttatatatggtatactgggtctctcacatgaacttggagcttgccaattcagctaacctagctaccaatttaatttgctcaggagatccctgcccctgccttctatgtgctgaaattattggcagcctaccacatcatctgccatttctatgagtactggagatctgggctctagcatccatacttccatgacaagtgctttaatctctgagccatctctccagccccatattctagtgctgtggattctcaggaacagagaacaaatcaacgcctactgtgttacctatgtgaacctctgttttggataccttcactcctatcccataaagatgtgcaacttaacttcccattgatgatgctttgaagccttcagaagacagagatcgactttttaaatgcttcctagcagatctacttgatagaaaatctttgtgttcttaagggaaataaagcaaggaatcgaaacatgatgtctataaattatttgccacatatatttataattaatatgtaatagtaacatgtaacatattgcatataacatcatataacatataatgcataatatataagtaataaaatgtgtatgaataatatataaatatatatttataatatgtacaatcattagctatgagctaaaaatactcatggttatttgtcttgcatcagaaatgcatttagctcctggttggataaaataatattgagaccaatatgttggaatcaaaagccccatggaatagcctcccttgacagtcctcacactcactgagaaggttaattgacagtctgtctggcaagctcctcccaaccctgtctaaggagcttgcagataacactttgcaacaggtataataatgcttgtctgcaggcaatgtgcacagctggaaactataattaaacagaattaaagatgcctacatttcgcagaaaaacccagccatcctgctggcctctgaccgtaaagtaagtaacagacatattcataatcaccctatttaaatggtacatgtggttgtggggaacgtctgactcctgaagatcactgtgacggccaagactgagtagtaatcccatatgaggtcagagttaaagaatatgaccctgtttaatgtaaagtcaccaccaggaaccgggcatttggtcttccaaagtaattggctcattgcagttctgaacactatggggacatgttcagctcaaacctgtgggaatttttaaatacttcatcctaagtttgatgagggctgacaataacacacaaggacattttttttttgtatacacaccaaaaagtaaatatcccaagaagcaagaaacaagcaaaaacaaacaaacaaacaaacaaaaccccccaaaagaaaaacaaacagacaaaagcaccccaaaaaacaaaagaccaaaccaaaacaacaaaaacaaaacaaacaagcaaacaaacacacagaaaccttgcttttgaatagtaacatttctgggggtaaatttaacttactggtaagaatgcattagtgttataaaactttatccaaacaactagagattactgaggaattaaaacttcactgagggctgtcaactcgtgttctgctgcccaggttctgtttatgggattagggatcaagaaagagaagtaacaaggtcttgtttctcccaagcaaggctggccactctggacccagtgctctctagacatctgtacttgccagggatccctgctccctttccttcaggcagcctcaagccagatcttgcagcctaatcgctaagacttttcttaagagcagatccattctgcctccttttgataactttcaacaccaatgaaatctgctcttgccaaaacacacgtactctgctgcgctgtcatggactctggaatatctcagtgaggtagtggaaagtataataaattaggactttttaaaaataagattgaataaaaaatcatattttgggtccctaatagatacacaatctaccaggatttagacacactgtgtaattaacttgattatctagtacaaaaagaactggtgaaaaatatggaaaaatactttacagtaggaaatgcaaatgaaaccatgtcagtgtgatgcttctgctcctctcctgcatctttaaaatgaaaatggcggggccagcaaggtagctcagagtgtccaggtgctcacagctaagctaatccacccgagttggatccccagagcccacatcatagaaaaagaactgacaacttgtcctttgacctccatacatgggctgtgggacagtcatgtgtatatcagtgtgtgtttgtatgtgtgtaaacaactatacactagaaaaggcacactgagtgctaccaaagactgccgctgaggcttgagatactgcctgtgggtgtataatgggacaggcccctcttgaaaacctttgccagttgcttacaaccatggttatccaagggtaggaaaagcagccattcatccaaacacttgttcaaaaatttgtgtgtgacagatttagtagttatagccaaaaggtggaggcactccgaaagcccagtgtaagtacaactgtatatatttgtggggtatacctatgtgatggagtaggtttctataaacacataagaatagccatttatgtatacaactgcatggcacagatgagtcttaattatgaagtcagaaatggggtgtagaattggctttgtttgtaaatacaggaatggcaacgagaggaaggcagtatgtgactgttcaagtggaagtgatgatgtttgagagtgaagagacagtgaaggaggggacatggccctacgttgtgtgtgtgcctaaagtctctgtgggaattgtcaccagtaagtccggtttctctgaagtgtggaacttcagggactgtatatgaggaaacaagaggattgtttagtgctgaggtttggacaactcccaacatgcccaaggaaggagtcattaggtaaattgtaaacttaaagcccatttcttcattcaaatgtcttggttagggtttctattgctgtgaacacgacaaccatcactgagggaagtcagggcagaagctcaaaccggacaggaacctggaggcaggacctgaagtataggccaggaatgagtgctgcttactggcttgcttctcatgacttgctaaacttgctttctcagagtacccaggaccaccagctcagggatgggatcacccacagtgagccgggtccccacacagcaatcatcatgcaagaaaatggccctcagggttgccaacaggctaattggttggggacattttatcaattaagagcctcctcttcccagatatgtctaggattttgtcaagttgacaaaaaaatcagctaggttaataagaatggattctaagagaggacaataggacacaaagaagtgttgggagcgggtgtggcggcagtcccaaaggcgtcagggactgcagctaagtcatatgacttgcacctgacttcctcatataagacacaaacatcttgagtgctgcgcaggtgtaccaggatacaggtgaatccaatttggtggagatttgcccctgctgccctgattagctgaagctgcgtgcctggtgaagtggcgtggcctgctgtgtgtggatgggaactgagagtataaaagagtgcgaggcccagggttcaggggagatataaaaacaagggggagatataaacaagggagagatataaaaacaagggagatatataaacaagggagatatatggagaaagaagaaacaggactgaataaatgtgtgcagaaggatcctgtagcagcgtcgttcttcctggccagttgggctcgcgaaagagttggtgccgaaacccgggacaagaaacatcttcaggcatgagtgaagaccccctgctacaggaaggattcagaactgcatcactgggaaggagcggttaataaagtgttcccataaaacagactgttgagaaggattcaactgcgtggattcagaactattcagctggggaacggtattgatgaagagaaagaagaaagatgaagactgaataaactgctgttagaaggactggtggtcgcatcgttcttgctggtcgagagcaggcgcgacaattggtggcccgtacggggaaccgactcccccaccgagttcagaactttcagcagtcagtggatgctggcagggtaagttcacggtgagtgaaatttgcgaccccaggagtttgggaaggacctcggataaagtagaggtgagcataaagttgccaggaagtaggcacaaagtaacccaggagtttgggaaggacctcggataaaatagaggcaagtataaagttgccaggaagcaggcacaaggtaacgaaaagttcctggttttgggacaagttaaggttcccggtttggggacaagttaaggaactatgataacctcagtgtagtgatcaatagatcctcgctgtgtagttatgcttttttctcccattgaccctttgtgggtaggtctgatagttttggtcttgtttgttctgatatatggactctgttactgtttgaaactgtgtgtagaggcagtcaagacaggtcagaaaatccttatagagcaacaagaaagtatgtcggaagagaagggcttaaaaagaaaaaggaaaaagaaaggagacacagtgttatcaggtggacagaaaggacaaaataaaagagctgaggcggaggaggaaggcgaattagcttctgcgtcctctccctatgcctcctcagcagccacctgtaggtggaccttctgtctggagatttggagaggatcgaccagatcaggtgttgatgtgggagagagggtctgtttgtgtgtttccacaggaccagatggaacctctttgggtgctggagagattggtgagacgctacaagaatgaggctcctgatccagttgcccctgtggatgtggtggatgatcccacaagcacaaaggatggagccgagatgagagatcctttcggtgttccagaagccgataccagctcgacatgacattcaaatttttccatgcctttttgatccctgaattccccttaaagagatagccccgctggccatctatcccttgcttcagggaagatgagcggggatgagagccctgggatgtatgcttgttatagtgtgtgtgttttgtgtttggcacatgtgttaggtgcagagtgtgtggcccgcactttcgccatggtagcgtaggcttttgctgcagtggaggcgggacaatctcctcagattcggtttgccactctaaaagaaactatgctgcgttatgccgtggggtgcgaggctaagcactgcacagaggatagcctgctgttggcatcctgtggaaggcacgtctgattgcatgaaggttcagtgtcctagttcccttcccccaggaaaaacgacacgggagctggccaagacctctctgggtgatgagcctaagggatggttttgtgtagggcccctatgcttgcacactggggatcagacctctaccttcacccatgaggcttgcttgcagcaattaagatctggccataggttaattaatatcctggccttttgatgcacctgccgcaagcaaaacacaacctccccaggtgtggcttggcatgatagagaggtagtcagtgataagactccctgggcatgtcaccaacctaagacagggatcaaaccaatgctgtttgtcacccaaggacgggtaaggggcatggctgcggggggctatctacagacattctctctgccagaaaagaaaaaagggggagatgttgggagcgggtgtggcggcagtcccaaaggcgtcagggactgcagctaagtcatatgacttgcacctgacttcctcatataagacacaaacatcttgagtgctgcgcaggtgtaccaggatacaggtgaatccaatttggtggagatttgcccctgctgccctgattagctgaagctgcgtgcctggtgaagtggcgtggcctgctgtgtgtggatgggaactgagagtataaaagagtgagaggcccagggttcaggggagatataaaaacaagggggagatataaacaagggagagatataaaaacaagggagatatataaacaagggagatataaacaagggagatatatggagaaagaagaaacaggactgaataaatgtgtgcagaaggatcctgtagcagcatcgttcttcctggccagttgggctcgcgcaagaaagaagacagcattaaacaacaacaacaacaacaacaccaacaccaacaccaccaccaacaacaaagcccaaaaggattccacagctattctcctgcatcagtgagaacaaacagttgaagataaggctgggaaaggaagactgtggaggaatgcctccttgcaaagagcaggtcactgattggcaagtggcaaacttggagaacattgcttacttaataattctctcatgttggcatctctgtggttgggagtacttagcattgcctccaacgcacagtgaggcgtttaataactcgctcctcctttacgttacattcttcttgcttgctttccaaattcaccccattgtcctcctcctgttcctcttcctcttcctcttcctcctcctcctcctcctcctccttctcctcctcatgatgtttagacatctactgtcattagcagttacagaaagctttagtgtcctaatcacccatgggaacacaagggcacacaccagtgtgaagctccagggagggcacacaccagtgtgaagctccagggagtgactggcattacttgtagccgtctggcctgtcctctggtgattcatttgctatctcgtcagtctttgtcttacattttgtgtaagacgattatggctcagtactaaagtgaagaaatgactaaggactttggtcctacctgtgtcctagtttctgcttagttcaataatttgagtttatagcacttaagtgttttcaatgaaataaaactgaaaaataatagctatgtaaagttattagatatgcctgagtagaatttatttactaagtgcaaattttatagacagttaagtgggttgtctgagtcactctatatttgcagatctgacaataaggcattaaaaaacaactttacagacaagtggagattcactgacagattaaaaaataaaacacttgcttttcctatagtgtttctatttaacccatcttcctcttccccatgatgcttaggcatctactgtattgccatttatagttttaaaaaagctttaatgtcctattcagccatttctttgttgtatttacaacagcgcactaattcaaatcccaagccatgttcacattgccagtgatgattacattcttttggaactaaatgaggctttccttgtttttcaggctttggggacttgaatctccatgatcaggtccaccttctcgagtgtgcctggctggagattctgatgattggtctcgtctggcgctccatggaacacccggggaagctcctgtttgctcctaacttgctcctggacaggtgagtgacctggctgtggcccagagaagcatccttttaaccactagttcatatccaaaggtcatctatctgatagtccatggactgtcaaagagttgtatagatacatttactttatgagtgcataagtccagggaatgcactgtagacatgtccatagaaagctaaggcaagctgtctgcttgccatcaccttgacataaccctagtgtctcaacacatacacataactacaaactggaagtttccaactctacctttatcttctgatatgtgtgtatatagacatatacatctcttagtgcctttacaatcagtcacggtggcctatcaagctccttctctaactcttctgtcattgcaacggtgaaatttggcctgaagagttctgaactgccatttgcagttctgggaattaacttcagttttcagccatcttgtttaacgcattacgctgggttgtcttggactgtggttcctgatgctttcttttgtcaataatttcttagagtaatgggatttagataggatttacagcagccgcccaccaatggagaacctgctcagcaccaggtgctatgctgagttgttttctagttgcctcctgtaaacatcacctcatgcccaaagatgcaggaacctactcagctccacgttttaccagcaaaggagctgaatctcttcacctgtcgaggcccctggaacaagagttagagcaagattgaaatgagagagaacgatggaagctgccactttctgcttcaatatagtaattaacttttagaaactgtgatggtgcttccctagaaacagactttgctgcctgtagaacgtcatctccaaacatgaggataggccactggtctttttccttggaactacatctatatgtaatacatctatccatcgattctgtaggactgtggacagggctttgtaacagtagacccacggctcactttggcctttctctagcctcctgttccctcttagttcctaagttttttcatttttcttgactttttttttaacctctagaatggcatgtgctctcagtgtttaagcctttatgtgtgtataactgaactgatctgctctgtgaatacctttctcatccttgtctctcttcttgggttcctatgcacttaagaatagtcataaaagattgcattttgaatatgaaagactctcattttacctcacttatgaaattcatggtgcccatgaagggatgtcttctaggcattccccaatctcacacttttgcttccttgtatttttgctgtggttcatttctccatcatatcttaagaaagtttatccatttctgccaaaaagtaaaaaaaataaaaaagaaagaaagaaagaaagaaagagggagggagagaaagaaagtaagtaagaaaggaagaaagaaaagaaaaaaaaagaaaaatccagtgttggagtttcatagtttcatatcaatcctagatgaatatttctcatcctctgcatggttactatccagggacattctttattggagttggagcctgttttatggtcttgtaagttttggtagcactccaggaagctacctcctagaccctggtagcatcccacccaaagtatgacagaatgtcgtgtgctcaatcacgtttagatatttcctgcccatgacatggagtggccgaaggacaaacggtggaaaactcaacttctctagatagtcctatgtcactgtcccagatgcattggagattcctgcccaatattggaggcatcctctttcttatcaattctgattcttggttttttgtttctgtcttagtgacattacagaatgtatccacctcttcaatgaacagattgtctagtgacctgtcaagtgttcctctgaatggtttatgagttcataccttccagttgtctccagaccacgacacttatacgcttatcttccatttgtgtagttacctgtcctgatttcttgtttaaactcctctttccttcagtcttcatgcacagtgtcaccagagatgatggcccaaagtaccactgtagtcttgatccctcccgaggaagtctcagttgactctcaagttcccttgaaagtaccacataggcttcttgtgtgtgtccgtcagggctgtctttaataataagcttgttgagcacggattttacagacacagtcagatgatataaatgaagaaggccagtgaatgagagagcaagatggggatgttaggacttagatgaccttgtccaggctcaagataactggcagttgaagttgacctacgacttgggaaaaaatgtcaaattcaagttttaaaaacattagctttggtgccttgattcatttgtgtcattgagtctcaccatgtcacatgagctgttactgaactcatgatccccctgcccacctctgcctcccaagggtttgaacttcaccagtttcttccactgttctgaaaagcctctcttgttagaaactcacccaccctgtaaggctcatccaagatatctattttccacacatctctccttcaggtttttcttctctttagtcagaaagtttaggcaggctttcttttgcctgggttctctgtgatcagtttctccttccactagagcctcgtcctgccagatgacggtgtgtcgtttgatctaccggctcataaacttctcgtgttctaacaaatctcatccacgtttgtgttacctccaacatacaaagtcttctgtggtacctaacaagtcctcagtgaaaagagactccaggttgatggatatttcagccatcactgtcattgaactcacttgtggtttatttctgctcactaactcctggctcattactttatagtctttgcagaatttagtatccatctgttttataagagttttttttattattaattcatggctacatttagcttgtgattatgttccacaaacctcttaagcaacttctaaattccaaaggggataaacaatgaatctcatttttcccagaaccgacccattatttaagaccttagtacaatcgcaaatacttagaaatgtgggcctggtagtacatctcctgtaattgttgcaccatagaggtgagacaggagactgttcagtttgaggccagcctgtgctaaacagtgtgttactgtctcaaaacaaaacaaaaaaaaaccccaaaatatccttccttaggtatgcttatacctaatgataaactcattttctattctacatagatgttagtaatagttaaaatacttagacaaagatatttatttaaatattttaaaaagatagcatttgatccagaacataaagatcctatattcttctaaccattggcagatcgttcaatcttattcaacttcagcattgtttaattaccttcctagtgattgctgatggcaattatggatgagtctgatagatatatcataataaacactattgtgagcagaagccccttagaatctgtatacccttgaaagatgctctgaggttcagcctataaatatcacagctctacaggcttccaacccctatgaggttaggttcagttaccttgtctttcccatcaaaataataaacattctaataacaaaatatagaaacttataagtttcaaagctcaggagttggttgagagctgacaggtagggaccaagtattatcatcttccctgtggttatgtctttggctttgggatgctacctctgaaaggtgagtcacacccaaaaggacattttctgtttcatagaagtgaaagagacagtcccaaatcatatgtatccctttcacccaggggttgccatggttgctgacaaaagatgtagagttatctactaatgattgcgtacatcttttgttttctcgagtttcccctgttaacacaagcatttgtgtcttataaggccatcagaggagagaatccttgagtcactgaagtgtttatactggcaactaggagttggtggttttgaaactaaaacgcagtgtgctgccatcccacattcatgatcagagggcgtgattcctagccagtgtccatataaaagagagttattgcctgatttactccctgatgacaacttatgatatcttgattctgctgggttatagctttcctggtagccaattttatccttgccaggctccatctgcccgccatgtctggtcctaccctggatcccacagcaatagggtccacataatttgtgccatcaagctttcttggaaaaaccaaaacaaaagaaaaggttattaagaggtatattaaaaacaaaagcaaaaaatagtaagtgtgtgtgtgtgtgtgtgtgtgtgtgtgtgtattttataaaatgaaagctaaagataataagaatgcctgtgaaagtaatcaggaaatggagagagctcattttctcacacctaatccattggtgtgctttggcactagaaaacacaaactatgccttctgtgtctcctaggaatgagcctcttcctttaatcccacatgcatgctcatagaaaaacaggctgaacacagtagcacatgtgttctcggtgcgttgctccttgtggggtctcttggctcttgcaggagtgaagtcgatgtctctggaaggcagattcaatgtgagaggacacaatgctaattgcctgttccgaagactgtccagtttccaaggggctgttttgctggagctctccgtgctcacaaattctgagaaatatttgtggatttctcaggaagccaacgcttctcttttgattcccattcactcttagaggggagaaaaaatgattcatacatctgaaaagcagggactaattcgacaagcagaattctaccaagcctctggccagagagctgttgatctaactctttccatcactcccacatcgggaggctctgcctgcaggaaacagtactgaacaacaaaaagttcttttgcttgcaggcatgaaatgggaataagttctcttcccttaagagaaaaacaggttgctcaccagatagaacactctgccttttctaagaaagagcagactgttttctgataataaattcatttcaattgaaaaaaaaaacccacctcatttactagaaacaaaagcattctcattttagatttaattttttttataaaattacaaatgaaaaaatgtgcaaaaatccctgtgcaatgcttccagcaattatgttggcctctctccccctttcccatgtagaacttcattaaattctttgtagaattttctactggaaatcattaatgatatattgttctgcacgaagttaatgaattcaaaatgggattttccacatgtgtttttagggcacgaggacatgggccttcctttctgttgtctgctcagaagtatgctcccaagtagtgtgtactataggagctgggactctcaccagacacaggggagcaggagaacaggttatgggggagaggagaatatagagaatgaggcacctctcagcaaagctggtcttgagtaggagatggctccaattactgcagtagctttgccctgggctctgcctcactctcggaaagaattgacaaaggccctgtaacctccactttgcctggcttgccctcacttgtccccaagttgctcattgcataacatgtaaatgtattaactggccagaaatcattagcatgattactaatgattgctaagttaacttagcaataaatttagaaaatcaattctgctcaccaaccttttttttttccgttttttggaactggatggcaaagcaaagagaaaaaaagctcacatgtattcaccttctttaatgtgaaaggtccagcccttgcttatctttgatgctgtattgtgttgagttcatgagactataggtacgaacatatttgctagtttatactttaacctgnnnnnnnnnnnnnnnnnnnnnnnnnnnnnnnnnnnnnnnnnnnnnnnnntttgttttatgtctgtacaaaccacagagctatcaactgtaaaactgccaccaaaagaagggagaagttagccttgaagatggttccatcaataaaagacttccttcataaacatgaggacttgagtacaatccctagcacccacataaaaactgggtatggcagagttggcctctaatcctgaagagatggagataagagaatcccccagaatcactgcttagccaacctagctaagccagagagctctagattaaggcgcagactttgtctcaaaaatataaggtagagaacaattgaggaagatactcaacattgacctttgacagcccctccatgcatcttcattcaacatactcacacaaacacactcacaatactcccaacatctaaatttagaatcattaaagagacaaatctctgaacatgcctgtaaggtgaatttagggaggaagactaaccctaaatgtggtgggcaccattctctaaggtggggttctggactggataaaaaagacaaagccaactgagcaccagcactcatattttgctggttcctgtcatcaatattgttacctctgacagaagagtaatcaagttatctcctggactcaaaacaactgaaccatatacttttggttggtcctacacatgaactttttggtaggttctacatattaataaagatttgaaacatatacataacagtatttcaagaaaattctatttgatcatccagaccaaatcatgaaagtacaagcaaaactctactggaaatagtgaaaaaacaaaaaattcaaactgagatttcctcttaaaaacaaaagcaatcaagcaactctgtgttctagaagtgttaagccactggtgtttaagtccttaagggaattaagtctgtaagcaataagaatccactcaatatatgtaattgttcctgggaaatggcagaatcccaaacaaagccttaatcctgtgtaggaagttaacttggctttccttgaatttttatatgctgctttgtttttagttgctgtgtattttgaacaattaaacatctgctaaattgaaatcatattttcactgtctaattttaaaataacgctaacattgtttaaatcataactacctacacaaggatgattaagtcattttgccaccatacgattttattacagtgatttttttcatgttaatgtagtaaagaacacttctttcctcctgcacagtagcaacaggggttgatccaggacataagacatgctaggcacattctctgccactaagccatcatcccctagtcagatcatttcatttcatgagtgctgccaaagcacaactataagagacattggctactttggagtctataatgtttagaactcaatttacttctgttcaataggtattcattgaatatagaagcatagtgtgatggtcacttttgactttagacttgataggtaggttcttgactacctaaagagacatatcactggacatctctgtgatggataatctagagtagggaagttgagacatataccctaagtgggaatgacaccattccccaggatggggccatggatttgtgacctttggctttccacccatgccccgagctccccgaaataatgactctgagacttcttatctatgattaaatgcctaggccgatagcttgggcctttttcctgactagctcataatttaataacctgtatattttctgaatgtcagatggttggctacctggtcctccatttcaggtgactgtcctcttttgtgtctgggacgaatctttcctgagcctctgatcttatcccatattcattctctctctctttctctctctctctctctctctctctctctctctctctctctctctctctctgtctctctctctctttgccaaatgtcccaccttctaatcctgcctcagctcattggccataggcttctttgttgacaggaaaatacttccacatagtgcacaacagattatctttacagggctagattaaaaagtgaaagccatcagaatatgagcacccatgcctgctgcttcctgaatttggatgcaatagagcccactgcctcaggttcctactaccatgacttcccgaaactgtgagcccaaattaatccttctttctctaagtttgcttttgtttggcattttgttgcagcaaacacacaaacaactagtagatataaccacgggagtttgcatgatactggaagatacagaaaaggagagagcattagagacagacatttactatctagtgattctagtgtgcaaatgatttgctcaaaataattgatcctcaaatctgagtgtccatcttcctagctcatcttcctttatcacttcctgatgaccatggagtctgagtgacactggagccaagatacactggttccttcttgatatttccatgtatttagcatgactatgcccattatacatgcgttattcctaaaagtataccttaatacacacacatatgcacacatacacaaacccaactctaaagtcatgagagttctatgctcatccttttgaggctgataggaagaaagaaaggatgttatcaagtttgctaaggtaagagagtataagtcacacaatttcgaagtgtcacacagagcagagtgttagtagtatctcactgcttcattgtggtgccagtgactcaagcggtgaggaccaagtgtttcaggtgacacttttagagagttgcattgagtcagtcactattctactatgttgtcttcattttctcaaatagaaaagagatattaaaaccaaactctcaatgtcttctttgattatactccacaagaatgaactaattttatgggttttttaatgtgcatgcatgtgatcaccactaccatagagtctaagatccattcattggagagacaatgtagaaattatgacaagtggcaattaataactacattgtcagtgctcccagacacttgatagatatcagatatccaccctatcctaggacctgataagtaaagtactataaatgcccacagtttgtcaagacaaatttaattaatgtattaatgaagctgtggatagctttgagcaaagcaaaggctaggagaaggttgtcttcagtgtgggtatggtagaacatgctggaaggacagctcccatgtcagtggtcagagtgtataaaaatattttccttcattccttccttctcctcttttcctcttcctccttttcttcctctttctctccgtctatctctttaccttccctcctcttactcccttctctctttctctcctcctctttttcttcctctctgcttcatctttccctccccttctctccctgttgctcctcctcattctcttcctctctcttcttccattccttctatccctccccttctctcttctttgatccctccttcactttgggtctgttttctgacaaggtttactacgtagtagtatatgttggcctccaatttacatcccggctgcctcaacctcacaagtactaggcttacttgtgagtagcacatttaagccagaaatgctgttgatacacggtggagatgggagaaagagtaatggttgggggagttggaaaaagagtttccctggcatacaatgcatttaaggttagagtgatatcctgtggattgggtcaagctgaaaagcaaaaatttggaggtcagaagagtgggcagactcgaaggtcaaacttctgagtgtcacctccatggatacaactgtggagtgaaaagtaacttgatgagatagtggagagaggaatccaaaggttgagggaaggcttctgaagagaatgactctctggagggcgaggatagaaaaggaatcttgactgaggccaaggacatgttctagcagggcacatgcaaaattcctgagtttgaggatggagtatttgcaaacaagcaagcagtaacaatacaagagcgctggacatgagggagtgcaaagagagtctggggattttttttttctcagaagatcgtcattcctaaacggaacatatgccatatactacacacacacacacacacacacacacacacacacaagtcatctgagaggagggtgcctcagttgagaacatgcctccataaagatccatgtgtaggcaagtctgtaggtattttttttaattaatgattgatgtgagaggacccagtccagtgtatatagatccatccctgggcaggtggtcctgggttctataagaaagcagactgaacaagccattgagagcaggctagcaaatagcatgcctacacggcctctgcatcagctcctatctccagatttctgtcatgtttaagttcctgttatggcttccttcactgaatgactacaatgtagaaggattagccaaataaaccctttcctcctcaagtgctttttggttatggtgttttgtgaagctatagaaactagtaaaacaatgtccctaaatgtctctccagttgtcctagtagttattcaaaagttaaggtattttcaaatggtttgagttacatacttccttgtgcaataaaatcttctggtactctatttttctcaatatttaaacatttgctaatatttgtgaatttaaaaatcagtgtccagtgtcatttgtagaagtcttcactaagcctctgccatctctccagtcctgcacatgaagatttttttttcagaattcaataggtgattctttggtttttttttcatgtgacttttaaaattaatacccatcagaatgtttttcattacagcacatatactgtttagggagcattgatatgtctattggttgaatcttgctaccagaagcaaactcttcctttttattgtttaatctactttgtgtgcatgccttttggaagtatttttaagcatccttgaatatgttttgcacataaggattattgctatttattggacataagaacgtaatattatgtaggcaaatacagtatctctaacttattatacactacatatatgatgtataaacatcataaatagttcttcaattctttgtttcagatggatattctctatattgaccaataatagacttttgttgtcttcataaacttcttatgcatctatagatactactccgcttaattctctcaaatgcaaagtagggttacattaattctaccaagttacctagtatacaatactgtaacagcaagtagattcttatgcctcttttttcctgtccttaagcatctaaatgtttttaagcacggggctggttaaggacaactgttgcttttgtgaaggagccaggttcaattccctgcacccacatgctagctcataaccattcatggctccagttccaggagatccaaaggcctcttctgacttctgctggcaccaggcaggtaaaggcaaaatattcacgtgtataaaataaaataataagtaaaaaattaaagtagttatagctccattgcatatcatgttgaatagcttataaaagttgaagcgagagggacctgggtggttgcgcagtctgtgaaggtgtctgtagccaagtcttcctttaggagctgttcctttcctattatgagtggtggcaaatgaagatagcttgatgctcagcattttctgaccacactagagttgcagctactgacattatctacgctcaacttcaaagtgttaagtgcattgaagccccttctgtgttttgtcaggacagatgacatcagtctacctgtgtgatatcataagctaattacagtttgcacaactgttctttttttcctttgcatgttcctttcaaatccctttcttttctgatttcacactccttccattgctccccctgcccccaccaataatgcccaccaatgcatttgctgttgcatcctgtaaatcttagtccatggcctgagcctttctcctccactataattccaataacttgagccatgctcagctcttatgaacagccaaaagtgatcaaggcttggcatgagcagacacatggcattgtcagacactgaatggcatcagaagcaggacatggggtgtccgatgagactttgtatttgtaaatttattctttgccaatatcacacacacacacacacacacacacacacacacacacacgcacgcagagtgggaaagagaggaagagagagagacagacagacagatcttatctcctccccattcctctctcctgtcttctaaaactcaactgaaagagacatttaatggtaccatgagttatactttggggaacaatagattgttcctacgcatgtttgtggtttcagctaactcagaataagacattttaggctgcacagtacactgttctgtttttatagcttgttagtcaatagagagaaagcctatgaaattattttccatttgtcagcagctatgccccatgaattccatttttaaaaaactatgaagaattatacagataatatattctgttcaaaacattcttagaaagaacttccttatttttctgatcttttccccacaaaaaattaaatttcaacatgtcagaatcaaattcacttctatcaacttaaaaaaaaatcacattatatcttcttagctgttgcaacaaatcagtaatatatttgggaataagctttttgggaaattgtaagaattgcaccagaaaaattacaaaccttcatgggaagagagttcatgaagctctgaaaaaagtcatgtctatgatgaggaatattcattccaaaaatatgtttataaattcatcataaattgagctataaatgtgtgtgtttacaatcctaatcctatgttcattttaaagttcatgtggaaaagtcaaggaccaagcatagctaaatgcatccctcataggttaggtggttgggttaagaacactctaagagagaaaagtcataacgctgtatcatgatgcagacaatgtggtctgtatcatagagtaatgcacacagcgattagtgaagtagagaaggaggcctgggagctgggctgcttcacagtgagcactgaaccgctcagggaaaggaataacctgaagtccccagggttctggggagattttctctctccacagaaaagaaattggatcccacacctcatatgtgaaattttaataaaagatgaatgaagaacttcaaagcttaagctaaaaatgtataggaaaatatttatctcaaggttgagaattatgtcttacacaatgtacaaaatgttttaaccaccaagaaataccaaaagagtaaatctccttttaacaattttttttttaaagaaaatgaaaacggaaataggctgtttatagaagtggggtttatttttattatgttttctaaaagcatgtattattgagttcttttttgtggatcagttatcaccatagattataaaaagcaaagagacagcaacctctaggcttcccaaggacattccccttctgtctatccacagccaagtcgggaacttgcattacttctaagttctttgcaaactgaaatggaaatacttgtgtagggccctcactgatgcatttgctgagtatgtgcccaggaaaatggaattgaaatgttttagtaagagtcgagggcccaatccttgaagcagatgtctctagagttttctatagcatgtaattacaacacaataagactcaaaagcatttcaataaagtgtaggtggaggagaaggacgctgcttcaagagtttcattagctttctgcagatggaggctctccacattgggaggagccctgtttcccttgcttcagagtccattttaaccctccatggggtctgggtggtcagagagcaaccaccattctccaggagacgaagggctgggcaagaaaacaatggttttctaaaagccttgttcactcgtggtttccaggataatttatcctagtgccaatcactgaggaaatagtagggtcctctgcttttgtttctcaaagaaactttaggtaaattaaaacaatggctttgactccctttcatgttgcctaggaggtgatgatacgatttctgagtcctgtggcctaaagctgtagctttggaaatatttaataagggacagtgtggggacagggagctcttcctagtaattatgaagagcaaacaattatccagaggagacatctgtacaatctatttctttcttgaagttcttactacacatgactgctacggacatgccatggtccaggtaggagactgtttggcatttgaagccatatgggtgatggggacccttacccttaacttcaatgaatttctcttaattttgtttcatattccactaagtacgtaagctccttctcctatactgtatggttttcaaaacatcttagtgacaaactatacaaatcccccccccattatagtcttctcttctggacagtagtgaatgcagaaactcatgatggaccaataagcagaaagccaatgacacttgtgagcccacccctaaacaagctgcttaggtccagggatcagtgtggaagagtggacacaaagtatataagcgccagaagattgggtgaagaggtataaaatgatattccctatactcagtgtagtatagtgtagcatagcatagcatagcatagcatagcatagcatagcatagcatagtttactgtaatctaatcattagctcactcccaatctacacccaggaccacatgagatcagccctatcaataataaggcaaggaaggaaagggcttcagggccctatactgtatctctgagctattagccattgatagattctgggaggacatggggaacactgtcactagttggtaacctgtttctggactcaagtctttccagtgcttatctccaagccacagtcacacagatgtccctggttaatcttggtatgtcacaaaataaaacaagtagacatgaatgtgaaagagatttgttgagagggagagtagacagtgatggtagagttggggcaatgaagagtgatcagtgtgtgaagtacatgtatgtgaaattataaaaaataaaaagaattaaaagaattaaacttaaaatatttgagttcttctagaaaggatacgttttgattggtaacaatatacactatggttgtggcttaaactgagtttcctatcttaccaagtctttcatgggtccactttcattaaatattattaataatattttcctaggtattaggcatataggaagaatatgacacattcttctctgcagacagcatattctctacagacatggtggtataaacagaagagagagtaatatatatagtatgcatgtgtatgtaatatatatatatatatatatatatacacatatatatgtatgtatataaaatatatgttcatacctatatacaagagcatgtggaggtcaaagtttgatgtcaggtgtccactttatatagtggagcagcctctctcatttaaactctgtactttctgattcaacctgttaagctagtcagcttgccctagctatccccagtctctgactcccaagtcctgggattgcatgtgtgctgccacccttggctggcacttgtatggatgctagagggctcaactctggtcctcctcatcctttcataggaaatgctttactctccaactctatggtgctaagactccatatgtttaaagaaaactatgtaggtaactggcaagtaaggagtagagatggaactgctgtctgtggcttccttacatggaagaagtggtcatggggagcgacaggtagagaatcagctggatattgccaggaagatcacacaaaagttgcaggatctttaatggtgaatcaggaggcaagtccccagggctcagacttcggaaggcttttgaacttggccacagaccagactgtgagccttcagagaagataggggcagtatctttaaagcctgattgccacagaaccttcagattgagcaagctcatgactcgccacactggtgcttagacatactggaaaaagaagactctagaactgcttgactagggaagctgagtataggctagggcaccaccaagaccagggacagtggacacaagcacagcttgagtagtgaatggcaacggaagactggtcagcattacatttaagagtttccacttttcattttactgcaaaattctccccaactaagtgaggctgagtagttaatcttcccatgcctcagtttccttttttggaatagccattttttaatggggtttgtaagaatttgatagttgtttcatacctaggctatgtccattgatatctcatttcaactcaataaatgtaaatgccataaatattttatcattgtcactagggctggttgtggtgctctgttgagactggattagttcaagaacaagaaaaccaggaagagaattgcaggaagtttggtctccaggagtggaacttagtgactaaagaaactaaaaagtgaacacatttaccctctcaaaagaagccagtgagttatgggattttgactctgtgcttcaagtatcattttgaagactttggtttttctgtttgttcttacagaattgctggatcactttagacttggaataagatctagggcagcgctttgacactgtgttttgtggggctttcacagaagtggctgaggggcttaccttggaagaaaaaggatgaattgggtctctgaaagcattttctcagctctttcagcacaggcattttgcttctatattatagttggggcactacatattacttaaggagaccttgcgtctacagatgggttgaaagtcattcattcacctgagtctccttattttaagatgagaagtgtaattctagaattgcttcaggtggtacaataatctatttacaggagagccaaaatggaagacccactccctctcatcactgtgctctttgcctgttacacaagtctacccattgttgcctgatacaagaccttagattttagcatcatcaaaagaactattaaaaaatgcacttccaaattagtaactttatacaaaaagactttctaaaagatgaattatcattgacattgtctgatgagtctttgcttccctacccctcccaaaactacttgttcagtctttaccaagtcagtgtattaattttttgtgtatagttgcctttggctaaaacctagattcagaagcatcagatgaaggagttagaatttgtctagcatggctacacttggtggaactcacctgtgatctcagtgcttcagaggcgcaatcagaagcatcacaagtgcaggaccagcctgggttacataatgagaccctgtctcagagaatcaaaacgagaacaaaccaaaacgagaccaatgagcagcatcagagaccttatgattgatttaaggcaaagactgttcacagtaagataaaaagaaagaaatgaaaaatgaaagagacagagatgcaaagaagtggtaagctggaggaaagatgcagaatggttgattgtgaacagagaatcagaggccctttagcatagaaacattgggaagattaagaggaagatggtgtgtaggcagtttctaaatttcattttttagaaaacatttctggcattgttggccttccttattagtcttcctattgacattcaaagccagggcatgttctcctgtcaaaataactgtcaaaataaaaagttctcatttaaacacatatatctaggtgacctcaaaacagattacttgagcctcagatagtgtgttacctctttaaggacagtcttgcccaacacctctcactgacttgcttggttcattttcaataattaaagaaggccttgttcatacaatcatacatctgctatctgcctgtcacacttgactgtaaggtccaaagaaggatctaggaaaagcatgggactcattactgagtcagtgggcgaaagtttcccctatggattgactagataacagcaattttatttccttgctgctgtgtagacttcaggaggcatttgccctgagtcacttgaaggcaaaatcagtacagaataaaaaaacctgacttgatagtgaatgaatgaaggggtgaataaattaaaatttgccattgtgtccttaaggctcatcagagagtttggcatgtgtaatagacatgcaaaaccatgttcaaacaaaattgctttaacgaacaatttcattttcttttgcaaaacaacaaaacccaggggctcttctcctatgtgtaacaccacgtcctttctttctttcattcatctgcctttatcccagttagccaaactggctcaactggggacagcagagagaagcacacctgctttgtagtactccgagacgttccaacaaaggtgactaactaaagccattcttgatgtgggcattgtcaaagatcggccaaatctcttttcgagatatttgctttgccacaatcgtgagaggaggattttcatctaggggtttactttagctcacaaagtatctaaactgaacaagcaaactcaagtgggtcgttttctgtagaagtgcagaatcccaattgcctttggtaaaccactgactgaagcgcaggatgtgttctacacatcctgatagaaacacctataataacaaactccagcctcttgcctttttttttctaccttatcacccaaaagtgtaaggaaagaatgcacattgaagcattttcttctgttgggcaatgtctctctgtttaagaatacttttgactaccagctctctggtgtcttacgagtaaatagcaaagactcttagggagcttttgcttgtgtttgacaggtaggttcattaagataattgggcattttttatgcgtgtttgaagttcatattaagatacacccttcagcaggccaatataatattccctgtgtaatttccacaacaaccatttatgttaacatgaacacattcctaggtgagtcatagaggtatcaattttgggttttttttttttttctgtgtgtgtctggggtctggtgaaagcacactcggacttcagcaaggctaatgtccacacttggaggtggtagtgaagaagaaggggaaagagataaagatcttcttggtctggtatcaggatgtgattggtgggcaggggtagaaagaccttcattctggaagaaaccagatgggaacaaaatgtgcatgggtgactataacagctaacatctctagtgatcgtgtttatgctcccataagacaggcattagaaggtgaacacctgttttctctcaaatggacaatatccagtgacattccctgacaaagatattattttctttgttttcaatgaatatgaacttagttatactaagtaaatcatttgcacactttttctcatcttttaattttattgcagaccttctcactgtgcccctatattgattggctttattgattaaagtttctctcaggttttaaatgccaatcaataaatcaatcagttaatcaaatggaaagaaagataactgcagacatacactaagaaaaaatgaatgctgggactttccctcccatagccctgtttcccagctccttccacatggtttgtgcctctggagggggttttgagagtcagcatttctaaaccactgctggatcactcatttacttcctaaccatcctctgtgtgcagggcctgactctctctgtctcatagcaactcttatcaaggtaatggaccaagaatcatttccactcgaaacacaatccttctaaatgagtcatgagatatagttacctccattttcccataataaccccaagaagatgatcctctggctatgctctcaaaattgcctcctgtttgtgtttattttattccatttttcctttaattttctacctaaatgtgccctgtctaagaggtagctattgttattttgataactcgttttccttggcatacaccttgttaaagggcactcatgtatggccagagagtttccccaaggctgttaggtttccacatgggcagcctgaaggttgaacatcagggagatagacttcccttagagagatcatcagccccgctcattcttacatctttcctccattgtctttgtccagtatagtatttagaagaaaagccccaaagcaccaaagaattagaaacaaatgattctgggtcatttttcttttttcttttttcctgttcctttttttttttttttttttgtcagcttggaagcagctgtttaatgctgtatcttgttataatgatggagactatccatcttaatgctttaagtgtttctcttttcatttttcaaaaaagaaatctctccactgcttttagaagtactgcctttgggaacctcagtatattgaggcaaagacctctctacagaattggaagctctgaggacctctcttctctcaccccatccctactgagcctacctgatttttgagattattgcctcatgtttgactctctctagtttactatttgaaaaattcctcactgtatccatgcatcttgaccatctcttattcttgcatgacctacagttttactgtatttgagttattttttttttaccagttcatcccatgttctagtgtcatcagtcacttgatactaccttttagaatctctatctcaacctcagttcatactttagagtctatttcttgccttgagggacattcgcttttcttccttcccatcctcaaggacatcacttctagccacagacttttgcttgtctttcttggtttctctgaagtgtttaacactgctgacacctctttgctttgaggtgtccctcctccctggttctttcccaactcctggactgtaactcccatgtgtcctcagctggatcatctttgtcttgactctactgctctgagatgatgtctttcctttcctctatatacttcctctattctggaaatttccaaggctgcatctacagatgtatatgtttttctgatctctagatccaccatttcccaaggtccctttggatatttcaagatctatttgtaagtacagttcctacacctctttggctatttagtagctatatctacagaggtaagtatattattgtgtcccaagtgttctttttgtgttagaaggaagtagggacgaggagagactgacactcctaaagtttcagttatttgaggatagtaaaagtttcttatccagatcaagttcaatataaacatcttctttggcatgtgcccttctaattgagacacctagaaacttctagactccatctctgccttctattagctcttatgtctccagactaaggtatgaggtggagaaaagattaggaaacacatgcctgtttcttaattggtatttaccacagagatttcaacagctccttttcattttccattagtcagaatctagtgacactctcatccttgctttcaaggagatggagaaatatcatctatagaggattctaggagggcaaggaaaagcatgtggtaagccttatccagtgccacagttgtcttctggctagcaaatatcaattctccacatagagtatgttctcttacatactaggatgtttcatggtcacatccagatatgccattcaaagaagcatagataattcactttcctctctgatttgctagcctcactcagaagtacacccagcagccaatggaggagcaaggaccagactgcctccacaaaaatgtttatccaggaaaatggaagaatggcaggatctatctcttactctctcagaagccgtagatcctcatcgtcaggctctctctgacctttccatggaagttgtaggttctaatgagtaaacttggggtgatgtctatcctgagaagctgcaaatcactttggtccttcattttgctccccagggaaaactttcagattttccttcagcctgtcagtggtctggagtttctttttcccatgattctctattgtaggttctttctttcagctgtcctcattggctacagctgaagcaaagatgagacacttgatctggtgcacacatatgctctctgtcaatgcatactgaagacttgtcagttattaatgtcaacaatcataagcttcattttttttagttcatgttttctgtttgtttgataggtcagctgtctcggaatagagatagcttcttgatagttctatatactgaaacttataggcacctaaagtctttactttttttaaacatgattttctagattgctaattttattttattattgtttatttttaactaacttgcataaaatctgtatgtgtccatggtatacaacacaaagtttggagctgtgtgtatactgtggagtagctaaatgaagctaactagcataagattatctcacataattatcacttgtaaaagtgaggacacttgaaatctattctctgggcagtttccctgtgtatgtgtaccgctgttcaacgtggctctcatattctttctattcagcattcaacatatcatcatttgactaagtgccccttttccagccttaggcaagccccattcttctctctgcttctaagaactagacaattttggattccatgtgcatgtggaatttggtgacatgtgtctttctgtgtctacctcatttcatttaaactgatattcttcaagttcatccacattgttgaaaatgacagtatttccttcatttttagggccgaatggtatttcatcatgaacatatatgtctatataccacatggtctttaactgtccatcagttaatgagaagcttaattgctcccacctcttggctacttcgagtgatagttaaaagaactagagagtgcagaaaaatagggatatatctaaacaagcccagtcctatagtaactcttggtcctatagtaactctgtttttcctttgtttgggaaacttcagattgttctccgtggatgctgtaccaattttcactcctaccagtggtatataaggactttccccctcacaattctggtgtgtgtgtgtgtgtgtgtgtgtgtgtgtgtgtgtgtgacctttgacacagacctggaatgattcaattattctaggctgactgacagtgagacccagggatagtcttgcaccctccccttcagcactgagattacagtacaccagcacatctagctaacactttactgcctgggccatctctgcagcctcaagtctgatatttttatttatttcctagtcatttagtttcctttatacgagttatggttgaccaccttaagggtgttaaaatgatatgtgtgaatgggaagatttgtttttgtgttaccttttgccatgagaacaagggatgcttgtccttctgtcactgtggaactctgaagaaagcccaaatctatagatgttcaggttccttgtatacagtggtatggtatttccatgtaacctatccatagcctcacccatcctgtccatcttcagaatacatgagatgcagatgcagagactatgtatgtaagtggttagtgtactatatttattagggggaaaatgaccaggagacacacctcatcatgctcagcttggaagtttccagcacagggtggcaataaagtagagggttgatggaactggaggcttaggaaccaagggtgtggagcactgactatagtctgtaagctgagcagttgaagggcctttcaccctcaaggtccctttaatttcatctccttatacttccttaagacagaaatggttagcactggcatacttgcaagcctgtctgcttgcttctcctttctttccttcagctctgacatgaagatcatttgaattccatctgcattcgctgtgtccttccttcctccctcatggcggcacagagcccacctcctgccatcattctgactattctccaggaatgctgcctgccttgcaagttactccagagcagtgaattttcagcagagtagcaggatccgctcttgctctgtcatctgcttcctggtaacttgtcattacaaaaggaggcatcatgtactgtcctattcttcaagtgccaatctgtcctttactctgccttgacttatgtattccttattggacttccagtccaatatgaatggctctgcctctgacaaacagggtaactggttcaaagccacacagtcagtaagcagtgtcaccaagagtcaaaacccagatagctgtattccgcatctgaagcactttcttttaaaagtttgcaccttccaagattttattacatgccagtgtcggggctttcttgcatattacacatctgtgaatcactcagaatgtatgaatattcatgcagtcatcctatttcagatcacatgcttcatgaaagatcaagtagtgtcggaaatacagggttttaaaaaaatataattgatctcccctctgttgattttaaatggcttcttattttgtgaccccattttccaaccacattgtacattttgttttcaagacaactaaatgttaaatgttcattcattgttttattaaatactttatgttgatctcctgggccttctcagatgctatttgtgaattaccttttatacaaagagaacttttcattctgtaggatgagttttgcttcagatgtacagtgcagagtgggtcatcggagctctttgtttctcctaaggcttctgaaaaaaacagactttcaattttatagatgagaaacttccagaacatgctatgagcaaattctctctcaagccctgctccttcccccatgactgaaaggaaaatggaccatatttgacaagaataagtggctgaacaaggctccccacaaggggattccaaagtgcgctgagagtcacattgatatgagacctggaggagctggccacagcagcatgtcacgtctcacagtgggagtcatgggctggtctgcctgctaaactactcctctgatctatgactgacgccatgcttcctttaagaacttgtttttttttttttttgtttttttggtttttttttccatgcctcatgtgtttttcagcttcagcctagggagcaattcataaatttaggctaatcttgtcttacaataatgtcaacgccagcatctaaacaaagcttcagtggctcctagccatcttaaccaatcagctttgaccagaaggtacatgctctgtctccaataaccctctttaatatcttgatgacattatgtttcttatcggtgctaggcatcgaatccagttatacctccatctctggaacttccagtgcttctgttcttttgaaaactaaattcattacctgagtctgattttctccttgatgttagcagagaacattctgtcaagactttgaaaagaagctctgacaaggacctacaaggacttcagacaactgggattcctttatgtcaggcaggtgacaagagtttcccttcagtgtccacaccaatctgtgctggcacataggtccccaagcactagcagtaatgaaagaaccttcgataccgccccagcatgcagtgagcaggattcagccaggattctgtgatgtgctgtgatgcaacgggggcatggaagtgcctaaattctacttagttcacaacaagtaggtggctctagtttacactgcgctgctcccatgggaaggggaagtgagttcattcttaagaaggtgtcagcataaacttcacccagtctcttagcaggtgttgataatttcagtttcatgacattcattattccccaagaagctctcaaagttcagactcagactctcaaacatgaagcatgtatatttgtacagttggaagggccttgagattatgcctctcaggttagaggtcactgtgctccttctacatgcctgaaacacatcacacacatacacacacacacacaccatgtacacacacacaccatgtacacacacacacacactatgtacacacaccacatacataccatacacactgcacaaactatacaaaaacacataacacacacactacataccacacagcacacacatgacatgtgcgcgcacacacacacacacacacacacacactacacaccacacatgacatgtgcacacacacatcacatatgtagcacacatactacaggagcatacacataccacagacataacacaaacactgcacacactacacatacacacaccacaaacacactatatactatacaccacacacacatgacatgtgcacatacataccacatgtactatatgaacacatacataccacatacatacatactaaatgcacacaccacatgcataccatacacattgtacacacacacacacacacacacacacacctgaggactgatttgagcatctaaaagatgcaccatttctagcctcttccaggtactgaggaacaagcactatgtatctccaggtaataattgctgcttggaagaaacagggtagccagggagaaggagctgtaggagttaaggaaagctcctcatgggaaaatgtgggagacttttgagaagggggaactgttaagcctttcctttctcagtttctgagctgaacttttgctcacagcaggtgagcacaggctccctcccacacacaggctccctcccctgccgctgtgcagtctgttaagtaaacagagacattacactgagaaaggaacatttctctattttggctgtgagttgttatttttaaagcttcatcctccaaacatttccccaatctttgtttattcttttcactagaaagaagatgtactacttttaaaaaatgcaaccagggtacaagaaaaaccaacctgtagtctgcactctctaaccaaggccaagagagcctgccatgtgatactagtcccatccccagagtccagaaatgtaggtgtcaaagattccactctgctcgtagtgaactcctgatcatccagatttctattcaaagcgatgcatgcggcacttctgatactcagattcaatgtccaaccactctcttgaagatacatctctctattcgtcagtacgtctctgccagatacataaaggctgccccttgtgtgtggacactccgttgcacaggaaaatccagtaaagttagtctgagaaaactaaaccacgtgcttaaatactgctctgggttgcatatgcggcacttgctactgtatgtagaggctctctacacctcctcagggaatatatccacttcattgtatttatcttttttccttgtcaccttgcttctattcttgatacgttatcaatactcgtgccttgtgcctttcttgtcctactcgttctgatatttaggccaattagtggtacaaaatagttcctcagtaagccttgtggaatgagttaaaatagaaccagaaggaaagatagaaggaattgtgtcattggggttctttcctctggttgatggaggtgtataatctgccttaccaggttaggtctaaattccctgatgtgaaatgtgagaaagcaacacattaatcttgctggacaggaatgagtacattgaacgtatcttgtgtaattcagggcagtgtgaataaaggtgttttgattagtgacactaataatcacttgctgtctggaagaaaatagtaagctcaatcctgtcctaccagtcacacctcagtaagtctcaaaggctggtggtagaactctgcaaacatagggaaatcagaagaattctgttccttaagtgggtgagtgtatgtcttggaggtatatctcaatggagttgtcagaaaaatgaatgtatctcagaagaacaaagattgaaacaaagaagtgtggaacttctttgtagaagtaagcataagagaattttcatatgctaccaaatgaagagtgatcctctcaaacaaaagatgctgttcaagaaccacaaatggaaagtggatgtgcaataagtattttgtatgagaaaaatgcctagaacaaaattaaaataaatatatgacaaaccatgaaaaatacctctaacacaaactaattgctataatatgcaaagagttcttaataatcaataagatatgacttctactcctaagggaaaacgtaggcaaaggataagaggaggaaggtcagagaaaatgttcatgttaatatacatggggccatcagtgtagctcagtagtaaaatgtgtttttagcatgtgagatgcttgcacataagtctcaggattaaaaaaaaatagaaaagtattttttctttttttgtacttatagatatatttttggatgttatatataagtagttcaccaaaattaataatatgcatgtccttctgcataggatttttaattctagaagtgtgttttataacttcctgtacatgacatgagggttattactgaacgttgtaacagcatgatacttgaaactaaaccaaatgtcagcaaagaaagaggcagcccacaagagtttcatcacatcccacctggcagcattttgattagcagtggaccatgtgtataacatgtaacaggtgcctcaagaatatagcatcactcaatgaggtcacaaatattttagttgaagtgcactccatgaggttcacatagtgacagaattgcctaattaatgatgcatttctcagaatgtattcccatcaaaggacacatgactgctgggcattttgttcatgttaagctatttcctttgttgacaagagaggagaactctgggacagaagcaaattccagtgctcataagtgcattcatgcttatgtctgaaatgctttttacaaaggccaaataaatgtttgcatatgcaagaccttaactttgtcctctattttcatttctccaaatacatcatgctcagaatgagtgaatttctttcacatatagtatctcttttcatttcagaactaactctatagataagacacaggtatatgtgatagccccttgaccttgctcatttgctagttgttaatactgagattgaaatcagaatgtaatgtgaatgaatgaatgaatgaataaataaataaataaataaataaataaataaataaataaatgaaaaatcttgataccaactctatggtataagataaaaccatgactcaccccaagtgatgtagagcaagtccttgaccaacaattccaaactcttccaaatttattctgtgtctcctccttaagtccaatgcaccactctgtgccctttcatgttcaggtctgtttctcctccaatcatgcattttcacttcctgattgaaccctgactttctcgggatgaacttgaacagccctcacttgcaatcccctgtagtacaagtgaccccagcccaaccacacagtccatatctgctagagtttttctggtcctcaagattatctcaagacacatcaggaggagatactatattcatagagagcatcttagaacacaggacctttctccatgcctatagcaagtacaatgtctagaacatagaagacagtctatagtttcacccaaacctcagtcatctttgattacttgtaagccacagatctccacattcaacatagcagacttggccattgaccagcagaactcttgtaataattttaaggccttgttgattaaaaacattttttctgccttgctttctcaaatatgaatgaatgttcacactttttgctgcaagaaagtgagctgccaatggttgctacaggtgtgagcctgggggagttttacaatgtgagctgtaggtcttctgtgctttaatgctttttaacatttgccttcataggaatcaaggtaaatgtgtggaaggcatggtggagatctttgacatgttgcttgctacgtcaagtcggttccgcatgatgaacctgcagggtgaagagtttgtgtgcctcaaatccatcattttgcttaattccggtgagttgccaatgtgggggaatttaatgtcgggttctagggagaaatactcacttgtaatttttagttcaactagatccagtttatgagataaaatgtttaatgttatacatcgaataagatgacatttcaagtaacatttcatcactcaattagatagcagaaccatattgatcaagtatggtgcatgaaaaatgatgattgaggttggctcttgatcttttattgatatattttcatccttacacacatatggaactgcttttatttgcttgagtatctgtagatagctgcacatattaaaatggacctagaccaggggatggttcttgcaagttatgacatgagtcctggatgcacagctcagctgtggagtgtgccattagcatgctcaaggatctggattcgatgcctagcaccgataagaaatataatgtcatcaagatattaaagagggttattggagacagagcatgtannnnnnnnnnnnnnnnnnnnnnnnnnnnnnnnnnnnnnnnnnnnnnnnnnnnnnnnnnnnnnnnnnnnnnnnnnnnnnnnnnnnnnnnnnnnnnnnnnnnnnnnnnnnnnnnnnnnnnnnnnnnnnnnnnntctctacccttccctcccctcccctccctcctctcccctcctctctcttttttcctctgtagtgaggttagctgttaggtcctccagacaggaactgtggctcagctttaattagcactctcacccttccagcccctctaagtgccagccatctagctctgcaaccacaggctcactaagctcaacccccttgtctgctgcacagcagatgcacttaaccagggacatttgtcctgaaaccccggtttcttgtatctcagtgtcaccctcaagtagaaatcacatgtcttctcaagtcttggcctcattcagttcctcaccccaccatgtctccaattccttaggacagagtgacagcatggtcacagtgagtatcagttctctttctgcaagtctgtctcctcctcatgatcccaagacccttcccatctcccccgaatgacaattttccactccggttcctcaaggactctagatagccctattcctcaatagttatcatggcaatcatcttcccttatcagccgagaaatggaaattggtactattacactaggcaaggcctgaattggggagtgaagttccatgatagaataatacgaggcgataggcactcaggaagtgattatactccattcaagtttctagtcccactcacacgcattgtgcgtcttcatttgagtcgtttgtcctgcacattgaagggtccagatcccacaatggctctttattggatgtcagttctgggagtagagccactcgcttacacagcgccaggtcccgatcccattccttcttcagtggaggactggcaagtgtggacagcctgcatgtgggcaatctgttaacttcagggacagcatgcttaacaagtgttggaaacttttattattattattattattattcccactctaactagacgagaataacccagataggaagtgagagttgtaaaatgagcatggcgaatacttgtagacatgaaaactgtgacccacatatccgtatagcttttcctgaggttttgtttttttctgttcttacaacagcatgggtatattttttaatattatgcaaaaaattaaaagcacaatgctagatttgtgggctctgaatttttacaacccattgaatttcccactgcagaactgggttcccagctcactctttgtgatgttagataggccttcacacactgtctttgtcccttctgtctgtctctgcagctctaggctatgcttaattcttaaaggggtgagacactgtttggcgatcagaagctctgtgcttatacttgctcttaaaggggtgggccactgtttggaaataaaagactccgcatactgcagagttgatagttgtattttcatgtgatgatggatagcagcttgtctgtgccatcaaggacagtactgccggctcgtgagagctgtaataaaaacagaagcagctgaccagcccgaacagacaaaaccactcttctcaccacaaaagtgagctgcgctctggaaagacgggtctgtgcctcatacagttcctagtgtcttctattgttcatggaaaagcagagagaaaggatgagacacaatgggccagtataggaaataaagagaaataaaagtccaataaaaagaaatctgcccaacacacacacacacacaaacacacacacacacatgaacacacatggacacacacacacacaactgaaggagttccaggtgtttctaaacccttaaccaacttactacttttgagatgagccaactcctgacttatcttgagacaaggccacccaggctgggattcagggaacctggttagcagatcctaggctttccttgactaagctttggggctggaaagaagctcacatttcaatctgagtctctgaaggccagttctgagaaagctgctcatagtgaccttggttttgagacagaatcaggagaaatgaaggggttctttgagggcctactcagaatgtctttttagaagccacaagaggatctccaaagatcagaatttccacagatgatctcttcacaactctttagaaggtgtttaacacaatttctgtgtgagttggaatgacttatttgcttaccaaaactcaagatcatctacaggacaaccacagagtccacatcaaagaagagaggtggtcttggttaaatctagacaggccttagtaaaaaaaataaaaaaaaatcaacgacagcttcaaggctttctgagaagtagctggaggaaatccaagaggaggcctaggagaagaggaacagatgcgatcagggcaggggtctgaggaggagtgaaactgaggggaggggagggcattccagcctcaggaggatgctgaggagcctgggccagacctggccacattctttctcctgtccagggggacctcagttcttcttcaagatcattcagacacacctacttcctggagaccagctccctagctaatcctccctctcttgactgtttggcttcttagtagcacatgatttagcgtttgaagagccggttggttttaatatttttactcaaaaatttcactcgtttctttagtaattctatatttattgcagtctcactaggatctttatgccaaacatatccaaatgaatgttctgatgtgtgtgagtgtgtgtgtctcccttccttcnnnnnnnnnnnnnnnnnnnnnnnnnnnnnnnnnnnnnnnnnnnnnnnnnnnnnnnnnnnnnnnnnnnnnnnnnnnnnnnnnnnnnnnnnnnnnnnnnnnnnnnnnnnnnnnnnnnnnnnnnnnnnnnnnnnnnnnnnnnnnnnnnnnnnnnnnnnnnnnnnnnnnnnnnnnnnnnnnnnnnnnnnnnnnnnnnnnnnnnnnnnnnnnnnnnnnnnnnnnnnnnnnnnnnnnnnnnnnnnnnnnnnnnnnnnnnnnnnnnnnnnnnnnnnnnnnnnnnnnnnnnnnnnnnnnnnnnnnnnnnnnnnnnnnnnnnnnnnnnnnnnnnnnnnnnnnnnnnnnnnnnnnnnnnnnnnnnnnnnnnnnnnnnnnnnnnnnnnnnnnnnnnnnnnnnnnnnnnnnnnnnnnnnnnnnnnnnnnnnnnnnnnnnnnnnnnnnnnnnnnnnnnnnnnnnnnnnnnnnnnnnnnnnnnnnnnnnnnnnnnnnnnnnnnnnnnnnnnnnnnnnnnnnnnnnnttgagtagatctcagctttgcataacactgtgttttagtttaaagcccatcacaaaggcccccaaagcaagtgggggagactcaaggctaatagtaacagggactgttgtagctacctgcagactttgttaacgacactgcttgtttatatgttagaaggaccttgatcatgtggtgtgacattatgttgacagtcactgctcactgctcagtgtttgctcctttattgtcttcttagctttatgcctcttccaaaaccactccaaggcagaatactcctttgtcactgagtgttccccaagcctcaggaaattcatgtattgaagctctgagtatacacctttatcacctttcaggaatgtgcagtttaaccttcaagtcaacttgacaaagatatctatccttttagaaccacctcttttcttacacgtgtgtgcgtgcccacacacacacacacacacacacacccctacaagtctgtatattgtatccttgagagcctctctcacttctgtctctgctaacttatccagtgaagctcggaaagctactccagttcctagttctagctctctgtgctgttttactccctaccctctctcttcaggctctgacccacaggctaattctagctacccagaagtctcaggacagcaggcccagaaggcttcccgcttgttcctggaaggtcttaatgctgttgaaacttgacacctgtgattacttcttcatcccaagctcgaagtccaataatatttgtcttcccgtgaatgggataatgaaaccgagcaagggctgaaacacacagacaactaaaaacccaggggagaaaaagatattctggaaaccaaatgccaaaatctctaactgtaggaccttggtgctcattgagggagaccatccatgttacacattcattctaagagcatggcagctctcttctgctacctagttctgttttgttaatatgtgtgtcttgttttcccaatgccttcatgaaaagcacgtgagggtgaagctcatgaaaacctgtttgcttttgctccatctctgagtggctgcatttgagttcgaggaccatttgtttcatgatgaattataacaagtttctatcacagagagtgttcctccaacccccaaccctctcgctctggattatttgtacactgtattgttagacagctacttaggagcatttagatgttcaagttgagaaatgaaacaatgattcagagacactctatatttagataaaagaacattaacagttatatgacttgagacatcaaagattcattaaatctctgccattgaaggtttctgacaagagcaggccttggaaatcagaaatggacacaatgtcgcaacgtcagacagtgttctctgttgactttgtgtgtgtgtgtgtgtgtgtgtgtgtgtgtgccagtatcctttccacagagtctgtttattgtcattttgagatgaatggcacttcacagttgccaagtggttcgctgttggtccctctgactaaattccgcagccaagtgcacccaacttctggagtctttctattgtcatgacttctgatacaaccttaaacctcttgggtgataatggttttcctgccagtgtcctgtgacctgatctctgtcttcagaaaggtctagaatttggagaatggactctgctatttacttgatggatggagatcctagataagctacttccataactctaataggcacactagtaccaagtgagcccaaggcctcagaactgccatagctactgaaagaatgtccatacagagattgcagcactttgtcttgctccttacatgtagacacaggtgaatactagtatgtttcctccatagcttttaaacacaatcaccttcccttgtgtccttattttaaaaaaatccctcttagcagaagaaataatagtaactattattatagaataaattcccaaaagaacatccaaggcaggttctcatccctgccactcacagtgaaggatccacccacacaatgaacacactcttgagagtagaccgtatatatgtctgagttggtagctcagaaactgtgcattctgtcaaaggtctcagagctcctgagaactcgtataggtgactgtatgaattatttttctcattgttgtgacaaacccaaaaaaagtgaaggtttactgtagttcacaggctaagggtgacattgggacaggaaagccatgacagcagtagcaagaggaagcaggtcacattgctgccaccacagttaggaatcactgacggatgaatgtcgatgctcagtttaccttctcctgagcctgtgggaggctgctactcagactcagtgcaggtcttccggtcttccgtcttcacttaaacatttttggcaacatcttcagagacaaacgtagagttaggatgattctgcgacaattccaaatcaatcaagttgataatgaagaataatggtcatgccaatctaagccctcatagccttcagagaataacacagagagttctggcttttaatatgacatgttaaaattttattccattaggaggtaataagatggagaaagtcaatttgactgtggcatgcacaggtggggcttttgaaaggttcctgggactagataaagccatcaggatggcaccctataattaaatactggtagctttataaaaaggaaagacaggattcagagtatacacacaggtcacatgtcacacctcttgacatacaatgccatgcattatgttgggtcctgccagcatgcaaagcatcactgtatatataacctctaaaaccttggatcagaacttggaggcataacagaacttctgtctttatagtttacccactccatgctattatggtattagcaacagaaaatgagttgacagacactcggtaccaataagtgagtctgttaacaagctgttcctcaaaatatgggaacaactttgggacagggtcaggagcagaacatggaaaaattaggaaattcaagtaaggggaacattatggtctattttaggaagactaggaggttagacaattataaggagtatataagagaaaaggctagccttgttatactattagaagatcttcactgcgttattcccaggccctaagactgtattgaaggccaaagataaaaggtgactggccagattaattggtagagattttctaaatattaaaaccatctaattttcaaaattttacttttatttttaattatacatatatatatatatataatttaattatacatatatatatatatgtatatatatatatttatgaaagtaatacccatagagtccaagtagtacccatagagtccagaagaggatataagatctcatgaatctggagtcatacgcagttatggactacttgacacaggtgctggggatcagaccaggctcttctgcaaaagcaggacttgttcttagttgttgagccatctctccaaccccttcctgccatgtttgtatagggacaaaaaaaaactgtttctatattgagtatcattatagttaatagtgagatttagaaaccaaatcaagtaaaatagaactatctggaaatggctagagaaaaagtgaagggcacaggactagcgagcatacagcctacccctcatgaaagatctgtgcatgccttagttgtgactgtgctaattagacagatcatgcaaagaggttcttagaaaaactcagagatccaactacatgagcaaatttgtgtcaaaggcttagcccttgggtgctgtacatgactggataccctgaaaatctttgtgattgtatcccttgttttttatttatagtgccgtctctggccactatggctgtggttcaaacaggtctgtgccagtggcagatccaggtgtcagatccattgtggtggtttttcaggtgtgctgaatacaagaggtatgcagtcatagtggtttctaccaagacatctaagaaaagtctgagaggccaagcagaagtttactattggctaagctgctgctcactgtccctggtaaagcaatgcctagtggatctagggagtatggcttcatcaagaaccccagaaaggaagaaccatcaacatcgtgcaatactcacaaagagtgtaaaaagtcaacctgaaagagttaccatgtggcttgtgacccacaatcatatgaacatatgtacccaatgccttgggataccatagtagcacacagactctagacacaaatctctgggtctaatgtcttccctgctgggtttgggtcttggtttgagccgtgatctccttttcattttcctgtctcttccttttgtggcagcaagggctgctcagggtcttgtgcttttctcgtcacttaacattgctcctaccacaaaagccttattacctagtaaaatgggcagatgtatcaggaaaataatgttttaaaagatatataacaaaactttagatagttaaagagcatacagtttgtaagaagaatatgaaactacccttgaaggttaccaactctgttgatgtcttgaggcatcatattgtggggtcatgaaaaggctaagagcaagggactgcagtcccaagttcaaagtttcttccttacacttcttagttgcacaactttagacaagttgcttaactgttttgcgctcagttctcctgtccatgaagtgaacattgtaatctgcttaccttgtacaattaattaattagttcatttcttggttaattatcaattaattagtcagttgaacaatgcagcttagctcaatataataaaataacaccaatttcaataatggcaattgaaactaacaattggtgttaggtaacattatctttttcttctatattgcagatgagtattttcatagatagtcatgttacttagagccaggggtgcatctgtgaaatagttttataggtcatttcactccaaagtgctgctatgctgtctttaaagttacagacccagtgcctgtgatggtgtcttgatggaattaaaagatggcaatcatgagacatttcagtcactgccagaataccatagggtgtgactaacttttttttcaaacacaatacttggaatacattctaaaccaacaataaaaataagagtctaatgaaccctaaactaaaaatagatttccatgttcactgtcctaagtgaatataatataatatagtgtatataattatatgtgttgcacttttctacagatggctgtgataaggtctgatccaaaaaaatcccagcacaaacttcagagtaatacattgtgccccaacactggggtagatggtgtcactgagtgataagaaatgtttagctctagagtagacccatgggacaactgcataaaatgtggcccatcacagaagtgccatcagaagaaagtagaacttaatctattttaattatattatacatgtctattttttttccaatggcattcaattgatgatgtagtcaatgaattttattttataaaccattgaaagcattttttctttcttgactatataagtgatgcttattttgtactttagaaaaagacttacatatttgtatattttatgtatactagtacttttgtctacacaccagacatgggtacacctacacaccagaagatggcatcaggtggttgtgagctggcatgtgggtgttgggaattgaactcaggacctttggaagatcagtaagtgccattgaacaccaagccatctctccaaccctgctcatttttcacttttaacaaatcacttcccaactttagtttttagtttgcacattttagtagaagtacatttggtgtgggaatgaggtatggtggtttgtaaagctattggtacatgttcacttctgctccaccaacaccatatcacactgttatcaatgaccgtgaaagatgcccacacacatgagccactgtgtcctgtggaccatgaggctggtgaatagaagttgctggaatgagtagggagctgatggcttccttttgcccacaccctgctggtgttcttaaacacccacagtccaggattctgcacatgtactatataaatgcttcctttggaagccaacactcactagaattagattctatatgtaggtgctatgtagctttatattgtgcactgataccatgacagtgaactccccttgcatggtctcagtgatacctgttacgttctaccactgatttaaaaataaagcattattttaaaagagcaagacaagctattgaagaattcaagcacatcatgttaagagacccttttagaggtaaaggacagggctcctcctagtgactttgctagcacttgattctgggacttttggggttggacagtctatgtcctagtctctgatgaaattggaagaagcagtatgacacatgactttaccttcaatccaactgcatgtttcactaaaaaaaactgggggctgagagttcaagctgtgccctactcaatgagctcctatgaatcaagagaagtctacatcttagttacctgcagacagacctagacgtggctctgagtcatggacaggagtgtcaggcagaatctcactgttttcatggacaacagtgatgagtgacaccaaaatgtcaaattatttttcactgtgtcaggtgaaacactggcccttcctaccggaatgaagggcagtatgaattactgagttagttgagcctctgtgttctgtgaaagcaggacacatagaaccttctagagaaattgtggtcttctggtattgtcaggctttgaggctcatttatcattgtagttacctctgcagctaagtttagcttggtggcacatcagggttctttccagctaaggaaaccgctgggtaaattttcagtgacacatcggtaaacttagtttcctgctgaaaccacaaccatggagtctcagaaataggaactaccttagagataatggaaatattgtaagaaaatcaataagtaatgtcttcatagcaacctctggatcctttgaagggccaccaggttcaccaggtgcatttctcactcaaccacctgggtgttgacagtctgatgtaacaggaataagaggtgctctctggatttttaaaaacattttcattttttaactggtttgcaaaagtgatgagcacccagtgcttggaacttggaaaatacagaataaatactgagaaaaaaccatctctcagagtatcccaaattcatcccatgaaagtaatcactgttaacattttggtgaaagtctttatctagttaaagagactcatagaagttaagcatagtggcacatacctttaatcccaacacttgggaggcagaagcaggtggatctctgtgagttcaaggccagcttggtctacagagagcgtttcaggaaagtgttatataatagagacactgtttcagaaacaaaacaagctgggcggtggcggtgcacgcctttaatcccagcactcggaaggcagaggcagggggatttctgagtttgaggccagcctgatctacaaaatgagttccaggacagccagggctatacagagaaaccctgtctcgaaaaaaataccaaaaaaaaaaaaaaaggaaacaaaacaaaacaaaaagagactcacagaagacctcctgtcatttcaagtctttttggctacactatcctctgacttttttcaaaaggcaggattgctcctaaattgctcctaatgttttgtcagtatgaaaattagtctagagatctcaaatgtccaagaagatgagtctgctggccatcatttctagttttcctgcaaaccttggagctaagaaatccttagtgtagtgtttgagtgctgagtgagaggtcaggggagtctggattcgagctcaggctgtgacacttatttagcagctggatgaggaaccgtttgcctctctggaaacatcctcttgcatttgtaagccctggtgcttcaacctcctacagccctacaattaaaatgcaatttgcatttattttcctttttggatgttttgattttactgggatgaggggagtggttcagttggtgaggtactttagaatttgaatctggtctccagcaaccatatataatgtacaacagtgaacaattgtagtcccaaccctaagaaagaggggacaggagggtccctgagattcctggtgacccacttggagctgcagcgttagtgagagacaggctgtcttagtttcttgtcctgaggttaagaataattgagaaagaccagaagttaacatctagcttccacctacaacatacctacatgcacacaaccctcccctgcacacactcacacatacatacacaagctcctaattgcataggcacaaacttgctttcattactcaacagacttcacatctgggtatagtatttttattatttcctagagaatttcgtacactatatctcctttctcgattcctctgagatcaattcctctgagatcaattccctccctcctctttgtgtcctcttgttacttcaatttagaagaaactgtctttcagaagctatgaaaaagagcacctctggctcttacagtctttgcctcattattttgcaatgtttccagagcctatgtgcaggggttgtgtttcaagcatattaattgggggcaaaatctgatttatataatgatctccatctactgtaaaagaaactgctctgtgccccatttttttaatggaattatttgattttctggagtccaccttcttgagtttatatatatattagatattagtcacctatctgatttaggattggtaaagatcctttcccaatctgttggtggccttttgtcttgttgacagtgtcttttaccttacaaaagctttgcaattttatgaggttccatttgtctattctcgaccttacagcacaagacattgctgttctattcaggaatttttcccatgtgcccatatcttagaggctttcccccactttctcctctataagtttcagtgtctctggttttatgtggagttccttgatccacttagacttgactttagtacaaggagataaaaatggatgaattctcattcttctacatgataactgccagttgtgccagcaccatttgttgaaagtgctgtctttttccccggatggttttagctcccttgtcaaagatcaagtgaccataggtgtgtgggttaatttctgggtctttaattctattacattggtctagctgtctgtcgctataacagtaccatgcaatttttattacaattgctctgtagtacagctttggaatatcgaatggctgagaagcacctgaaaaaatgttcaacatccttaatcagcagggaaatgcaaatcaaacaactctgagattccacctcacaccagtcagaatggctaagatcaaacgttcatgtgacagcagatgctgtcgaggatgtggagaaagaggaacactcctccattgttggtgggattgcaagcttgtacaaccactctggaaatcagtctggcagttcctcagaaaattggacatagtactactggaggatccagcaatacctctcctgggcatatatccagaagatgtttcaactggtaataagaacacatgctccactatgttcattgcagccttatttataatagccagaagctggaaagaacccagatgtccctcatcagagggatgggtatagaaaatgtggtacatttacacaatggagtactactcagctattaaaaacaatgaatttatgaaattcctaggcaatatggatgtatctggagggtatcatcctgagtgaggtaacccaatcataaaaagaactcacatgatatgcattcactgataagtggatattagcccagaaacttagactacccaagatacaatttgcaaaacacatgaaactcaagaagaaagaagaccgaagtgtggacacttcgctccttcttagaattgggaacaaaacacccctggaaggagttacagagacaaagtttggagctgagatgaaaggatggaccatccagagactgccccacccggggatccatcccataatcagccaccaaacacagacactattgcatacgccagcaagattttgctgaaaggaccctgatatagctgtctcttgtgaggctatgccagtacctggcaaacacagaagtagatgctcacagttagctattggatgaaacacagggcccccaatagaggagctagagaaagtacccaaggagctgaagggatctgcaaccccataggtggaacaacaatatgaactaaccagtacccccagagctcatgtctctagctgcatatgtagcagaagatggcctagtcggccatcattggtcttgcaaactttatatgccccagtacagaggaataccagggccaagaagtgggagtggaagggtagggggttgggggtgggggtggcaagggtataggggactttcgggatagcatttgaaatgtacataaagaaaatacctaataaaaaattggggaaaaaaaggaaactgctttgatgaggggtgagagttacacttaactgtgggtttaaggacaggtatttagaatgcagttagactttgtactggcttaggaaactacagtagtgggttttcttctggattccatggctttgccagtcacaggcagatggtaaaaccaacagtgtcagtcatggattccctcccagtgagtgggctgtaagtccaattaaatggctgttggttacccccattattatacctcatggggttttccagcatcctcactgttacctgtacctctctgttacttctctctctgcatcaccatcccacctccataccacaagagtctcctccacattttacctagtccaccttcatagtaactatgtcctaattattttttaggacagatttggcacaaacacagagacacacatgcacacagacagacacatagacacacaaacacatatgcgtacagaaacgcacatacacagacacacacaggcacagcaaatacacacatatgctcatgcacatacacacacagacatacagaaacacacacatgtacacatacatacacacatacacatgcacagatacacacatgcacacacagaaacactctcatacacacaaatgcacatgcacacacacacacacacacacacacacctccaatgtgtggcaagtaaagactattcccagatatcttctgcctccccacccttttccatcgtccctaacaataagcatcttgtatcagtggtgcattttaacaacaaagccttcaatgatgcatcattatcatcccaagactgtggaggacatttatgttttatactgtatggcttttagtaaacgtttcttattattatacagaaattctctaatctccccctcttccccaccctcccccttctcccaatctgtcctgtcatcgtaactttgctttgttcaggatgtcttgtgtttggactaccatggtgtgtcaccttttcacactgccttcttctgttctgtattggtcacttcaggcccttacaatgccttttcatcacttagtacctcatgttttgttatctgtgaataatattccattgtccgaatataccacagtttgtctattctctatttaaagaaaagcttggttgcttgtgagttgccataattgtggatgaagctgccacaaatctgtttgcaaaatattgtgtgtggacataaatttctatttcctttgtgaacactaagatgagggactactggatcctttggtgagagtttgttccgttttgttaggaactgcccaaacatcttccgaagtgagcagtaacatttcacagcaccagcgaacgatatgtgttcctgttgctcctcatccttgtcagcatttcctattgtcaatactctggggattgctcatcctaagagatatattttattatggttttaatttataatttcctaaactcatatgatactaaacatatttttataggcctggttggtacctgtagttcttctttggtgagatgtatgttaatatttctcattcattcttaaattaggtgattgtttttgtggttgagtttgaacaccttttttatatattttggagaatagtccttcattagatgtgtcttttgcgaatatttttctctctctaagacttgtcttctcagattttggagtctggcaatttttatccttccttctgctgaagccaagttgtctagaagtgtctcaaggctacctgagattggcagacaaagtcagtgtgcaggggtgctggtctttccctggtgttgttcctgcctttatcaaagtagaataactcaacaaagtttaaatgtgagggtttcacatgaggctaactttatctgtctgtctgtctgtctgtctgtctgtctttctgtctatatctatctatctatctacatatgtatgtatatatgtatgtatgtatgtatgtatgtatctatctatctatctattgtttatctaactaactacttatctatcatctaatcctatatatctctgtctgcctagctatagatatagtcatatggggcttttttgattctttaaataatttctaaaccatcagattaattaattttaaatagttttttctctagaatttcatgcatactttcagcaatatgtgatcaaatctttcctattaattgctacccacattcccctcaacccaaccacctttaaacttcctcttctcttcctcttccttctcttcttccttctcttttttctcctccctcatttcatcttcctcctccttcctgcttctcttattggtgctaattccctaagcccagttagtgctgctcaaatggttccataaccaaactaactgaccataagacatcttttaaacacaattctgaaattccacatctccatatatggaatgtaatgttagctttattctctttaagaaaacttaaaataagccaatcacactcatgtgatgcctgtgtactggggtttctatgctgtcgaatactcacttaaatgaagggtggaagtgagacgcctgaagaaatacgcaacccacagctcacttgcctcttggaaatcagaaaatttgatactagttataaaaaagcaaaacaacaacaacagcaaatcccagaagggactgtctgctgtttggagtattcctcaggaaatagagggaagttttcctaaggatttgctcttcaggggaatcaaactgtccaattaggactttttttttcttagttcttggtgttggtgacattacagatacttgagcaggctgcccacttcaggatgacgtggaaatgtctgcataagtttgttattcattcttagttcttgagtcagcttttctgagtcagagactaagtcagatggacgcatggtgatattttatgagcacatctatccacagtgactttttacattgattcccagggaagaagggacatcctccctccccaacccacccctattgttgttccagaagatttgaaatacttaatgaatttcatgcaatgaaaagtagtgaactaatagttaacaaatatcatataaagggagagtaatatgcagaaatcaccaactctgtgagctatatcagcacaagaaagtgtctctgtgctgtacctgaaatgagctgcagggttggctctaaagttctaggtcaaaccaaagagaagtcattctattgcaaggttcatagggattttaaaaaggacaatatgctagttactcaacagaacttctctgaaggcaaatctctacaaaaatgacttcttaataatcaggacttgatgaagattgtacaacttagcctctattctcccaagggaaactggaattgctagtgttttccaggtagggagtgatctatgtagattctggtttccttcctgtggctgtgataaaaacaaacaaacaaacaaacaaacaaacaaacaaaggaaccctctgagacaaacagcaacttagaagaggaaatgttttctttggcttatatgctcaggtcataatccatcattgaaggaagttaggataggaactcacacactcaaacaggatcttcaagcaaaagccatggagaaatgctgcttgctggtttgctcatgtttatgctcagctggtttcttatacagcataggaacacttgcctaaggatgttgtcgcccacagtgggttggaacctcttatgtcaattaacaatcaagacaatccaccctagaccttcagttgaggcttttctctcagacaactctgggctgtgttgagttgacaaaacatgtataggacacttttattttcagcttgatgaatttagtgaaatcagaaggaatcctatgcaaattgttgcctgtacacctatccaacactatgaacctgtgttgctgtcaaagcacccacatggcctagaccatgaaaactgaactatagaacatgaagtggccagggccatcagatcttatctggtggttcagagcatcagaaattgaatttccaatctgcttcttcttgatcagttttctccctaaaactctgatgtggatggtcatgtgtgtaaaggttgctgctcttgcaaaaccaattaaccccaaacataatagcttaaaaaatgtttggtcataaatttttaaaggacaataatagagtggtttgtgtcttcagcaaagtgtctggggcctctggtgacactattccttaagtagggactctaagagttatggatgaacatcaccttgatgtatctttattgatatattgtaaaggatactggctgttgtctaggacatcagtgcaagacttcaacttggatgttgcttattgtcttcttcacactggacctcttatgaggtgacaaaagttcctggtcaaagtaataaaaagtagtccccaaggcagctaccaagacaaaagctacctggtcttttctgacatatgcttagaagacatttccagcctatcccattgattccatgaatcacaaatgagtcacaagttaatccatatctgaaagagtgggattagatctgctgttttgccaggaagaattaaaaaaccactgattaaaaaataagttacagaaaacttggtataatttgtctctggaaaagaatatctgcttaaatatgatgcaacagtgtcctggtgtgaaggtatgtacatgtgaacatacatgcccaaagaggccagaagcatttggctaccctggagcgggagttatatgtggttgtgatatgggtgctacgaaccagagttaggccctctgcaagagcagtatacactcttaattagcagaccgtctcaccagctctaagactctatgtctcctagcacacatgtatttgaaacttctcctttctgacctcaaatggataggaatggactgcttgaagaatagaaaactcagaacactgaatgtcttctaatatgttataataacatataagcaacagaaacaaactcccatgccaaatatacaccaatagcaactttgtcctgaaagatatattctagaatttatcttgtctgtctgttataaaaagtaaaatccggggttccatatatagtcaagcacatgagtccaatttaatgcaaaagcccatgtgtcttaatttgcctcaacccaactccatcagctccatcaactccatcagctcgccactatgtccaccggaagtcatgaagagatctagcttcggagtcagctggaacgagttggtgtggcgcatacttactttcaagaacatctagtacatttcactaaaaattgcaccaacttgacagatatttctgaatgagacttgtatggtttaatggtcgctggttcctgtgttgggtttctggcagggacatgcatttttagttgtcactccctctgtgacttcacagagaagagatgttgccaatgcatgtcacatgatatacactagcataatggtatgtgtgtatagaaagaccaggtcttgagaaggctttgactcttgcagctgaataactactgatctggaaaaggatagaggtttctcatcagtggatacaaatttcccaatgtgatcctcttttgttgttgttgctgttaggcacaaaatgataattaaattcctgaatggcataaagtcctctctttgaagtcttccgtgatgctatgtctttgattcataacaaacaaagcactgtgatgttctctgcttgccctttcggcttcactttgttctgtgaacacactggcggccacggagtatgtccgtattcagaatgaatagtaagcatgactggggatgactaaatgtttctagaatcaaaaccgtagcttctcttacgaagaagactagcaataggaagaaaaagaattgtacgtaaatcattctttctaaggccttatgtgaataaagagaggaggtgccctgaacactcttaaatgttactcctgtctcaacgtacttgtttaaccatgaaaaagtagtaaacacctcttgaattatattagaataggactcattataacagagagacatactgtgtagtgattcaaacactctgatgtgtataatagtgctaattctacaaataggttcatgtttgagatactgtcaaatacatacatgtgtctgtatttctgtatttcctggcatgcaactctgaaagcccttgaaaattctgaaatgatcatatctttttaccatgctaatgggttcactgaacagctagtggcccaggatgtggttgtccctggaaaggtcaaggcttgatgagagttgaagatgtattcgatcaccagtggcccataatttactcaagcattcttaaacagcaaatattcccaaaccccaaatgctaaggtttagagcagctaagaatgtggaagtatgagggtccaatgcctcccccatggggcatcaaagcaccacggtccttcctgcaccaggcatcacttcatttgtatatcttgccacgctctttttaaggaagagaaatttacatttccctaagttacatggcccactcaaggtcattaatgaaacccaagaaaggaggggggtcgtgagagccccaactgttggccagttaatcagaaacatgggtagaacaacctggagctggcaagtgatagtgaaggggacaggaagcacgctgggtttgagtccttctcgtgggagtactctctccagaaagagggtattagaaaggagttatgttcgatgccatgaagtggcttctgctagggatctacctgatcgctggtgatgagaaactctcataacttttagagtcagagaaatcagctgtgctggttgtagtggggagagaacagaaagaaaaaaaaaagttcagttctgtagtcttttattatgtggtcttccacatactcaggaaaaaggattttgccatttaaatagttgtttcctaagattcagctctattctaacatccatacatccatgactagaaaagagagaaagaagaggaagggtgaaccttgcccaggaactccatggaaaagatacttttcgacttgttagtgtggataggatatttttctttctttctctctttgttgcttcttccttccttctttcctccctgcctccctgccccctccctccctccctgtcctctctctctccttcttgatgtttgtagaacatgattttaatattttcaactgttaatattcaacaaacagtataattagtttaaaatatattttgttgttatgtctcccttttcgtttctgattttattaatttggatactgtctctgtgccctctggttagtctggctaagggtttatctatcttgttgactttttcaaatcagctcctggtttttgttgattctttgtatagttcttttatttctatttggtttatttcagtcctgagtttgattatttcctgtcatgtactcctcttgggtgtatttgcttctttttgttctagagctttcaggtatgctgtcaagcttttagtgtaagctctcttcagtttctttttggaggaacttagagctgagttttccacttagcactgctttcattgtgtctcataagttgtgatatgatgtgttttcattttcattaagttctaaaaagcttttcatttctttctttatttcctccttgaccaagttattgagtagagcgttgttcagcttccatgtgtatgtgtgctttccgttgtttttattggtatttaagaccagccttagtccgtggtgatctgataggctgcatgggattatttcattcttcttgtatctgttgaggcctgttttgtgaccaattatatggtcagttttggagaaggtaccatgaggtgctgagaaaaagttatattcttttgctctaggatgaaatctataaatatctgttagatccatttggttcataacatctgttagtttcactgtgtctctgtttagtttctatttccaggatctttccattactgagagtggggtgttgcagccttccactattattgtgtgcagtgtgatgtgtgctttgagctttagtaaagtttcttttatgaatgtggttgccgttgcatttgaagcacagatgttcagaattgagagttcatcttggtagatttttcctttgatgagtatgaagtgtccttctttatcttttttgataatttttggttgaaaatttattcgatattagaatggctactccaacttgtttcttgggaccatttgcttggaaaattgttttccaacttttcactcttaggtagtgtctgtctttgtcagtgacatgcatttactgtttgcagcaaaatgctgggtcctgtttatgtatccagtctgttagtctatgtcttttggggggaattgagtccattaatgttaagatatatcaaggaaaagtgatagctatttccttttctgttgttttgttagagggggaattatgtttatgttgttaatttcttctaggtttgttgaaagattactttcttgctttttctagggtgtagtttccttccttatgttggtgttctccatctattatcctttgtagggctggtttgtggaaagattttgtgtaaatttggttttgtgatggagtatcttggtttctctgtctatggtaattgagagttttgcacggtccagtagcctgggctggcatttgtgttctaaaaggtctgtatgacatctgcccaggatcttctagcttttatattctctggtgagaagtctggtgtaattgtgataagtctgcctttacatgttacttggcctttctaacttactgcttgtaacattctttgttttgccctcctcatctctgatcctatgatcctgggagtgttagagcacctgagagtggatcttcctctgggtgttttgggactggctgcagagttggcacccaaggtctctgatcctgtgatcctgagagtgttagaatgcctgggagtggagattcctccgggtgttgtcgatatttttcaaagaacactaatagactccacattgtcaagagtttgccttttgatgacgacaagatgtaaaattcaagtttgtcacatggcttgtcattccagctgggcatgagtcgccagtgcagggctttgttaaagcatatctgtcacaccccacccttggctcaattaccagactttggtggagacccggcaactgttgcctcctgtaaaacttcacaagagattctaagatattcatgatttgaagatgaatcagtatgcttttttagcatatacaaatgagaaattatactaaactcacttaaaatataatgctaacgctatatagttcagggcagatatacaaggcttgacaaaagttttttttttttttttttttttttttttttttttttgtgaaaaaaatgtggtcatcacaaaaaatacttggatagaaccataatctaagctttctgctcaagaaatagaggacatgataaatcagaaccagatatggataccagaataattatttattagattaattaaagtatcaaatcaaaagttatttaattgttaaattattacaaattattattatcaatattacaaaaatttaagaatatataagagttaagatctcattattttgtcagtgagttgtattttataaccattggctctagtttcctttagaaaagtgaacatttcctctattgatctttacaaccaatcgtggcaagtttgtagtatctgctcaacgacactgaaatcaattcaagtaaatggacagctgcaacatttacatggtacccctagttgaaataatggctcaaatattgtttttaaaaatccaaattattctttgaaaattctatacatgtgtgtagtatattttgatctagcccagtcttccttcttccatttcctccttcaatctcctctcaacaccttctatttcccagaagtctcctcttgctttaatgtcttctttaatgactcactgagtttaattagggtttcttacgtgggcatggatgcaggcttatttactagaacatgggcagcttattcatagctacatcacgtttaaaataatgactacttttgccatcaccaggagcccctaactgccagtaattcctcagccaagggtggatcttcatgaggttctaccctggtgaagacattctttctttttttttttaatttatttttatttttatttttatttttatttatttattatatgtaagtacactgtagctgtcttcagacactccagaagagggagtcagatctcattatggatggttgtgagccaccatgtggtttctgggatttgaactccagacctttggaagagcagtcgggtgctcttacccactgagccatctcaccagccccctggtgaagacattcttaataactctcttcactataaactcatctgcatgctacatcttttgagacatgtatatgctcatgcatgtgtgtgtgtgtttgtgtttataaatacagaccaaaatcaagatcttaaatatggtattcaagtgttctgccagttaatctcagatctcttttcaaaacttttttacttcaaatttgtatttatagtacatacatgtaacaggcctttccagagaggtacagcatagagggaaacattagtacctgggactgtctgtccagtactttgtagaacatctagaataactcttcctgctaaataacagcagcaaccatgttactgtgtaatacaactgtccctattagttgcttttctgttgctgtacaacaatagaaaagtttgtttccagatggttagggttcatggtagagacagcaggtggcacctatggtgcctggagcagttgttgagagttcataccttaaactgcaaacaggatgcaactgaaaccatacacggtggtctttgaaacctcaaagcttgccccccagtgatatatttcctccagcaaaaccaacctcctcagcctcctcaaacaggaccaccaaatgtttaccacatattcaaatgccaaagactcatggcagaagcatctcattcaaaccaccatactgactaaagactgcatcaggagcagcactgcccctcaaacaaatgtcaatcaaagtgaaccggagacctgactgggactgatgacattgtgatatgcctccaaggcactaatgagaaaagacattgcttgtagagatacttctctgtggtgaccccccatgtgctgatacatcacttagtcagccatgaagactacaactttctcctgatcaaagctgagtgtcagttctggtccaggtgacttacaactctggacttcgtattattgatcatcgtttccctttgaaatcattcctgcttcttttcatttttatatcaacctgctgtagattgaagaacctccccaaggtcagctactacattattccctttggggaaacaacaacaacaacaacagttaagattgccttgctggaagaatttgccctccagcagctggtaagcccaaggcctcagcgctcagcacagaggagcctcctcagtgaggtctatgtcagaggaggccaagagcccagccattgcttcagcttcctcctgggtatatccatggatgggtgtacttcagtcttccttaaacttctcaacaattccgttgggtagaaagaagctggaaaaaaaatgttcctgtgaggcccagatgtaaagagaacctgcaagagtgttgcagtagaataaaggatagttgaggtcacatgagcctgaagaaaagccatattatctcaagatctctaggcagccccggtatcgtagtcttatagtcctagctactaaaaagtttgagtccggaggcttccaagtttacagcttgtctagatagcagagtaaattcaagactatcccaggcagctggatgaagtccagtctcaagcaaaaataagttcacacccctgtctgccctgtctgtctgtaggtctctctctgtgtgtctgtctgtctgtctgtctctgtgtatctgttcatatgtttctttgtttctctcacacagacacataaatacacatatacacatatgtacatacatgtattagtacaagcacacatacacacatacacacatacatacatgcactcatgcacacacacacatactagagtcccttacacttgagggtgtccttgtggtttccctgtcattctctcctcttactaaatcccctacagagtcttcctatctctcccagtggtggcaggataagttaaggtttgctaactatgcttcaagacagactccccacctttggggtttggcacagactacaaagcgcctggcctgttgtgtctttctgaaggtccttactctctacacactgactcctggcttctggaaatcatggtgtggtacagggcagaaactgcctgagacacagataaactggcagctttgttgtactcatgcttgttagcagtggttgccagagcacctgaaacattctgggactctgggtggcttttgcttcttaaacagctccttaaaggcatcaggcagcaaacagggactgtgtgttgccaggaaagtccaaaaggatcatggtggctgttgtcagttactgtcatttggtcagggctgtatttttatttcgatgtatatttgcacagctaggaagtgcctgctgacaaggatgagatgataagttgagctggtgccaaagcaggactagaaaaacaggcttactcagagtgatgttctccattctgggaggtggcgttaaaaagattctctctccttgggcagaatcgtctgttaaaatattaactcctcaaaggatataaaccttggaatccctgccagataacagagtaagttctcaatagcttcttactggaagaaggaacccagacagtcatgtgcactatgagagaacccagaggtgacagcccaaaagaaaaaaatggctcgctgagtcagactgttgtgtctttttcttgcattcaaagccaaccaaaccaaaccaaaccactaccccgctcccccccccaaaaaaaaacctgtgctggccatagattctgttgaagttcaccacaagtgtgttttgttacacagtgcacagtagagagggaagggacaatgtgggctacctcccttggcacgaatccccaagctattagatggtactttctaagattttttgaacaagaaaggggttactgttgaataaaaccagtatcctgggtcataacagaaaaagacatagttcaaaatttcatcactcagtttggactaactgaggttagggtctgggcaggttctcagtccattcattctgtggtaaggcttctaggagacaagacagtgatatcggtgatgacacacagaatataagaggcagagccatggggagctcagctgaggtcagtgctgacaccggtccaccaaggcacacctccctgacacctgcaatgttcgagctaaccccatggccactagacacttacttcattttctgatggactccctctttctttgacaccggaatctaggcagaatctttgtcacatggaatctaggcagaacgtaatccaggcatttctctgtctttttaaagcaactcttaaaaatgtgctgtttgtcaatttcactgcagaagtgtaaaatgtaacagtttttaggaaacaacgtgtatatataactatatgtgtgtatataacttaacagttttataatgaacatacattacagtaatactggattcataagaaatatctaaaagtacagttttaacactagcaatgcctagcaataaggaaaaacacccactatggaagcacaagattcaggctacaaagcctataccaatttcttgtttcttgggcaattcattcattcattcattcattcatccactcatccactcattcactcattcattcattcctcaaaaatgatatgtatgaaacatattttttgtgcatgattttcaagaagttcaaatggtgatctaataaaaataaaaggctctataagcttgtgaacaagaacacagttcaggtggaccctggaatgcaccatggtatcaactgaggtgacaaccctcagggtttatctgtagcttcctggaaaaactgggtttcaaatgttacatgttatagtgcatggagggataaagagaaatccagtgaaacgcaggaagttgttaatttttttatagtaggggtgagggtccatcacagcttcagaatgtagaagcaattcactagattaacctggtggtaacttgcaaaaggataagaatatacatcccatataaatggctggttatactctcatacacaatgctgatttctgacatgagcagaagagtggatattctgggtaaagacaaatggcttcattagcttggaatgaggcaaggcaggattactctgggcctgagaagcttcacacgttgagctggatgatagctttatgagttgaaatatttgtcaacagtctacagtcacaccttattcaattagaccttcatgaaataaagataaaaaataagctaagaaataaattaaaaagagatagtgggttatggggctcagggggaaaactctttagtagacagaaatctctgcacttggatcccagcactaagaaagtctgcagtgggtttttaccaggagggtttgagatccccaacacaaaccagaaccttgaacatgcctttttctgtggatatttaatgcagttctcacccgtgtagctattggagaacaatgtaagaactcccatcaacaattcagccaagttggactgagttgtattaggaaacaggatgagtcaaaaaggatggactcttcaatctaccctgaccagcccaccaggaagctgctagtagaagcatgtcaagaatgcatatcgtataatgatcccccaacttttggtcctgtttatttttttgacctttacaattttaaaaagtatcccccttgtgattgtatattgtatttgtaacataaaaaaattcctattaaagaaatgaccttttgggtttttgtttttaaagaaataaaagaggataacattaaaaagtagatagagttcaaacttagtacagggcagtgtctggtattcagtgtccagaaaacaggcaatatggtcaaaagtgggacataatctgccaaggtaaacgagaacacacgagcatttaagaaaacaacaggtcagaaaaataaaggttgggactcacgttataatttatgcacagtttctttcttaagcccttacctgctttgtattcagtgcagtttctactatggatcaatgtgcctgtctgtgccagaagctctgagattctcctgagatacacaccaaccaatatttgggccagtcttgttctgttgtttttgtttgttttaaacatggccattttctactctgggcaactacagttgtgtcctgtgaactcctcctcaggatagatattttctttgttttcaaccctcaggttgtcacttaccacaacataagcatttatgtcagtgagtgataacaaaatatgaaaccgcactgctgtgttatcctaaccctgtggtaatccagcatcatgtgtgccctgtaaggctgtgtagttagaatagaggagcttatttccaccagagagggcaagtggagttgagagacgagctgagaccatcatgctccctcccgccttgccatcattctcagcattccttcccatagtcctcagtgctcctcatggcctccttgcttctctccatagagtagtccctaactcaggactactactggtcaggtgaaatgaacaacatgaacggctctgcccagcctgccttttgcagaggccatagaaggtcaagagaagacatgcttgcctgtcaggaaaaacagccgttcctaaagtcttctagccacacccatgtcatacactcttcagtaaagactgaaatatgtgtagacttatgttagtggaagcaaatatatgtagaagcaaaataacttccaccttaagcaattaccttctaatcacttagccaattattcataactgcttgtgaagcatattataatgtgtgtcttgtgtttcctggggaactgtctgcccatcgttaccagatatgggagttggcatactgagtgcagtctaagtatcccatcattccacttatgttctctttgtaagtagcacatctctctgtccctccaaggaagcaatgatggtttcctctcgagtttgtggtcagcattgaatgaacagttcgtgttgacattaaatctacccaagaaggaatgatcatgccaccattatggctgcaatatcaatagtcctttctagagaatcttggattagacacaagaggctatcctggcttcttgatgtggaaagatgtgcatattcatgataaatgtgcatattcatgataatctcttgtcaaatgtgtcaaacatgtccactgaattctcagtgatgtggaggtctcagagaaagctccctggcccatcatgtcatctccggaatgtttctgtctccaagaccatatcctttatgaatctttctctctccctgtgtattcaggagtgtacacgtttctgtccagcaccttgaagtctctggaagagaaggaccacatccaccgtgtcctggacaagatcacagacactttgatccacctgatggccaaagctggcctgactctgcagcagcagcatcgccgcctagctcagctccttctcattctttcccatatccggcacatgaggtaaggcagccctgggttctgcagtagagataaacgatgtagacccaaccaactctgtatgatagccaaagcagggcaggccgctgagtaggcaaagtaactttggaaaaatgtctgaccaaaaaggctagaggaggacagaagagagagtagagaacctgcatgaagcattagataagcatcagggagagtaccctcgaggaaggcatacgcactggtgatttgaaatacatgcaaggaaaagaggcatatcaatcaaagggtattgccaagcataagcaatctctcacggcttcaggctcatctgttatggttctgacaatactccctactgacctacaccagggaatgctgaatgatagagccctggacttagaaaaaaactcatgcagagtcaacattgatgcatcccaagatatgggagccttcctgtgacctcctttgtccttactctaacctatcacctaacgtgctccttagtctcagtctcttctattgcatcccaatgaagcacccagagagctcactttgaaatcaatcaaaatcatattctctccctacttaatctttacaggggtttcctattgcttttcaattaaagcatgccaccctttgctttgtttgtgttattccttgtaacacagtcctttgtgattatctttctgggtgtccttcataactgaagccatgccatagcagctattcctcaagtcatttatgtagcaccactgctggctgcagattgcctgggtgtccactgagggtctcagctgggctcacttgtacatctctgtgacacaggtagcaggcctgcgtcaagccccagccatggttctgcttcatgtataccattcttcttgaaccccagcttaacaaggacatattctagtatcaacagaggcataggaaagccaggccatttgagccagcttaatgctttggttatgtcatgtttgataatgttctatcatctaatcaagataatgtggtaagtaccaaatgctagatagtggacaaatatgtgatcccatgcaagggaagcatgccctcttttgctcgtctctttcttctgatggtagcctagagaaggcagcagagactagctcagaagatcatagtgctgccaaaatacctgcctgagagtaagtttccccctgaagaaaacaaatgacatatcctttgagggatttatagaaagcacatggccgggcagtggtggcacacgcctttaatcccagcactcaggaggcagaggcaggtggatttctgagttcgaggccagcctggtctacaaagtgagttccaggacagcctgggctacacagagaaaccctgagtgttttgagttgttgatacggtttctatgagtttacaaacccattatttgcttggcttatcaatattagcaagcgataaacaccagccatagctgcttttactgacaatgtattgcagaggggatggcatgacagaaaactttgcaattgtgaaatatgaaggagaggcgaccattttatacaaaggtctgaacctctctgaactctctcagtgtaactcatacacactcacatgcctatccaaaatactctctttgtccagactgactccctgcagccaatctgaatcataggattcttgtgttgttagcatggccctaatcatgagttagggtcatagcatagataatttaacattttcagatttcagatttcatctgactataaatgtgattccttagatggttggagaaagacaatgacagagtcagagaattaaacatgaatggtgctttaaattcaaaggtaaaacaaaaccaaccaaaaccaaaaccaaacaaaacacacacacacacacacacctaaaaaacaaaataacacttaaacatgtgattgagtttggatttcagttcttgatggttctcatatgttcatgacactgatcaaacctgggctggcttgttaccaccactgacataaatattattaggacagtttcttagtcctgcctgttcatgatatacatagctgtagtctagtttattttattctgattttggttattttgagatgagttctcactgtgcagttgaggctagcctagaaaacaccaaccgacctaggctagctttgaatttaaaatgtttaccatacactactcccaagtactaggattacatatgtgctccatcacacacagagacattcttatcattaaaaaaatcaatccatggaagagttatgatttcctgccttcgctgcccacatgacagagaggcaaggaggaacaaggaactaaggagaaagcagaaaagccatttgcctgcatccttctctccccactttcttccctgtttcctcttgtgggcagaatctcctgttctgggcattggcagaagttagggccatgtggaaggaaactcctgagtgacagggactgaaccattgtcatggagcaacagaggacttttggtcacaagaggcatccgaagattccatggaaattcatcctggaaaagacaacagaatgtcagattctctagatatctacaggtctttcttcatttcattaaggagcaaatcaaagaccagtgactgagagtcagtgcaggatgacatccatggtcctctgtgagaaagatgaaggcatgtctaggcttcagagagcctacatagaaattttgatttttaacttctgaatattataggaagccattgaaaaactcaggcaaggagcccagcccatagaatgatgtcttcaacattagggtgggtcttccaaccctaattaatgtaatctagaaacggtcgtgtagacatccacagatatctagagcttgtcaagttgacattcaacattggttacatcacagagaggaaaatgcatggaaaacccactaaacgaatttggtggaaaagtatgattgtgggggtggggtattcttataggatggaggaaatgaaaatacgtggacacaagtcccagccccagccccttaaggggtctctgaagcccctaagattctacagctgtcatctttaaatgaattcttaataggtttaaaaaatgactcccaagtgcctttggagttgctcatcctccctcctcctaagaatttcagccgtcctgggggttcagccatgatctaacatagttctctgtgttccttctcctccagtaacaaaggcatggagcatctctacaacatgaaatgcaagaacgttgtgcccctctatgacctgctcctggagatgttggatgcccaccgccttcatgccccagccagtcgcatgggagtgcccccagaggagcccagccagacccagctggccaccaccagctccacttcagcacattccttacaaacctactacatacccccggaagcagagggcttccccaacacgatctgagagctcccaggctccccgaaaggttctgagaatccctgcaacattttacccatgtcatgtatgactagcagaattctgtctcctgcgtacactgtggcatgcatccaccaccagtggctttctagtatgagtggccatttatttgcttgctcagttcttagtggcatgtcttctgttgggaacaggcaaaagggattccagggctaaatcttggtaacagctctctttctccctttgctacgtcactaactatgaggattcctatagtcttcagtcttcatgaatgaattgagataactgcattgaagctacttgttgagacccaagcctagagagtaaacatttcacctctgataagcacttcataatggctccaagaggaagcctcagcaaagacttcaaagtggctcctttaattgaagtcgttgacaaagcgatctcatggcttcctaatagcacccgcttgcattcctatagcaacatgtgactttattaaagggaaatcttgagcccctataggaatatgtgatgcacacagaaaaggaagatgcccccagttgtcaagaccatgtcaactcaatacagtcaaccttttcacttcttaaagtgtcagctgccgagtattatatacatggtgggttctagacaattcttgcttcccatgacttgtgggaaacagaaagtctatttcagttaataccctggaatgaattagtctccttcatgagggctgtagggtgtgttgattttaatttgatttcattttataatagtcttctgcccctggggcttgcagtaaaggcagcttgaggacctgttctggtaaactggacattcttcagcacaggatgctagccttgtctcttccctgatgtcaattgccctaaattgttaccatgtagattgatcaagggcagtcacaatgaacctgcaagctggtgacaattttttggtttgtttagttttattcttgggggcagggaacaagtaatgtatgggcaatgactgtgactcggaggagtctaagaaggaaagtaagggagaaatgtggagaatgacctggccagggcagcagcttcccagaggtgcacctcacagatcccaccatgcacagtgaggctgctctgggatccatgggctgacttcacttacatttcaggtatgagcctgattggaagaggtgacatcagatacctgtgttcctgtagatgctccaggaacttggggaaaggcatgggggcaagatcttggagcactcatgactcaagctgttgagaagttgctcagactagactgtgcttgattattctgaactcatccaaaaaccagctagtgagatcttggggagaaaaatttcttcctcaacacagttcatgatcttaaattttgtaaactagaaatgatgaatgaccagaattgggtcatgagagtcctttgaacaaggggataaaaaggaagacttactctatccacagccacccaagacctctggggtcttggtctctctagtacaactaaggattacttccttttccaaaccaaaatgaaagttcagtttccatcccggacttcatgatctataatttgaactccattgagatatgatgggttagccaaaacctaggtgaatggctaggcttctcttggcctgtactttttggaatggtgggttccattaatttctgctctcccagttaactgactatcaaagatgtggaaactgggagagccaatttttcttcttattttttttaaatttctcatacttgttcatcaaattcaaggacaattttatgtatatgctttaagaacatgtttaagaacctaactcttttgtttgtgtttaagaagcaccttatatagtataatatatatttttgttgaagtttaattgcttgtttattggacaattgaatgtaatagttatgttctgagttttaatttgattgggtttaacactgcaaaagccaaggggaaaatatttagtttgttttttttttttttttttgtagacgtttcaaactaccgtgtcatgtatgcagttattaatgcctaaagccttgtgattttcatttaaatgaagatcacatttcgtatcaacttttgtatccacagtagacaaaatagaaggaatccacatgcctattgctgggtgttgaatgacagacaatcttatgtagcagagattatgcctgggaaggaaaattattcagggcagctaattttgcttttaccaaaatatctgtagtaatatttttggacagtagctaatgggtcagtgggttctttttaatgtttatactgagatttttcttttacaaaaataaaaacaaaaattaaaaaaaaaaaccttctaggactttagatgatgtaataccagctaaatccaaacaatactctagggagggttttacattatcccatctactgtgtttgtattcatgctatgataataagtttgaaatgggcaaagaacatcagacagctgaagtgttagcccacaagtttcaaacaatgtttggaaatctctttttacccttaactgaagtgccaattttgagcagctgacatctttcagctgctatcgtgttggagcattggggacatgctagagaggcttaattgtactttaccctcacctggaggtaatttaaaatttgaatgtcacaatctactcaaagagtcagcatgaggtgggtagggagatatgggaatttgaataacaggtggggaaataggaatagagagtttaggaattatcctggcatcctgagtacgccccaggtttcagaagttcacttctgtctgcactgtaataaagtaatactagctctactggcagccatttccaaaatggcaatttgagttccaaggaagagagtagcggcaacagtgaaatccaaagaaaaatctagcatggggtctgcctaagtttcttttagccattgcttaccttgccaatttgattctggtcatccaaagaaaagatgctatcaatgtaggtgacaatgtctagaccccaaggaagttgtgtctttgacagatttccctggtaacattggagatatgactttccatgccatatcttatgcctttggggctgaacaaataagcgacttactgataatttctttttaatcacatgtcgtgttcatactttgaagtcatacattgaaaggtcattgtccagccattggtttggagttacccatacacctgcatgaagttgattacaagtctctttctactcatactttgcaactctgagatttactgtggatactgagaatgatcactaggaccatagtaatgtctaatattcacagtcagacctgcttagggaacctaagtcttttaaaggcaaatagagtcatacagtagcacataaggcaaccatgactctctttggtacaggtctttggaggttgatccagcttacactgcacacatcctagattaactccatgaaaatttactctcttgcaaatggagcaaacacatttaactgtggtcccaaatatccatcttttcattagtgtgaatatgctctatttctagcttcatagcctatccatttaaattaaagtgtggtctcttttaaagtcctttagacttgctttctaagtgattatgtctcaatttttgcactgtgcttcggagacttaagagaaatttcccctttcttttacatccgaatgtgcctgaactttttcaaatatgtaaatgctaccatgttccaaacccatctttagtgtctttgtatggagctgtgcaccctggaaataacacagagtcccaggagcaggtgcctgagacatggacccctttgtagtcacagagaggtcattggtcgtcgagacttgaattaataagtgacatcacgccagtttattttccttcacagcgtacaaacaacgctttctgtgcactacatattcttcagtgtagagttcttgtttttcggggagaggcacagatgccccattgtgttggatggattactacaggcttctgatgcacactgctattgatgtgaccccgtttcatcgccgctttgctttgtttaatgaaacacacgtgtatgcctcttttgcaccttgaaatggtaaagaatccagtgggatgctcaagcccctgtaaaccatcttctcagcatattcaatgttcaaataaaaaataaaataaaggcagtaggttgtgttattattattattattattattattattattattatttaatgccctgtttcttgctgatagttcattgccaaacaaatgaaagccaagagatctgtagagatacagggagcctaaatgccaagacctccccatttaccaggtaccaagttaagaggtagggatactcatattagagtgactcagccttagtttcagtctccgtaataggcaagctttaggatgattgtcagttaatcaacacttagtttgcatggaatggttgtgagggtcatgtcaggtactcatttaaagagagcttcagatgacttattatagttagctgaatgtatggatgcatgttttagcatggcactaattaccctaaaaatttcccccctactccaaaggcaagttgaggttcctgtcttatggttttatgataccctttccttctcagagctcccagcaatatccttttcctaagccatctctatgatttagctgatgtaagggtaagaggagattgttggtattctgtctggactccacccccacaggatacctggcaacagacaggtatgcccctccccacggttacctggcaatagccaggtaggagtgatactataaagggggctacttggccctgccccgtctcaaatgttttgggttgaatatttatttatcttgctgatcaattactcaacccctatttgtctgaagtgtggatatagagacatgtctttctgcaccaacacatatatgcatgtgannnnnnnnnnnnnnnnnnnnnnnnnnnnnnnnnnnnnnnnnnnnnnnnnnnnnnnnnnnnnnnnnnnnnnnnnnnnnnnnnnnnnnnnnnnnnnnnnnnnnnnnnnnnnnnnnnnnnnnnnnnnnnnnnnnnnnnnnnnnnnnnnnnnnnnnnnnnnnnnnnnnnnnnnnnnnnnnnnnnnnnnnnnnnnnnnnnnnnnnnnnnnnnnnnnnnnnnnnnnnnnnnnnnnnnnnnnnnnnnnnnnnnnnnnnnnnnnnnnnnnnnnnnnnnnnnnnnnnnnnnnnnnnnnnnnnnnnnnnnnnnnnnnnnnnnnnnnnnnnnnnnnnnnnnnnnnnnnnnnnnnnnnnnnnnnnnnnnnnnnnnnnnnnnnnnnnnnnnnnnnnnnnnnnnnnnnnnnnnnnnnnnnnnnnnnnnnnnnnnnnnnnnnnnnnnnnnnnnnnnnnnnnnnnnnnnnnnnnnnnnnnnnnnnnnnnnnnnnnnnnnnnnnnnnnnnnnnnnnnnnnnnnacacaacatcatgtacaaacacacgctgcagctagcttgcctaattgaaatccttattcttagggttttacatttatacttaaaacaaattctgtgttcccagtttcttgagttgtatactgggaatcagcccactctgcattgctatgacaaaacccttgaggccaagtaaccaacgcagtaaagttcacttaagccctgaaagctgagaatctaagcagtgtggcagaagctgggacaaaaacatcatggcagatgactggcagatgacaccatagtagaagcaaggacaagaaggatcacagggttagctggagccagagagcttggagaggcccgttttgctccattataaaccatcctgccagggaactacctgggatcccttgagaaccacacccgtgcctcataagatcacttgtcacttcccctgatcagcagtgttttgaatctttggcaatctgtgggacagtactgtcttctaatagggtatgtgaaggtggtaatgcctgggtccaggactcattctgctcacacactggctcaggaccaattcccaaggtactttcttaagctttgatggtcatttaagctcaggattgccatacttagattttatttttttcagaaaatatagaatgtatgactcgggcaaggcaacatgcccatggttttcactatttgtgacactgtgtgtgaggtaaggaattactttcaagatcacgtgcatggtaacttgcaatgtgatgtgctgtggttactgcagaatgaggagggataagaacaagggatgatgtccattcaagatgagacagatcatctaatagaactatctacatgttgtctgggatgcctggtggaaggaacgggtgggggcaactccctgtcataggaggcaatttgcatgggacagacagcatctaagcaaagcacaatgggaagaaagtctttcacattggaaacacatctgatgctcctttctagcctgagaataaatgaacgcacactttcctacactgaggctccagttgtgtgcttcactctgcttcttggccctctttacagctctctcccagcaatgaaaatagttgtccttactttacaggtgagaaacccaaggcttttcacagttgtgtgactttcccagagttgcagatctagtgaatggcagatgtgggatgactctttttgcatttaacacctgnnnnnnnnnnnnnnnnnnnnnnnnnnnnnnnnnnnnnnnnnnnnnnnnnnnnnnnnnnnnnnnnnnnnnnnnnnnnnnnnnnnnnnnnnnnnnnnnnnnnnnnnnnnnnnnnnnnnnnnnnnnnnnnnnnnnnnnnnnnnnnnnnnnnnnnnnnnnnnnnnnnnnnnnnnnnnnnnnnnnnnnnnnnnnnnnnnnnnnnnnnnnnnnnnnnnnnnnnnnnnnnnnnnnnnnnnnnnnnnnnnnnnnnnnnnnnnnnnnnnnnnnnnnnnnnnnnnnnnnnnnnnnnnnnnnnnnnnnnnnnnnnnnnnnnnnnnnnnnnnnnnnnnnnnnnnnnnnnnnnnnnnnnnnnnnnnnnnnnnnnnnnnnnnnnnnnnnnnnnnnnnnnnnnnnnnnnnnnnnnnnnnnnnnnnnnnnnnnnnnnnnnnnnnnnnnnnnnnnnnnnnnnnnnnnnnnnnnnnnnnnnnnnnnnnnnnnnnnnnnnnnnnnnnnnnnnnnnnnnnnnnnnnnnnnnnnnnnnnnnnnnnnnnnnnnnnnnnnnnnnnnnnnnnnnnnnnnnnnnnnnnnnnnnnnnnnnnnnnnnnnnnnnnnnnnnnnnnnnnnnnnnnnnnnnnnnnnnnnnnnnnnnnnnnnnnnnnnnnnnnnnnnnnnnnnnnnnnnnnnnnnnnnnnnnnnnnnnnnnnnnnnnnnnnnnnnnnnnnnnnnnnnnnnnnnnnnnnnnnnnnnnnnnnnnnnnnnnnnnnnnnnnnnnnnnnnnnnnnnnnnnnnnnnnnnnnnnnnnnnnnnnnnnnnnnnnnnnnnnnnnnnnnnnnnnnnnnnnnnnnnnnnnnnnnnnnnnnnnnnnnnnnnnnntatttagggtgtcactactttttggattcagagattatctctggtgtcttcctgtctgcccttgggaaagcaacaggtgaccaaatagtcaccaagtagtttctggtctggtggactgggaggagctgtctcctagaccttgaagagagggttaaggcttcttgtcacatcaatgcctctttcagaatgtgtgtgtcagtctcagggccaggctcagcggtcctgtctaagactacctcctcctatctgctggctcaggatccagccatggctaagccattggacacctgtgtagcacttacaatacaatctcttgtaggagactacgaagaaagaggatgaaggcaaaggcagcatgtggcaaacatttccttaagaatgaaagtgggggcgatagcatcagtggtccagtcaggctgggagcaaggaaagcggcaccaagtatccaactctgggcctttgccaagtggcagctatctgcacactgagggacagatagggatctggggactgtgtgaatacaccctgtgctcttaggcttctgctatacaacctgtcatcagctgccttttcattgagacatcaacgattctgggcatagccagcgaaaggtttgtgagctggtaaacggttttatgggctgatggagttctcaaattagattcagactcagcggagttgaaagctgtaaaatgctcagagtatttccacatttacaagcagaaagaacatgactgagtacctagggccacagaccacaggctgatggaaggaagacaggcaaacgcatgcatgctgtcagcagcaggtctgcaggggctgggtcacctctgcagggagcccttccctttgggatgcctgaagtaggccggcctctgaggcttggtcataacttggcaagcatttatttttgttaatgtagagaaaggttaaggtgccaaatggagattatatttctttttaagttttgcatctgtgtgtgtgtgtatgtgtgtgtgtgtgtgtagggtacacttgcagtatatcccagtatgagcctgtggaggacaaaggttagatttgggtgttgttcctcataagggtcaaccatcttgcttccgagtccacatctcactggcatctggaactcagaactccagactaggctggcttgccagtgaggccaaggtgtctgtctgcctctgccttgctattnnnnnnnnnnnnnnnnnnnnnnnnnnnnnnnnnnnnnnnnnnnnnnnnnnnnnnnnnnnnnnnnnnnnnnnnnnnnnnnnnnnnnnnnnnnnnnnnnnnnnnnnnnnnnnnnnnnnnnnnnnnnnnnnnnnnnnnnnnnnnnnnnnnnnnnnnnnnnnnnnnnnnnnnnnnnnnnnnnnnnnnnnnnnnnnnnnnnnnnnnnnnnnnnnnnnnnnnnnnnnnnnnnnnnnnnnnnnnnnnnnnnnnnnnnnnnnnnnnnnnnnnnnnnnnnnnnnnnnnnnnnnnnnnnnnnnnnnnnnnnnnnnnnnnnnnnnnnnnnnnnnnnnnnnnnnnnnnnnnnnnnnnnnnnnnnnnnnnnnnnnnnnnnnnnnnnnnnnnnnnnnnnnnnnnnnnnnnnnnnnnnnnnncacacttgtaatactaatcatttttttaaagaaaaatctacaaggctggaaagagccagtgtcccccagttctcattatcaaaatcaatctgaaaccaaaggaaacccgaatgcaactcaaggtcttcaccagatgcattaatgcattcacccctcagaacaaaccacaagtgtcccactacagaggaggaggccagggagcagaaaggctaagtcacttgttgaccgcatgaccaggaaggctctgggcttcagggctataggtggcactttctcggaatcttggccaaggcaggctttctcaaaatctaaatcatttgttccccagtcagttccttcactctggttagggtgaggcctgtggagttatggaggcagtcatgaggagagtgtgcatcagccatcagagaaggaccagaacccaaggctaaagcgggttgaatgtgtagtgcctgtgtccggaaagaaaggcaccaggaaaggctttggtaggacttctgggccacttccaaacatctctgctccttcccctttgatcgctctggggcttgggggtatcccctgtctttgatggcttgatttcaccttctagcagccaagtttgtttgggagggagggtggttagaagttccagggttttgcccaggtgacatctcgtccaggtcacttcttcttcaggggttcagtggttggcaagccttcctgtcccaaatccaccctttccacccgctttgggccaacacttgaaaccaaccgagcatccaagcattctggtgagcacctggaactattgttaggattctgagttgtttcgttttgttttgttttgtgttgtttgagacagggtttctctgcatagcttcaggtgtcctgtaagtttctctgtagtccagggtggcctgaaactcacagagattcacctgcctctgcctctgctcccaagtgctgggattaaaggagtacatcactaccacc

SEQ ID NO: 1203 - DNA, 2078 bp, Mus musculus
atcacacaccgcgccactcgatcattcgagcacattccttccttccgtcttactgtctcagcccttgacttctacaaacccatggaacatttctggaaagacgctcttgaaccagcagggtggcccacgcgctgctgagccctctgcgtgcgcggggagccagtctgtaactcgccggctgccacttaccatgaccatgacccttcacaccaaagcctcgggaatggccttgctgcaccagatccaagggaacgagctggagcccctcaaccgcccgcagctcaagatgcccatggagagggccctgggcgaggtatacgtggacaacagcaagcccactgtgttcaactaccccgagggcgccgcctacgagttcaacgccgccgccgccgccgccgccgccgcctcggcgccggtctacggccagtcgggcatcgcctacggccccgggtcggaggcggccgccttcagtgccaacagcctgggggctttcccccagctcaacagcgtgtcgcctagcccgctgatgctgctgcacccgccgccgcagctgtctcctttcctgcacccgcacggccagcaggtgccctactacctggagaacgagcccagcgcctacgccgtgcgcgacaccggccctcccgccttctacaggtctaattctgacaatcgacgccagaatggccgagagagactgtccagcagtaacgagaaaggaaacatgatcatggagtctgccaaggagactcgctactgtgccgtgtgcaatgactatgcctctggctaccattatggggtctggtcctgcgaaggctgcaaggctttctttaagagaagcattcaaggacacaatgactacatgtgtccagctacaaaccaatgcaccattgacaagaaccggaggaagagttgccaggcctgtcggctgcgcaagtgttacgaagtgggcatgatgaaaggcggcatacggaaagaccgccgaggagggagaatgttgaagcacaagcgtcagagagatgacttggaaggccgaaatgaaatgggtgcttcaggagacatgagggctgccaacctttggccaagccctcttgtgattaagcacactaagaagaatagccctgccttgtccttgacagctgaccagatggtcagtgccttgttggatgctgaaccgcccatgatctattctgaatatgatccttctagacccttcagtgaagcctcaatgatgggcttattgaccaacctagcagatagggagctggttcatatgatcaactgggcaaagagagtgccaggctttggggacttgaatctccatgatcaggtccaccttctcgagtgtgcctggctggagattctgatgattggtctcgtctggcgctccatggaacacccggggaagctcctgtttgctcctaacttgctcctggacaggaatcaaggtaaatgtgtggaaggcatggtggagatctttgacatgttgcttgctacgtcaagtcggttccgcatgatgaacctgcagggtgaagagtttgtgtgcctcaaatccatcattttgcttaattccggagtgtacacgtttctgtccagcaccttgaagtctctggaagagaaggaccacatccaccgtgtcctggacaagatcacagacactttgatccacctgatggccaaagctggcctgactctgcagcagcagcatcgccgcctagctcagctccttctcattctttcccatatccggcacatgagtaacaaaggcatggagcatctctacaacatgaaatgcaagaacgttgtgcccctctatgacctgctcctggagatgttggatgcccaccgccttcatgccccagccagtcgcatgggagtgcccccagaggagcccagccagacccagctggccaccaccagctccacttcagcacattccttacaaacctactacatacccccggaagcagagggcttccccaacacgatctgagagctcccaggctccccgaaaggttctgagaatccctgcaacattttacccatgtcatgtatgactagcagaattctgtctcctgcgt

SEQ ID NO: 1204 - protein, 599 aa, Mus musculus
MTMTLHTKASGMALLHQIQGNELEPLNRPQLKMPMERALGEVYVDNSKPTVFNYPEGAAYEFNAAAAAAAAASAPVYGQSGIAYGPGSEAAAFSANSLGAFPQLNSVSPSPLMLLHPPPQLSPFLHPHGQQVPYYLENEPSAYAVRDTGPPAFYRSNSDNRRQNGRERLSSSNEKGNMIMESAKETRYCAVCNDYASGYHYGVWSCEGCKAFFKRSIQGHNDYMCPATNQCTIDKNRRKSCQACRLRKCYEVGMMKGGIRKDRRGGRMLKHKRQRDDLEGRNEMGASGDMRAANLWPSPLVIKHTKKNSPALSLTADQMVSALLDAEPPMIYSEYDPSRPFSEASMMGLLTNLADRELVHMINWAKRVPGFGDLNLHDQVHLLECAWLEILMIGLVWRSMEHPGKLLFAPNLLLDRNQGKCVEGMVEIFDMLLATSSRFRMMNLQGEEFVCLKSIILLNSGVYTFLSSTLKSLEEKDHIHRVLDKITDTLIHLMAKAGLTLQQQHRRLAQLLLILSHIRHMSNKGMEHLYNMKCKNVVPLYDLLLEMLDAHRLHAPASRMGVPPEEPSQTQLATTSSTSAHSLQTYYIPPEAEGFPNTI

SEQ ID NO: 1205 - DNA, 316022 bp, Homo sapiens
tgatttgactgctgttgaatatgttccatgacatccataagtctaccttcaggcattgcttgtgcttgtttattacatatgattaattgcttacataagaacaatgatgatccctgcagggggaggagggatgtgaagaacaacttacttaggcattccaggggctaacaagggatggtttgatacagctcattcttgttttgaatcttcatgcctcttgagaaagaaaggagcagaatatgctttgcatggcgctatgtcctcccaggtcctatgttttcttttttgtattttatcagttctctacgtaaggattttctcagtttaatataatttccatttttaaaattcaaatacctacatatgaggtgggaaaggaaattaatcagatgcattcctataaactgcagacttaaattaagaccttgagcaaactggcattttgatgacttgaggattcagtgggtgggacagttgtacatcttgaactctgggtacactgccgaaagcgaggcctgagaaggctgtgttgaggaaggagtgtcagtgactgagcctgttggaaagggaggctgagagagatgaggacacatacgtaagggagaacacattggctggccaggtgtttttttttctgctgtgggttttgattagaattctgggtctcattaagtgacccatgttgaatagagattggatagggctggcttggaaagccctcagtgaagagatgaactcgacagcatgataaggaagtagatgcaaattcaggacaggaaatggagaagggcagggtgagaaaagggaacaaatttacaatttgtgccattagccatttattagaatttggtataagaatttgtggaattattgtttccttctggatttatggtacaaaaacctactgacaagtgtcactaaaagtgatgtctttattcaattatcaaccaaaagttttacactaaattcttttgagtctttgaatgtttatgttatttccaataatctttccagttcttttaaaaggctgatttttaggaaggctagcactttttgatcacagaatagtttccccaatgagtatgatagcttcaatatctttcaaattagattcttttggaaattgaactgtgtcaaatcaaataaaacaagtagggttttttgctgttattgttgaaggtattatatttgcaagtttgtacaatttagcagatataggaaaggtctaatttttttctttagctagaatgttcagttcaaattatacagatataagcatgagacctaaatgaactctcttctgatgagtaatgaatggaaggtagattactcatttcttcatgttcaaaaaacaaattatgtctctgaacacagttgtttcaatgtttttaacttatgttctcaagctcttcccatttctttatcagtgatttgggaatgtgaaggcagtcttgttgtagtttccaaagatttaggcatttttgagactctaagaatagttcattaagccaccaattagtcccttaattttatttaagctgagcaagcaaggcccacactaaaagtcagaagaatgcggcatctacccagagaggctgagggtgggatagaaagaaggaggcactccaagtttggagacacagattctattccagttcctcaagctgcatgaccttcagcaagtctcctgtgttgttcaggaccccagtttctttataagtgcaatgaagagtttggactcaacaacttataaagaaacattcattctaattgtctattgtgtgaaaagaatgtgagttgttctagaaaatatgaatctgctccccaattgtcctccaagctctggttctaaatttcagttattatagttacttctttcgaggtaaatcattgaggaagtcagttaatgcagagatgatgtctggaaggagtttacaagttcattgttcaaatagtatttgttgggggccaactacaactacacatcagggattgtgctcacattggactagtgtctttggaaaacagagtccttgtgtgccctttttgaatttacaggccaacttggggaagcagagagacaaataggaaatccaacagcatgataagtagtataatgagaatgtttagggagatacgagcatttataggagtagcactcaataggaaatcaaggaaggcttcctggtggctatgatgtctcaagggagacttgaagcatgagtaggagtatgtcagatgaaaagggatgggaggaagatttcaggtagggtaatttgcatacgtgaatatttagacccagagaaagtccagagggactgaggaacttaaaagaaatccagtatgggaggagcatagtacctgttggggagggtggggactcttgataaatgaggatagtaattcaagttctttggctcttgagttacttttggacaagttgagcttcaagtagctagtacataggaggagcttaataaatatttattgaatgaatgaacatgtaagtaaaaatgtctaataggtacctggcaaagtggacttcctagtcaggaaagagaggttggttggagatttctattttgaaattttcaatgtatatatgaaagtaaaaacacaaggagtggttgtgatcatccaggagaaggtatgcagaggagggaagagggtctaggggctgaatcctggggtacccacacctgagaggagggagaggaagaggggctctcagaagagcctgagcaggaagggccattgtaataggactaaacactaagcccctgaagtcagctctctgggggcagaggtttttgttctgtttattttgggatgcctgctgttgaccagattatgctcccctacccacccaaattcacatattgaagccctaacactcaatgtgactgtatctggagatagggtctttgggaggtaattatggttaaatgatgttttaaggctgggaccctactctgataggactgtggccttataaaaagagctctctctttttctgtcctcctccttctacctcctccaggacccaccccaaccccacactgagaaaataaatcgctgttgtttaaatcacccagtctatggtattttgttacagtagcctgagctgaccaaaacagttctccgcacttagaaatggtcctggtaaatacagctaatcaatatttttttgagtgaattgaatgaatgagtcattcactggcatgcttataaatgcattactccctccacagtgtgattgtcattgagcaggttgggagaagggaggagctctcgcaaacatggaagtcctgggtgcttagggagaatgggaaggtgccgtggtcacaaaatcggaagaaagagctgaaaggctgaaaggctgaaaatgctaaactgctcaaatctcctctgtctttttttaaaaaaaatcatttggctaggctggctctgaaattggggatggttcttggttgattatgtggtgtgtgtgtgtgtgtgtgtgtgtgtgtgtgtaaaggcccttcttaacattagataggactatctgaatctaagtgaatttaggcacaatctagatattgctcttcatagagaaataatactctaagctggcaatgaaattcctcaagtaaacaacagataaagggaaggagagggacacagtgtaacaataattggaataattggaattcttgtatcactcatggcacttacagtgaaagtactttctacattgtcttctattacatgcaacataggtacattatataaaaagatcctaaaatattgttaaaagaaattttcccagaaaatgtaagataaaagttactaaattctattaagcttgcaagttaaatccaaatcattcattgactcataatcaagaacagtcatgctgcctgacaaccaaaaaattcaaactgtcttcatcaagtcctgggtgggaagccaggaaatgggatctgagatcacaggctttgtgagagtcagggtctttggcgtgattcttggtcacaaatcatgcatttttttccttggagagatagtgggaaagaaaaggctgtttaaaaacatgttaaagaatactgattccatttgacttcttgttaatgtgtacccttgcagacttgggtaaaacttgatcatgttaaaagccattgtacttaaagattcatgactagagtgttaggacaattctgtggccttgggggtcccattgcagcaagaagagtctgactgagaagaggatagctccgtcctttgatgcctagtaacctgcatgcccagcactttgctggctgggccattggtaggaaatgcggtacatgcacttcaatctgtaagagatcatggtccatagagatcatagatttattttgccacctggcccagatggtgatagaagtcaggacaatggttgcctagaggggttgggagtttattagaatgggacacaaagggaaatttctggggtgatggaaatactctatactttcattgggatgattgttacatggacatatccatctgtcaaattcatcaaatggtatgctttagatacatgtatttcattgtatataaattttgcctcaagaaacaaaaactcaaggtcaggtgaaaaaagtccaggagctaatcaaaaacccttaaaataagtgaccaaactatttgtgaaaatgagcagaaacttaaagggaaattctttgttatttttccacattagaggaaaattgatggtatcagataaatgctcaaaaataagcttccaaacagagcatttataatcagtacaataataagtttgaacacagacaaaccttcatgtctcagagtgaaggaaccatttctagtagtataagctattacggagatagttccacatttattttctttcatgtttcttttggaggaataatgtttttgtaaatgtaaaatgcttttaatggagctagagaagaagctatgtttggtcatagtattatctgcttgcgaactaaaaattcagagctctcttgtgaatcatgctgccaagaattgcagacttaagcctcaagattgtacgaatttaaattttgactttatggcctcagttggcatgaagatacaaagataatcttctagcaaaaacagttttgaaagaccgggcgtgatggctcatgcctataatcccagcactttgggaggttgaggcaggtggatcacctgtggtcaggagttcaggaccagcctggccaacatggtgaaatcctgtctcaactaaacatacaaaaaaattagctgggtgtggtggcggacacctgtaatcccagctacttagggaggctgaggcaggagaatcgcttgaacccaggaggcagaggttgcagtgagccgagatcacaccagtgtactccagcctgggtgacaaaagtgaaactctgtctcaaaaaaaaaaaaaaatggtagaatgtcacatggaaagttaacttttagagatagtaatccagacacctataatattacattgtccttttaagtatctatatcaataaattaaccaacatttgttgacttaacatggccagggacagtgctgggttctcataattcccaagtaattctagccagaccttgtcctcaaggagcttatgagcagcatgaggagataaaaaacagataaataactctaattcaggaagaatttgataaatgcatgataactactactagaattcagaggagaggaaattttctttgaatagagactaaaggaaggaataatgaatgtggtagcatttgggctggacctattacaagaggcatgctttcccctgacaagccaagaaagtggggatttaaggtagaagaaaagaaaagccttgagttcttggagtattaaaattttgcttggctgaagcataggttacagtcggaggagatggactaggaaggatcgttatgggcagagaggaagccctgaactcatgggggaagctatgatttgggttaaagacagagctgggtcatgtcaagatggatcctgaagcagtaaaaaaaaatccaagaaagtaaacaggttgcagggtttaggatgaagtccgggaggaaagggcagagtggtccttaggaggccgttaggacaggtaaggtaatgggtctcaaagggagtggccgaaatgcaatggaaaaagagagattgtaaagctagaaggcttaggaattgcctcttgattaggtgtggaaggcaagggaaaatcagccctcgaagaagacagtgagattttaatctgggtggctggagagacagtgatgctgggcacagacacggggaagttgagaggaacaccatgtttgagaatggtgactcatatttgaacaagcctgcaatgcccagcagaccgctggaaaagtggggctggagacacattcaacggaggagccagatcaatctttacccttcttcacctgagagagccagtaagtcacggctggaacgtgtgtgtccagcaggagagggtagggagggaagccaagagagctgggagcccaagagtgaagtttttgccaaaggcagaagaggaaagtcggcgtagcacagtatactttcccacccatgctcaccaagcccagggacaaggctcaccaagatgagtttggaagagaatgctggagagaaagtggttaagaaaactgcctttactgaacttcttgggctaactttgattgtaagtctctgaacaatcaaagcctgtgaggagacagccaaccttcttattcttcctatgtcaatagtgaacaattgcagatcccctttcctttccttctcctttcccctgttcctctctcctccctccctgaatactcttgcttttttctgggactggtctagagcatgggtggccattgttgacctacaggaggcaccactgtcaccaacaaagggtaacagtctttcttttcaatatttatttatatccagtatttattttcaatactgactatggagagagctctcctgtgctcaaacactgcaatactgggggtctttcaaagcacaaaaacatatatttgcatgatggcatcattaacatttttatggctttctatttcttttttgtactggtctcaagagccactcataaatctctcagtaactgcatagtgtcccagggccagagaccggccactcctggcattgtgattagagtcatttaatatccaaggtggtgactaatgtctggcaacaaagcctccattgggtgtcatgtgtcctgggaccctgagcgtgggcactctaggagcacctcagtattgcgtgttagtactatggccgagagaatagttgagaaagtggtcaagaggtggatccatgtgaacgccactgggaaatgagagacctcgttcccaatcacggtcagtgcaactcgaaagcctaaaatcagtttaaaacaaaggtatctacctttatcttatgttcatatcctaggcttttaataatacgtatttttcacatgtttacagaaagcagtcaactgagctattcatggaaaggtttgtgggtttggttaacgaagtggaggagtattacatttcagctggaaacacatccctagaatgccaaaacatttattccaaagtctggtttcctggtgcaatcggaggcatggcaatgcctctgttcagagactgggggctagggccagtaaggcatttgatccacatgtatcccagaaggcttttattgttaaattatattctttcggaaaaaccacccatgtcctattttgtaaacttgatatccatacacttttgactggcattctattttagccgtaagactatgattcacagcaagcctgtttttcctcttgcttggggtggcagcagaaagcatagggtactttccagcctccaagggtaggggcaaaggggctggggtttctcctccccagtacagctttctctggctgtgccacactgctccctgtgagcagacagcaagtctcccctcactccccactgccattcatccagcgctgtgcagtagcccagctgcgtgtctgccgggaggggctgccaagtgccctgcctactggctgcttcccgaatccctgccattccacgcacaaacacatccacacactctctctgcctagttcacacactgagccactcgcacatgcgagcacattccttccttccttctcactctctcggcccttgacttctacaagcccatggaacatttctggaaagacgttcttgatccagcagggtaggcttgttttgatttctctctctgtagctttagcattttgagaaagcaacttacctttctggctagtgtctgtatcctagcagggagatgaggattgctgttctccatgggggtatgtgtgtgtctcctttttctttcaggacttgtaggattctttgtgccatttgcatataatttggcaggttcacattttttaagagccctatgaagtgctttttgcatgtgttttaaaaaggcatttgaaaattgaaagtgtgatttatggaaattaaatcatctgtaaaaaattgctttggaaagtaatgattgctggccataaagggaaatatctgcgatgcacctaatgtgtttttaaccctttatttgctgacaatctatagtcattaatgctaaactcgattttggcttcagctacatttgcatattgtccaacaatggtctatttttgtaagaattagataaaatgtatacttgatataaaatagtcaaaaatgtaactcttagtaacagtaagcttggcatttagatagaccatgaacacttcgtcagatactctgttgggtgtttgggatagcaattaaaacaaagtattgatagttgtatcagagtctattaggctgcagcaaaggaagtttattcaaaagtataaactatccaagattatagacgcatgatatacttcacctattttttgtctccttaatatgtatatatatatatatatatatatatatatatatatatatatatacacatatatgtgtgtgtgtatgtgcgtgtgcatgtttaacttttaattcagttaaaaacttttttctatttgtttttcatctggatatttgattctgcatatcctagcccaagtgaaccgagaagatcgagttgtaggactaaaggatagacatgcagaaatgcattttaaaaatctgttagctggaccagaccgacaatgtaacataattgccaaagctttggttcgtgacctgaggttatgtttggtatgaaaaggtcacattttatattcagttttctgaagttttggttgcataaccaacctgtggaaggcatgaacacccatgtgcgccctaaccaaaggtttttctgaatcatccttcacatgagaattcctaatgggaccaagtacagtactgtggtccaacataaacacacaagtcaggctgagagaatctcagaaggttgtggaagggtctatctactttgggagcattttgcagaggaagaaactgaggtcctggcaggttgcattctcctgatggcaaaatgcagctcttcctatatgtataccctgaatctccgcccccttcccctcagatgccccctgtcagttcccccagctgctaaatatagctgtctgtggctggctgcgtatgcaaccgcacaccccattctatctgccctatctcggttacagtgtagtcctccccagggtcatcctatgtacacactacgtatttctagccaacgaggagggggaatcaaacagaaagagagacaaacagagatatatcggagtctggcacggggcacataaggcagcacattagagaaagccggcccctggatccgtctttcgcgtttattttaagcccagtcttccctgggccacctttagcagatcctcgtgcgcccccgccccctggccgtgaaactcagcctctatccagcagcgacgacaagtaaagtaaagttcagggaagctgctctttgggatcgctccaaatcgagttgtgcctggagtgatgtttaagccaatgtcagggcaaggcaacagtccctggccgtcctccagcacctttgtaatgcatatgagctcgggagaccagtacttaaagttggaggcccgggagcccaggagctggcggagggcgttcgtcctgggactgcacttgctcccgtcgggtcgcccggcttcaccggacccgcaggctcccggggcagggccggggccagagctcgcgtgtcggcgggacatgcgctgcgtcgcctctaacctcgggctgtgctctttttccaggtggcccgccggtttctgagccttctgccctgcggggacacggtctgcaccctgcccgcggccacggaccatgaccatgaccctccacaccaaagcatccgggatggccctactgcatcagatccaagggaacgagctggagcccctgaaccgtccgcagctcaagatccccctggagcggcccctgggcgaggtgtacctggacagcagcaagcccgccgtgtacaactaccccgagggcgccgcctacgagttcaacgccgcggccgccgccaacgcgcaggtctacggtcagaccggcctcccctacggccccgggtctgaggctgcggcgttcggctccaacggcctggggggtttccccccactcaacagcgtgtctccgagcccgctgatgctactgcacccgccgccgcagctgtcgcctttcctgcagccccacggccagcaggtgccctactacctggagaacgagcccagcggctacacggtgcgcgaggccggcccgccggcattctacaggtacccgcgcccgcgccgcccgtcggggtggccgccgcgcccggcaggagggagggagggagggagggagaagggagagcctagggagctgcgggagccgcgggacgcgcgacccgagggtgcgcgcagggagcccggggcgcgcggcccagcccgggggttctgcgtgcagcccgcgctgcgttcagagtcaagttctctcgccgggcagctgaaaaaaacgtactctccacccacttaccgtccgtgcgagaggcagacccgaaagcccgggcttcctaacaaaacacacgttggaaaaccagacaaagcagcagttatttgtgggggaaaacacctccaggcaaataaacacggggcgctttgagtcacttgggaaggtctcgctcttggcatttaaagttgggggtgtttggagttagcagagctcagcagagttttatttatccttttaatgtttttgtttaatgtgctccccaaatttcctttcatctagactatttgattggaaatatgtcagctatgatgatgactttctgggaagcgattcctgtcacccgctttcccctcctccccaccccacgtcctggggctttagagagcgattgggagttgaatgggtctgatttcggagttagctggctgagtccgcgctggagcggattgctggcatgtgacttctgacagccggaaatttgtaggtgtcccgcgagtttaaaacaagccatatggaagcacaagtgcttaaaaataatctcctgccagcccagtgacaagcctgtcccacccggggagaatgccccggagtggcgtgcgggtcagccagggtctgcgcctcgcagccactgtggaaggagcgcggccggtccaggacacaggagaccactttgtgacttcaatggcgaaggttgtgtgtcctcattttaatttttttccctacaagaattgttctttctccctctcctctccctcccattttctcttgcccagtttctccttttgttttttgttttttgttttcctgatgggcctgcagagggattaggtgggcgcttctggtgaacaccttcctaggtggccacaggacaggtgtaccccggactgggtttggaagcttcagggcgccacatggctgggtcctgaattaggcatttcccaactgtacactggtatccggactggtgtccctatatctttctgccttgtaagccgtggaccagtttttgttcagtattctgtttccagggatatttatagcagaaggaaggggactaaagtgcagtttggccccagaggatactgaagggcagattctgggggtattcagtgtgcatcttcagccgccttggagaaatttagagcatcccacagccacgcagatccaagctgtctttactcaaaagacaaacaatgaacaagacttttaaaggttggcatatttcaaattaattttacttgttttaatttagggttaaaacagagaaaaaggatttcttctgcccacctttttttttttaaatggaagaacaaagtacagcgattaagtctaattccacacaacatttaaaactgcttgatgtgaaggaaggcactggtatgatgtgaattccataaccttatgatggactccagaaaccattttcttccctatttaattttcagttcttttattgcaaattaatgctgctgaatttcaatgggcactaatgagactgctccttggtagattatttactgccttgctaataattacaaagtgaacctggtcaaatacagaggggatcgcatcttattcaaaattgttcatcatcccagtgataagtggtatcagtgtaatatgccctatcttacactttctgcattacatgatattcaaacactcttagaataataaaaaaagagacaaggaacttaaaaattaaaaaaaaaacttgcacaaatgggactctgtgtggaaattcagttttagaatgatttttcctgtgttttatttcccggattatctttcctcttttgttagaattctgcctgttattatccagcaaggaaaagaagcatctatgcaagttcttcatatggacagatattatttagtatttttcccctctcagtttttctgcttaaatgactctgggtataaaggaaaggattgattgggctcttttaggaaactttaagtttcttaagtagttctcaaaagttttggggctgaaagcagtgttttcaaactgcttgtcatgacccagagggtcatgaactcagtttagtgagtctagaatattttttaaaaggactaaaatggaaaggaatataatagaaaatatcagagtgcatggtatttcgtaaggataagttttgtttcctgaaaatctgttttaattatatgtgcttctgtgtgctgattgtgatgtaaaatgtatttcttactgtggattgaattcaaagaaaaaattagaaagctaatggcctaaaatattatatgttcagtagaaaacaaaaaattcaggcaagtggctggttgtttttacctatacaaatcaaaaggctattttgattgtcttcattttccccttataaattaggttggtgtctttagtcatttaggctaagttttactatctgattcttaacttttctattgtagaatggtgctgtcatgtggactgtcctcccgagtgtcccactggatgttcagagaatttatgtgaaggtcacgtcatttagcattgagatgctgtggttaccttcttccatttcttccataatatgcagccacatctatgtgtgaagaaatgtaatagataaaatttctctggacgcataataatgtgagaaagattgtcacatgtcccagcaaattgttattaatataaatttgttacttggcaagctgagattttgcaagatgttactcaaaatttcacaatgaaggaaacagggagtcatcttatcctgggttccttttttagatttcaaacaacttaggaactttgaataaaactaaagatgaagcttaactatatcaactatcctttttaaagttctaattaggaatttaatgctgcatgcttatttcagttttattactcagtattcttaaaagttagacgtctctcacttctccaaaaaacttggcaaatgtataaatcttttgcatcaaaatcaatgccctgctaatttgtatcctggccatctgcatattttggacaactaatttttccactggtgatcatttgaaactctttctcaactttgaatagagactgatttccaaagtgagatttaagtgactaagtttcaagtttccgatacatttttccttttacttagataacatttcagcccccttcctttctgatcttacttttttattaatttaaattgttactgattacgtgacactttgtgctggtctaagaatagtccagagtcacatattccctggtgaatgagcatattttcggatgaaaacggaatcacatcttcaatccccatttcattttcacctcctccatgtggcttgtacctgtttggaagaaagctcctgaaggataattgccacttattctaatctttctcacactcatttaatttggatccctggctaaagttgttatttacttttgtgattatacttagtctatgacattcataatttgggaaaattctcaggtttgagaattttggcggcttgggatttcttttagtttcttatagttttaaggatatgtaagacaggtgtaagaaactgccaaggggaggaaccatagatatcaggaaaaactagaaaagatgccagacttaccattaatgaatgatgagacaatagtaactttgttaagtgagattgtatatgtgaaagtggtatagaaactaaacaaacattaggtgtttttattattttactcacatgttaatatttgttttggtgctttcataggctaaaaagctgggaaataacagatttaagtggtcaggaattttgttataaatatagaatgatgattatatgaaatcttttcctgtgaaagtcaaatttaagtaaaatctttatcaccatctgcaacatttgtctgcagcctggcttaccaggttatcataaagaacatttattttacagatacattaaagaaagtcaaaaccctgattatgtgtaaacaattttacataaggaaatatatgaattttaattatatttttctaaaatccgtactcagcatgaaattaatacatcttaacccctccctgtgacttcattattatttttaatgtaactttagaagaacccagtagagagagcagcgtgctaagtgtgtttctttcttttccagacaactttgaatggagaggagcaaattagtcttttggtttaattctgtctcagtttgcttatctaaagaaaggaaaacagagtggctacacttgtttagaaccatatgcatactccagagaaagatgctctattaatccaaaaaatacagccacttgaaaccagccaaagcgaaagtgtaagggacttcatggaaaggaggcagttcaccaaagttattgaggggttttatattttaaactccgccagtgaattgacgtgtaatgtcacttacaaaaaaaaaaaaagtatgtctgagctgttcgctacttcgtctctaaaatatactcatactgatctctgaaatcccagaatttaagtgggctggaggttacgggaagcacctttataatatccttaatctcatgagggaagaaaccataattgctgaattctctgccttggataatatcaggagggactctgaagaaagttttgcagtaatcaacaatgttttaaattatgtgtatatttttagatcacctcaaaaaatataggaagcacagaatgacaactattctggtctcaactgacacaattttatgtagtttaataaagtaataatttcaagaaacgtgggcaaataagaaagagtatgactttcttacaacccgcttgtaagtgatgtggtggtggtaatgatccatgattttgatgatgacgatgatgatgaaaatgaagtttttgtctcagtttgggtaggtggtatttctggatgcctcctatggaccctggagatgttcatcctatacagaaatccaatcctttaaatctacttggctcattgttttagaattctaattccatagtctgaaaattttaataatgatattaccaataatattagaaacttattaagtacctataattgctatacaaaaaatttaaaagaacccaaaattccaagcaagactgaaaattttttgtctctcctctgaactatttagagggacaaattagtttgttcttataatatctactttaaataaatgtgccatctttaataagatagtagacttctttgtttggtaatgttctattttttggagatcctatgagttacacttgggaaaattataaaagttcacttaaagttaataaaatccattaagtaatgttcagaactagacatttccaaatgagcccttgaaaagctcaggtgggttctttttgagagttccccaaatgttgtcaaccccaggaggaatggaagacctctgcagttttgttattcagattctcatctccttctcagaagccgtagaactggccgggccctaaggtccacgctccttggttccagttctgtcttccatccttcggtcccgggctcattctgcctgttcctaaacggtggcaagttaggggccccagcagccaacttgtgcttacctggcactacttcctgggcagttttcttggctccttgacttgttgggcggcttgggatttcttttatggccctgaaagcaaaagacaatgttctcttttagtttcctgcaattaaatgatgttagaaatagtcatcttcacattggcgtacttcctctttcttctgtaggtcttttagaattttgagtccattctcatattttcttgtttcatttgctttattttctaatacatagaagtttaaactccctttaaagagtttttggcctcttttaccctattaagctttcttttttcttttctgttttagttgttccatctgtgtattctcagatatttttctttcaccttttctggtttatttctttattgacctgtctcatctgttattttaatgaaatttggaacagggctaaacagagttcctacctcagccagtataagaatataccgtaataactcagagtggtattaactagattaaaagtttcaaaaagtgatgtttttcttgtctctgaggatagaaacttcaacaaaataaagaagaaattttcaattagtagaatttctttgaaagtttgttcattcattcatttggctaccttattccaaattgagtcattcattgagggcttagactatataaagtgtggttttgttttcccagcagttcatgcaacagcattgcacctagcagctgggaagtcttatagcatgaataggtgagattctaataccagaatctcctgcatgtgtaaactaacagtgtagtcttgactgttgtctcccagtaaacttggtttcaggagttttagatccatgtgaacgtgtacaaggcatttttgctaactgtaacttcccacttaatcaacaaaaacaaaaacactcatttctgaacattcagtgcattcatgattaatcttaattacaccacaaaggtatttttcaatggtgattttgcgggagtggggtaacagtttcgaaagcaacattgtcagaaacatagttgattttaaaggttctttctggtgactttgacttctgcttttttagaagaccttacacagagttgtatttatttctcctggaatatttcaagcaattcagagtgaaagggtatacattccaatttgcgtatgagataaaatttagttacattgagaagctattttctttagttacagggaaaaaattgtagggcttttggaagcctctttgatttctaataggaggaatccctgagcactggtccaaacagaaatcatctcttcttcattgctgtatttccctcaagctcttagcaaagtgcatggcacgtgaaagcccggagaagctgttggttgaaagaatggatggtggtgggcaggaagcatcagggacatggtttgcttcagtctattggctgggagaaaggccatttaggaagggatccttagatgccactggaagaatgtgggaagtttgtgaatctctctttctcaggaacaaaagtagaaaaaggactccacacagcattccaagtacagtcggccctcattattcatggattctgtatttgcaaattcgctgacttactgacgtttatttgtaaccttcgagtcaacactcacggtgctttctcagtcctttgcagacgtgtggaatggcaaaaaaatttgagttatatgacgtatatgttcccagctgaggctgagcaaggctcacttctccttgcagccctcagactataaacaagtgtccctcttgctatctacttcgtgttatgatttttgcattttcataatccctgttgatgattttgctgtttaaaatggcccctaagcatggtcctgaagtactgtctagggattctaagacaaggctctgacgtgtcttaagagaaaatacgtgtttgataagctttattcaggcatgagttacaatgctgttggccatgagttcaatgatggtgaatcaacaggatatattaaatacagtgtttttgaacagaaaaacatataaaacaaggttatgtattaatgagttggcaaaaatgctgtgaccaaaggctcccaggaacctaccctattttcccctcaatgcaatggttcagtatttgctaattcagtgtttgaggtgactttatagaacatgagtaccatgaataatgagaatcgattctgtataatagagtgatgaaagcacaggtctgggagccagcagctatatttctattctggcgtgactcctgtgtagttgtcatcactggcaaattgcttaactgtgtgcctcagtttcctaatctgtaaaagctacatcgtttggatgatgtgaggattaaacaaattcatagatgtctagggcttataacattcctggcacataacaagtcattattttttattactacttcggaagggaattgagtactataccctgaagaaggtgagtatgggaattctctacgggtctggaatgtccctatatttgtttattttgccttcaagtgactaactttaataccctattgtgattagaagttaaacttctgcaaccaaaaggaagcaggaagctagtatttcttgaagtgcttattacatgccaggtactgtgctacaaaaacaaaacaaaacaactgtaaaaaaaacttcaaatttggctgcgtgcagctgctcatgcctgtcatcccagcactttgaggaactgaagggaggattgcttgagtccaggagttccagaccagcctgggcaacacagtgagaccctgtctctacaaaaaaacaaaaacaaaaacaaaggcactccaaatcagtaaaaattaatcaatcaataaaaagagtgaggggcattaagtattgtggactgaagcaatcccagagagggaattaattgaagctgaggtaagcagcttatggagaagctatgatgtacagagggcaaggaaggaatttttctgtaatttggaaaaatgggaactgtgagaaagaaggagttggaagctcatacttagggagcatctacaaggacgtctttttcacgttggttggaatatccaaatcaaggattatttcagaatcacccagatgattaaaaaactactgagatccaggttgtatttcagcagttctgacaattgctctgggtcgaagcttgaatcagtagttaagaaaaacaacaaacaaaacaaattttggggcttttctcactgatttacagttaaagctcatttactcttcctatgactttagatggaggatatttccaagtcttcaggatggagacatggagggaagtgagactagtgatgtgcctcaaggttttgctgttgttctaaccatgaggagcactattcaaacccaggtctgctagatttccaagtcttcatttccttgggcctcttggatttcagaagcagagggtaaaaggagtgctggggagaaagatcacagtagctttcaattctactcctcagctttccaaaataagtttcaagactggccgttgcatttgatatggaataaatacaaagaaggtagattgaagggtatgaagatgcagatttttgataccagatatgaagataacattaggaagcaatctaaaacatggacacaaacacacacctgtgccagttagcctgtataattcgatttttgttaagtgtttagataactgaaggtaatttaagccctcatatcttcccttcatagggttctttttccctctggttcatcagagagttgccaccaattcaggctgttagtggtacacataacctctagcattgttgatacagctataaaatcccaaatatcagtacaattgttgattgcataaaatttccagttgcatggttggaaagtcctgtaagtttgaatccttaaaccagtcttaaatgtggaggaggactcaattaaagctctcctcgtgtcctccctctgacgtatttgcaaaatcctttccacaaatagaatactgtttttaatgcttccccagtccaattttgcgttgtagaagacgaatttatggatgagggaagtggcattcaggcactccagcttggtatagaagcccatggtgtctggtcctcagtcctcaagcccgctcatttcctcatgtgaactcagaataagcagctgaaagcaagtcttcaaaatctcagagatatgtataaatgcaagtgtttgggtgagaagtgaacatgggtctcctctagtgcccacactacttgactaacaggttttgggctccacacaatgagggattatcaacccctgtcccagggctctctgggtcttggttctttgtttttgatgctcagcaattgtgatcagtgaaaccaatgttgcttttctatcaagagtccaacccttttctaagaagggttgtgtttgatattagggaatagctagcaaagttatcaagtaacttgtagaaacattcttttgcaagagttcttatactgaatgactgtagttgacagcagtgcagtactggtcattttctaggacatcttaaaaacactgatgagaagtttcctctcagatgtctgtcatgtcattcttgcctttctctacacagggtcagttttctcttattgctgttaggagttcctcattggtttttcagcttttgggctttcaaactctaattaatcataagctactagagtgtactacctaaagtgtgtatatacacatatatacacacacacacacacatatatatacctggtatacatatatatatataatatacatatatcatatatactccccaacctgatctggttcttcctctgcataaaagacctcaggccagtcagagaaaacatgtatgttccatggtgtggcaatcaagcccttgtatttggttccaatcagtctcctaactattactccaagaagctcttgttgaaagagccatgtttaaatggcatgttcctactttcttcttcatagtgatcttcatctgtaccatgtacccttctttcttcttgttccatctctgttaggctgattctacccagaagtcaaggttcagctcaaatgctatccctatcaggtgaattttccacctggcatttgttcggtgtgcattgtgtgcatacagcaccttttcccggtacctttactgtaatcaccagataattcctttcattttagttgtaaatagagttgtcttccccctctatggaatagattttattaatgtatagagcagcagtccccagcctctggaccatggactcgtactggtttggggcctgttaggaactgggccgcacagcaggaggtgagcagtgggcatgcaagtgatgcttcatctgtatttacagctgctccccatcgcttgcattatgcctgagctccgcctcctgtcagatcagcggtagcattagattttcataggaatgcaaaccctactgtgaactgtgtatgtgagggatctgggttcttcttatgagaatctaattcctgatgatctgtcattgtgtcccatcacccccagatgggactgtctagttgcaggaaaacaagttcagggctctcactgaatctacattatggtgagttgcataattatttcattatatgttacagtataatactaatagaaataaagtgcgcaataaatgtgatgcactggaatcatcccaaaaccatccccagttccatctgtggaaaaattgtcttccatgaaaccggtcatggaactggtgccaaaaatgttggggaccactcttataaggcatattagagtaatttcatagatttcctaattcatttatcatattcattcactcagcaagcattactggatgttgatcatgtactggctttggtggtaggtgcagagattgggaacattgtcatcaaggagtttatggttgagtgagggagatgacaagtggatagacaatgaaaaaacagtagaataagaactgtgatagaaaagagacagccaggagcattgaggagaggcacttaaccagatggaggatcttggtccattgatatggaggtcaaaatggtttaatagagcaagtgaccctttcaactgaattttttaagaatgaggatttagccagacaaagaagggcaggtgaggttgtgaagaggaactgagtggtactcttcagagctccagcccagttccttggacagaataaatgcttactaacttatagagctgaatattgaattaataaaataagggtaaactgttaagaatcagagaaataacttaaagaacactgatagctagtgttttttgaacaccatgtacccaggtgccttgccgaaaaccttaatgatcatcttgtttaaaccttacatttctcataagaggctggtactattgttattctcattttatgggacgtagaaactaagacttggagaggggaagtgacttgcccaaggtcatacaaccagtactggagaattagggattctagatctagaatttggactctggagcttaaggttttaacccacgacattatgcagagaaattgacaggatttttctgttgctgatcaatttacttggcagttagtttgttacttccttgtctttattttagttgtgacaatgctttcatcttagactgtgtcccgaggctgctgcttttatttttatgggaaatggctatttttatgatccttgctaaaagcatgtttaaacaattttccattaagtagggggatgtttttccttctaatatcagaagccaataaatgaaattctacaaagacttgctggtagcaaccttaggaatttctttgcatgtgaaacccatctgagaacttaaaatctgggtaaaattgtagtgtaatttggtgcaatcgtctctttgcacaaataacatcataaaatcatagtattgtcatctaggaggggccttagacatgatggaatcctaccttttatattttccaggtgaagaaatcaaagtctagaaaggtgaaggaacttcccccaaagtttcccagctggtagagacagaaccagggctaggtcctctattctgactcctgaccactacctcacacctaatagatggaggcatgcccagttcctgttcaccgagggcatcagaccatgccatactcattgctactgttccagcatttatagtagaagctcaagcaagcaggatgacagaatacctaattctggtcactacaacattataatgatggctaaagtgaatgccccagccatgcttgtctagacaggccatctgtttaattggtatatggttcacgtgagaatttttaacctctgtttgtcgagtcggtgttagttctctagtgatgaattatttcctatacttccatttagattatttactcttaatttaataaccatacattgtttactttggtattgaagattcccttgtttttcttctttttttctgtttccagggcttaaaggttaggagtgaccttgccagacttccctggagacttacactgtctcctttcagatttctgaagcagttgggtgctatttttagtccactatcaccaatgtgaaaatggaacttgcattatttcattatagatatttcactttagtattgacagaattaaaaaaataatttgatctgtgcttgatctagcagccaggttacaatagacatttttagttacctggtccacatgttgaaaaacatgtgtcttctctgagactaatgactaagcccgatgttggttatatactgtttactattaaattttccccttgtagtttaatattgttccaggaaatgaaatgaaagtttaataagaatggcaattgatggacccatatgtcggaagtataactaatgtccccgttacatgtgttaaagaaaggcatggctggtgggttgtaactgtactacaccaagatgatttgacacaacttattctacagagatatatatttatcaggatagaatttataactaaacaaaactatagcattttttcactttgattttttttaaatgagtcaaagaactgctagaattgtcagttaaaaaattttaaaaggagatatgaaaaaatcttacaattcacaatgctgtaaagagataatgtagggattaatatgttcttgatatcaatattttatgacttttatacatgtagaagcaaaacaatttgaggtaggtgaagttagtatggacttcttgagattgtccttcacatttcttttcctttcggtgaaaaattgaaggccaaaatgtattttcttctggttttgaaaatactgtcaagatccttgcaacaaaatgagttcctctaaggagctgaaaacaaagctcactcccctcgtgatactctgagaggctttgctcagcatcctgcattctggtgattccttggagacagatgatgctaaacacaggaagattaggtcaatggtaactttttctaagtcaatatttcttctccttgggagatgatcattttaaatcttcccgaagtccaggctaaacctttctaattgaatctccatgaaggagagctccagcaggtggagaggaagtgagaaagagaaatgaaagctgcacgcctcatgacgctgtgccagggagttcttaaaggtgagggagtttctttttggtaacctaagctatgtgaatcagaaggttcattagcttgtttctttttcttttttgtaaactcctacataattttagtaaacaggaacagtaacctaatgtgatatcccactggcccaagacttagtgcatcttcaaagttgcttaattatgtccgaaacagacttttgtctcttgatgagaaaagcatggttaaacgtgtgatgatttcctattgtcctgagctcagatctgtaattgtggccagattcatgcatctctgctgccttctcttagaagaatcatatgtaggcttgtcagataaaacaggatgcccaggtaaactggaatttcagttaaataacaaataacattttagcatgtcccatgcaatattatactaaaatattatttgttgtttatctgaaattcaaatttaattgaatgtcctgtatttttgttggttacatctggcagccctagccatgctgcctttctgcttaatgggcttaattttttgaaggctggaggttttctgttatggtgcccgtttccacctgcttttctaccaggaaaggaggcatgctgatgtagaatttgcatccttatttttgtcattattattgattataacagatgacataggtttagattaaacctacaatgacattgctgtcattcagataattgtaattattgctaattgtaaagaaggataattttttttgaaatgactattatttgttttttgtttttgtttttgtttttctttttttctaattatactttaaattctagggtacatgtgcacaatgtgcaggtttgttacatatgtatacatgtgccatgttggtgtgctgcacctattaactcatcctttacattaggtatatctcctaatgctatccctcccccctacccccaccccacgacaggtcccggagtgtgatgttccccaccctgtgtccaactgttctcattgttcaattcccacctatgagtgagaacatgcggtgtttggttttttgtccttgggatagtttgctgagaatgatggtttccagcttcatccatgtccctacaaagaacatgaactcatccttttttatggctgcatagtattccatggtgtatatgtgccacattttcttaatccagtctatcattgatggatgtttgggttggttccaagtctttgttattgtgtatagtgccacaataaacatacatgtgcatgtgtctttatagcagcatgatttataatcctttgggtatatacccagtaatgggatggctgggtcaaatggtatttctagttctagatccctgaggaatcgccacactgacttccacaatggttgaactagtttacagtcccaccaacagtgtaaaagtgttcctgtttctccacatcctctccagcacctgttgtttcctgactttttaatgattgccattctaactggtgtgagatgatatctcattgtggttttgatttgcatttctctgatggccagtgatgatgagcattttttcatgtgtctgttggctgcataaatgtcttcttttcagaagtgtctgttcatatccttcgcccacttgttgatggggttgttgttttttttcttgtaaatttgtttgagttctttgtagattctggatattagccctttatcagatgagtagattgcaaaaattttctcccattttgtaggttgcctgttcactctgacggtagtttcttttgctgtgcagaagctctttcgtttaattagatcccatttgtcaattttggcttttgttgccattgcttttggtgctttggacatgaagtccttgcccatacctatgtcctgaatggtattgcctgggttttcttctagggtttttatggttttaggtctaacatttaagaagaaggatacttaaagtataagggaaaatgttacaatgtatgaagggaacatgaagaaatagaatctggtaaaaaagagttcttgcttttgggaggccaaggcctcctggctaacatgatgaaacctcatctctactaaaaatacaaaaaattagccgggcgtggtggcacacgcctgcagtcccagctgcttgggaggctgaggcaggagaaccacttgaacccaggaggtgtaggttgcagtgagccaagcttgcaccactgcactccaggctgggcaacagagcgagactccatctcaaaaaaaaaaagaaaaaaaagagttcttgctttcaaaactatggattaggtaacttttgtgaatgagtaagatcatgagtattataaaaatagcacctttcttttttgtcttggggaaattatcttattttttaattggatttcagaaaagagtatttcagagaaataaatctctgaaatgctttttgaagtgtgaaagatttagaagacaaaagcaaacctcctgtctagataaacattaaagagatctgccctcccctcctctacctattcaggttgcaacactttgggggtggctgccttggtagagcttgatcgtgactctggtggcttgggagatggcatgctgcacaagggattcatggttacagcgggcttgtgggactggggctctccaatacgtggttgggtttgtaaagaaatcagagctatggtgtgaacaaaaggatatgcatgggagacagtgagacaaggaaatgctccagaaattattggaatataggtcagataactaactgtacttgtgccattttctgggggaaaattctctgaaggctttttgggaaaagaatggaagtgagaattctcaggtcctcaaaatatttccttttactcagtcctaacctgaggccgttaaagaattcccagagtcacgatggaaggcatgtttgggagtaagagccagagtgagggttagaaatgtgttgttggccaggtatggtggatcatgcctgtaatcccagcactttgggaggccaaggcaggtggaccacctgaggtcaggagtttgagaccagcctggccaaaatggagaaacctcgtctctaccaaaaatacaaaaattagccaagtgtggtgacacgtgcctgtaatcgagctcttcgggaggctgagacaggagaatcacttggacccaggaggtggaggttgcagtgagccaagatcatgccactgcactccagcctgggtggcagagcaagactccatctcaaaaaaaaaaaaaaaaaaaaagaaagaaatgtgttttccagggttctgggtacttaggaatttggttgcttttgcaggtggaagtggaggtgactaggtaacagctgagtgattttgccccagttggacatgagccaggttgagcagaaagccctgggatgcggggaggggggtggcggggaaggaattgaaagttggttgtgtggtttggctttggcttcatggcatgctcacaccttgcttcgcatagcatgcttagactacagcaggagcatcaggaagtggatttctgagctcaatacaaaaagttataaataccacctataagggcaataaagatatatagttgattttcttctttgcaaggccaaatcttataggaacataagagcgaatgagttacagcctgggaatttgagccttatattcagagattttaggttgcttctgattccgctgtctagacaaaaccatgagaggatagtgtctagaaatgagaggaagctcttccaatgcagaggctagaatgtgtcagcctgtgctgcgaggcctgggatagatgtttctgaaaagtaaaagggcagctttcctactggatacttgatcctcaggctctagaaaactctgctttattaactttgttgacttcctaggcaccacatgggatccttgttcttcctccttgtaagcagtaattgaaatcagtttggcagcctggtttacagtgaccatggtggcttgtctcccgtgctcttacctcactctgttgatgttgtaaaacctccagctaacttcatggggtggctgacccacgttgctcatttattcattcaacacatattcattgaccatctactctatgccaggtattgttatcagcactgggaatagatcagtgaactattgatctatttgtctaatgggacaaattgacaaattgggaaagattccattacacaggtgacatttaagcaaagtcttgaataagggagggaatagtaccatgagatatcctggtgaaaagcaatttaggctgagggcacagcagggaagaggccctgatgtgggaacatccctggtgtcttgaggtacagaggccagcatggctggcacggagtaagaagttggaggtgccgggcatggtgactcacacctgtaatcccagcactttgggtggctgaggcagatgggtcacctgagcccaggagcttgagaccagcctgggcaacatggtgagaccccatctctacaaaaaaatacaaagaaaattagccagatgtggtagcatgcatctgtagtcccaattgcttgggaggctgagatgggaggatcaaattacttgggaggctgagatgggaggatcacttgagtccaggaggtggaggttgcagtgagctgagatcatgtcagggtgacagagcgagaccctgtctcaaaaaaaaaaaaaaagaaaaagaaaaaagaaaaaaaaagaagttggaggtgagtaaggagaggaacgtgggggacagagtcctcaggactctggcttttactctgagtgagtcgaaaatccaattaaaggtttgaaagagaggaatgacctgatctgacattttattgtgaacgttttcaaatctttacagaagtggaagagcataacgatccttcatgtacacatcgcccagcttcaactatgatgtttcatttgtaaatatttccgtctacacttccaaaggatgatgactatttttaaaagtccaactataataccattatattttaaaagttaaaacactatgtctttaaatatcaagagtttgtattgattcgcactttgaaggtcgagctgatgaaatttcctgaggggttggatgtgacatgagagaggagtcaagtattgcatggtaattaaaaacctttgcagcatagtccatttaccgaaagactatatgtatgcacttcaaagcaggttttaaagattaacatcaagcatctggcttcatgagttttaacttcttttcataaatgttatacaatgtcatcatctctccagctagagaaaatgctattattcttattttcaaatgaggaaaatgacgcagaattatttacatattatgtaacttggtcccaagtcccttagatactggtttagaaaatcctagtaaactggaagtgacttatccaaaattaaaatttattttgctctattgtcttttgttgcctatgggaactttgtgcaggtaactaggcacatgtcaggactgatttactgacctctcaaggtatctttaattattttgggggatatcacggaatgagttctacacaattcatttgaatcgaattgaacttaagaaaattcaaatgatgcattggctgcctcctatttattacatgctgctcataggcataacagcatagtctaacaagtataaaacctgtgtaactgtagctttcagtgcagtgtgatgagggctgagaagatagtggtacaaagaagagaggtagcagagtgaagctgagtcaatatgatgaagatttctctagacttgaaagggctagaaaaggttattcttggcaggaaaaaaacatgagccaaggcataaggataagcacaggcatggcagatttgggaatgtcatgtaatttgttgctgggctgcaaagtacatggaaggggagtgaaggaacagaaggagatgaatctggagggagaggttaaagtgttccagagagcaatatgtaggtgttactctaagtcaaagaggtcgtaatagcatgtccagactccaaaactctaaacaagtcatagaattgctgccttggtagggcatatcacacacatcaacccaatcctctgtcaccatgacatccatataactgcaactctatacatttcccagcctatgttcccagagtctccagatgacattgtctgcaaactgcactgcagaaggctctgctatgtcttcttaaaagtaagcaagactgttttcctttgttacatgagcagcaaaaggatagggtgctctttgacctcacttactgtagggtggataggaaagtcaaggaagagtaacccagaagatttagttttaactttcgcatcaaagaggtcccttagcatctgctcagagatgtcacaatttctggtgtgtgattatgtttaagaattcggccttgccactgttgaagttgttctgtggaaaaagaacctctcttaattttacatgatgcccaacttctcttttattccagaatcactcatatgctgttggactctttccagccatgtgtgctaacctaggcaatgtcataatagatgaattatgtttactttgtctttgatatctcagctcttttatcttctattcaagttcccacctccatcattactgatagtgttcgttgaacaaagaatatgtcagatatacagaagtgtttctccccttttctctgtctctcttttccttcctttcctttagtttcctttctctgtctgttttctgatgcctcattttagaaaagtgattttttttgtgggaaaatcattttagcattagaaacgcaatggctatcactgacagcttcctctgatgaaacggccatttgtcatcattacacggtcatgggagtgctaagaagacttaaatgcagggctaccaccccttcccaattcatcttttatccattttatttctctaaggaaagggtttgaaaaatgggctttgccctcttggatgcagtgaagaaattctagctggctacagatgttattgttggtcggaggcaagggataaaatcatggtcacaccattgtagcgccagatggggaatgtagcaaacatagttgtaatttctcattttacagatgaagaaactgaggtgcagaggggttcggtgacttgtttaaggcatgtaattgttattggcagctttctgttcagaacttaagagtatgagtcagtctagatcttttcatcacaatactctgctcctcttactttttcctgaaatttgtcacattgacagcaatgtgatccctaatgacacacagattcccaaataatttttgtagtaaaaatttccatttgcaattctggacatgtgtgtgtgtggaattttatgtgatgacatattggtcctatcttttgaataggatcataaatgaaatgacttatggatcacattcaaaagcaggccaggggccaatgtgtaagcaggtgggttttcatatttggagttctgtacttttgtgttagtcagtgggtctaggactcttgtagtgtatttcccaagggccaaagtcttctgccttgaggtgtcagctttccaaggcagaggctggatgctttctcttccttctgggctcctttctcttaggcttcccccttctcttctcctccatttgtatctgtcctttttctcggtactttccctggctggtctcagctagatgctcactcaatgctgttgaataaatgaatgaatttcgtagtaattctgcaggtaaatcaagttattgtctcccaatacggtgctatgctttctgaggaaattagactggaagtcaggctttttaaaaaagaagatgtggtgtcaaattgcagctctctctctctctcgacttaccttttttctatcatccatatgccttctttcttgtatctttgggttcccagacctcaccattcattagcacttggaatggattggtaagaataaagaaaggagaggtggtgaaactcagcttgggtcatctggttacacattagtaactgacaaaagataaaaagatacagactaaatgggtttttagggaactttttccagtctattcttgtttcccattagtgtgaaaaatcaacacttgcttgtattttggggtgaagacatttttcttaagtgagtgggaaagcctcttgacattttaccgagagccttaaattttgaatggtgaatgctaatgttctttgtgcataaagaatttcagaacttgtatatatgagcattaatgatgcatcattttctatttgtgagttaaactaggtattatctgtaatcatatttttaggaaacattcaaactttcatcaagtcattctcttatatgactctcagctccattaactctgttttcatggaactcaacagagttcttaacgtttgcattataaattaaattagcatttcccctcaaagaagtattgctgtccttacaataaataattgtagacaatttcttttcttttcttttttttttttttgagacaggttctctctctgtcacccatgctggagtgcagtggcacagtcacagctcactgcagccttgacctcctgggctcaagcaatcttcccacctcaacctcctgagtagctagaattataggtgcacaccagacctggctaatgtttaaattttttgtagagttggggtcttgctatgttgcccaggctggtctctaactcttgggctgaagcattcctcccaccgcagccttccagagcagtgagattacaggtgtgagctaccatgcccagctaattgcaggtgatttctaatgggatttagtatttctgggtttaaggatgagatctgaggtaatgactttgtttccagatgtgaaataatttgctcttgggttgtgagccctttgggtgggctcccaaggatcctgctctcttccaggagcccaggctctggggtcagactgcctgggtccttgactccctgttttctgattgtacaactttggtgagtggcctaattcctctgtgccttggctaccttggttactatttctaaaacaactggtgttgtagtagtactgcttagagtactttcaagggttaaatgaattaatccatgtaaaacgcttaaaatagtgcctgccacaaccatcaatttagtgtgaaaatctgctcacctgcttggccagcccctttcactttattaaaccaagggtcgtgctgggttttccagaagtctaagttgcggtctaatctttgtgcagaagctgaaatagcagccataacgttctccctagatgatttcgtggagcttctttgaactgtatctatctccagtcatttttgtggaagaaattttcttctgtactttttagggatgagaattacctgccttggtttattaactaaaagacaccatgattacaaataaaattaaataaatattgtatcactaaatagataatatgagatagatgtattaagttttcagataaacagtataaaagagctagagtaatttgtaaaaagttgggaggacctattttgtcatgcaggaaacaatttttaacttgcctaccccagaacatagctaccacatggttagggtttgcccaaacctggcccaggagtcatttaccttgagctttcctaaaaaggaggatcaggattttcctctccagactctatcattttaggtagagtccttcttgtcaattctttttaagaacatacatttacttttgtggaaaataaatagatacaaaataaatacatacaaaattgcatagcaattagaaatacccaggaggtatgttatggtcacagacacaaactgcctccaacttctgtccatccatagtgatatttaaagcagagagaggtacacaggtaaccacatttagatggactgggatgttgccacacatacaagcattgataactggcttctcattacctgaatacattcttctgtcagagcaacagactcagctatgcttctggcaaaattgttcttaattctctattgattaatttattcggtaagtatttattgggtattttctgtctgaaaagtgcgattccaggtgctttatgtgtctctgtgtgtgggtgttatataaatacttataatactgtatccatactcttgaaaagcttagttgggaaggcaaggcatgcaataaggaacacagaattttagtcattccacaaccatctgttgaatggctgctattgttagtatcgtggtggaaactgagaagcaaagatgactataataggatctcttttctggagatgcacagtggacacgtagttatatgatgatgataaggactccagaatagttctatacatgatgctctggggccacatgcagattctgatgagaaacaattaactctttttggctgctacctgagaaggggtaattgtcactcaggaggtttttgccttttgaccaacatagaaaggagtgtgagtgaaggctagaggtgtactaacttggtcagggcagggtgacacataaaattaaccatcacagggaagggtagggctggagaggcagactgtggccaggttacaatgcgctgaggctaaggagactgtgtttatcctgtaggccagtgggtcttactctgaagtcttttgggtgggacattcatggacttcaagagacctgtgaatgccctaagattataagtaaaatctgtgagtctgtaactaaagctaaagctatttttctggggcccaccatctaaagaagattctgaagccttagggtagccgtggaggagacatgaaggtccattttgcatggtagaaccctgcctggctcttgctgcagtgtgggaggacaggtttgcaatgtggaggtgtggcaggcatggatttgggaggattggcagaggactcaccatgtccatacactcactgagatggcaaatatttattaatcatccaactgtgtatcagacactaagaataagctgggaggccatggcaagtgaggtcaccacagtccctgccacagtggaggttatggtatacaggtaaggcagggaagagcactgcaaagggtttgcccattgcatcagtcatttatttatgcacatgttgattcaacaattatttctatgccaagctgtcttcaaggtgctggaggaaatgaagcgtacatttcactggggaagacagacaataagtaaacacattaaaatctggcttggcttgatgttggggaggggtgagtgccatagagaaaacaaaccatttatgcagccaacaaacatatgaaaaaaatctcatcatcactggccattagagaaatgcaaatcaaaaccacaatgatataccatctcacgccagttagaatggtgatcattaaaaagtcaggaaacaacagatgctggagaggatgtggagaaataggaacacttttacactgttggtgggagtgtaaattagttcagccattgtggaagacagtgtgatgatccctcaaggatctagaaccagaaataccatttggcccagcaatcccattactggctatatacctaaaggattataaatcattctactagaaagacacatgcacacgtatgtttattgcagcattgttcacaatagcaaagacttggaaccaacccaaatgcccatcaatgatagactggataaagaaaatgtggcacatatacaccatggaatactatgcagacataaaaaaggatgaagtaatgtcctttgcagggacatgggtgaagctggaaaccatcattctcagcaaactaacacaggaacagaaaaccacacactgcatgttctcactggtaagtggaaattgaacaatgagaacacatggacacagggacgggaacattacacacctggggtctatcagggggttgggggctaagggagtgatagcattaggagaaataccaaatgtagatgacgggctgatgggtgcagcaaaccaccatggcacgtgtatacctatgtaacaaacttgcacattctgcacatgtatcccagaacttaaagtataattaaaaaaaaaagaaaagaaaacaaaccagtgtaagaggatggaaagtaataggctcgtttagaatggtgtgagaaagccaggcagggagaaggcgctgagacagggaggtcctggatgtgtttgtggaagagctgtggcagcacctggaacttggggagcaagggaaggagtgtgggcaggcaagggtgagggtgcagggggtcatgctgggccttccaggtcacggaaggacttgagctttactcttgttgtggtgagaagctgctgagggcttggagttaggggagtgaaaagatctctactataatagggagagttcgggatctgtaacttaaccccaggagccagcaaagctccctggaggaaatgcagtttaagctgagaatgggaggataaacaggtgtttttcagagaagaggaagggtgctctaggcacagagaacaacatgctggaatgcttctactagatcataggggcaaaatgggagtgcaggagtaggagagggctttctgggaaagatacttattttaattttgcatgcattgagtttttgaggtttctttggtttgttcatgtggaggtgcagagtgggtatttagcacataggtctgaagtccaggggaggggtgtgggacagcagttggatgtggcagagattccacaaagagcaaatatcatctgagaatggcagagggctgagggcagagccctgaggaacactggtgtttaggagcctgctggagaaagaaaatactgcaaagggaacggaagtggagtggttgccagacatagaagctagtgtctaactagatgtcatgagatgtggggaaggtgttacgtatctaagaatgcaaagttgaacccctgtgaactgtaatacttaagataagtcatataaattgtctggaactagagcttgattttccaggagagatgaaatgtgtgtaggtgacaggaaacaatgaatatgtgggcgagtgtagtgtgagcaatttctcagaggtgaatttgacagcattttgcttaggaagctacaaagagaccaatgctagttggtgcaaggaattcaagaatttggacttaagtctatataatgatgatttttttttttaacttgagtttcccggtttatcactcccagaatataggcagaagtttgagatttttatgtgtattttctggaaaagatagtttcagtgttttttacattctcaaacaggtttatgatccaaagaaaaggcagtggtcacagatacatgaaacgacaaggtattcaaaggagaacattgtactttatgacagttctttgggcagtggcttgcaggatgagtttgaggaatgattggaggcaggagagtaattctagtaattcaaatgtggagtattgttgatctctcagacacaaatggaaaaacaaggaattcaaagaaagataggcagagtgttttgaagaaataattgatgaaatttggtaatgagttagatgtaggagatatatttagcaaatatttattaaggactgtattaatctgttatcatgctgctaataaagacataccaagactgggtaaattataaagaaaaagagatttaatggactcacagtgccacgtggttggggaggcctcacaatcatggcataaagcaaaggaggaacaaagtcacgtcttacatggcaatagagtgtgtgcaagggaactgccatttataaaaccatcagatttcatgagaaatattcactatcatgagaacagcacagacaaaagcctgccaccatgatttaattacctcccactgagttcccccaggacacatggaattatggaagctacaattcaagataagatttaggtggggatacagccaaaccatatcaaggacctactgtatatggttaaaattgggagcaaatgagacatgattcttgccttcttggagtttactgtttactaggggaacatacacttgtcaataatcacccaaatataggattggaaattgtggtaagtgccatgaaaaacaagtatagggaattttgagtgtacatagctttggggacttgatttgatgagggagccttatgaagttattgcactagaactgaattaaaccacatttctaggaagtggacatctatttgttggttctttaaatttagctttacagaaatatttcctttaaaaaccaaggcttcttaaatttttaaaactgcttggctaatcaggggaataatgcttttggatagctggtatcgttatttatggttggaaaaacaacagtatttgattacattgagctttaaacttttcctttgattaatgaaaattttattggcccatagtttttattatgctctgtttttacttggtccaagagattctattctctggacccaatatgaataccttcagacatccctctttttttttttttttttcacccaggctggagtgcactggcacgatctaggctcactgcaacctctgcctcctgtgttcaagcaattctctgcctcagcctcccgagtagctgggattacaggcacctgccaccacacctggcttatttttgtatttttaccagagatggggtttcaccatctcggccaggctggtcttgaactcctgacctcatgattcacccaccttggtctcctaaagtgctgggattacaggcatgagccaccacacccagcccagacatccctcttaattatgttgaatatgtaatatcggtgatttcatttgaaaatatttagtagtcgaactagatcaaggcagttaagcttcctatttccatagatgcagtggtattgtgtcttttttatatgatctctcatgcttctggacatccttttttctgctattcttcattccttagctacacttggtgcttcgtggttgtaatgcattgtcatagatgcgttcatttctcattcgatcttcagctctatttctttccagagaatctctacaggcatctgttaggttgaaggacatctaatgtcttaatgtgtagcttggtaaaccagtcaactttctatctgagtcttaagagaaagtgtccaagatgagaaacggtacaggtttggtgacaactcagtgagaaaaagaagaattttacaaggaaggaggtatcttagtaattttgctaaagaagtaggtaaaccttcacttataataaagggatagggctcggttagggtttgtgaagtctccccttaggaaagcaaaccctgaaatattttgaatcttttaaagaaggaaaataagagtcttttaaataaatttttaaaatttattttatatattttttatagacaggctctcactctgtctcccaggctggaatgcagtggtgcaatcatagctcactgcagccttgaatgcctgggctcaagcggtccttctgtcccagcctcctgagtagctgggactgcaggcatgagccaatgtgcccagcaagagacattcattttggtactgtgatggtacagaaaaacaaagggcctttgaggccgaaggagcagaagaaggatggacttagacatggtataggcactttctactaaagagctgtgaagctaaaaatgccaggtctatgacaggtgcagtgggccaaggccaggtagagagcagcaggaagagaggaggtggggacctgtacctaggcccatctgctgggactgatctagccataggtactcagagaagcccagattggtgcctgacccacccttatggcccagacatggacacctcccagtctgttccttcctgctgcccatggatgggctgtgttagtctgtattctgaggacacagctctctgtctagaggaagttatgttatcttgatctgatggatactcaacgtgaacattatttcaacgtgccacagggtcttggagcccagaggaagaccgctcttgccttttagtttatattctttgtttttttttaaataacattttgacagtctttatggagtaagtctgggccaaaatgataattgacaatgttatttacatggatttctaagttggctaaaaaagttcctttatggttagtgaatatagcccatgtagtttccccgtcttctttagatgccttctatttctatgcccaaagtctgcagttgattttcagtaagctgggggtcatcttagagataaaatgtagatgaatggcattttgctgacagcatacatctttgctatttctgaggaaaatgggctctcgctattaaatcttttgtcaatatttataaaaatagtatttacatattctatctatattgtggaaactatacatttattgattcagtcatttgatatcaatgttgttgagtccctattccaagtgaggcactatgctctaagcacatggcattttaaagatgaataagacaccaagaactttgcagatagtaatggaaatgagaattaatcaattgaagattaatatagtaagtagcagaagagaaataaaaaaatcttctagagagttcagaacagggatgttgattcaagtttatggggattaggagtggctggtaagggaggcattcaggcaaaagacataaaaatgcagtattcccctcgcactcattaggatggctactatattagaaaaagaagagagtaagtgttggagaggatatagagcaaatagaaaccttgtgccttgttcatgagaatgtaaaatggtgcagccactgtggaaaacactggtgattcctcaaaaaatcaaaatagaattatcatatgatccagtaattctacttctgggtatatatctaaaagaattaaaaatctgggtcttgaagaaatatttgtatactcatagttatagcaacattattcataatagccaaaaagtagaagcaatccagatgtctatagatggatgaatgggtaaacaaagtctgtgtagtatatacagacaatggcatattagtcacatcatggaccttcaggacattatcctaagtgaaatatgctagacacaaaaagcaaaagtagggtttcacttaatgaggtatctagaattgccacattcacagagaacaaaagtagattggtggctgctaggggataggggaaggagaaaatggggaattattgttgaatgggtatggagtttcagttttgtgaaatgaaaatgttctgaagactggttgcacgatgatgtgagtatatctaacatgattgaattgatgaacacttaagcgtggttacgatggtaaattttgtgttatatatatcttaccacaatttaaaaaatatagcattttattatgtaggcgtgggtgggaagatacttgacacattggaacttctggccatgcgtatactgttcactcacttattccttcattcattcaacaaacatgtattgaatgcttgctatgtgctgggcactgagctagatataacaattaataaggcttataagacattgaatctatcaatttcatgcttgctaaatatctactcccacctccaaaggcactaagcttctacagttagatattcatagctgcttcctactgacttgaatcatgcataggatattagtaaacaagcaataaaaagatttgaggttgatgggggtgggttcaacagcatggtggtgaaatggaaagagatgggtaacagaatatgaactagaattgaaaactgtgagccagtgctctctaatgaacattaaaaaataaagaattcctatttgaggctgccaacctcagaactaagttatttagaatggacgaaattggcaaagtcagacgtactcaacccaaggagccaatattttgtgaatattatggcaaatgtagtttgagaaccactaccacaaaattgtgaaccataataatgactgagaaggcagggagaggttatacaatttgggctaaaaggaaagacagggcttgtgaaggggagcgccagtgaaagtcagtgtggttcgggtatttgggtggggactggaagcaggaagcttgagcttcctttgccaagagaccctgctggaagggctatcatcaattgactttagctcatcttaggattttcattttttaaaaaatgttcacaggaaccttcactccatctatactttcaatgtctgcctacctttctttcttatacaactttgaacactctctccattcatttaaatatattatggagtgccaactacatgccaggtactgtgctgggctcttattccacctttatttgattgcacatgcctgccaagtcctgggccaatataacatctactcctatgtctggtctggcgagagatgcaaactcatcttcctctactttccttacctccttccttccagtcttcttcaagttgtcttcattgaggcaatttcttttacctgtgtttttaatcccaactcctctagtttccttcttggctttattcttttatcttcctctttgtgctttcaaacattccctttctcctggcccatgcccttcagtctacacgaggccttctcaagtctcttcattctaaaaaattcattttcttgggtcttatattcttcagctgccaccctatctgtatcttttcctattctcctccaagttctcaaaggaatgccttccctcattttcatctccttacattccatctgctgaattttggcttgtgcctgtacctgtctaaggaaactccttgctaagagtctgctttgtcaggtctgaattcacttaaccagtctttgctttgttggacttctctgccccatttgccattcttgatcatcctctccataaacctttctacttaaagcattttacttccttattttcttggttttcctagaatctccttactgttcattttcagcttcctttctgtgttcctcttctcttcctacatttttttttagctttctactttcttaaagcattttacttccttattttcttggttttcctagaattttcttactgttcattttcagtttcctttctgtgttcctctgattgtctctctttctacattttttttttctgtgttcctctgattttcacgcagtctggagttgtcatgatcaatcatagcctactgcagcctcgacatcctaggctcaagtgattctcccacctcagccttacaagtagctaggactacagtcacacatcaccattctcagctaatttttttaagaagcatttttatagagatggagtcttgctatattgtgcaggctgggctcaaactacagggcttaaacaattctcctgctttggcctcccaaagtgctgggattccaggcatgaaccaccatgctcagtctctacatgttcctaaagaggagttttgaatattgaagaacagtattttcaaattacattattcaagttataaaaactgatatccagggttatgtggcaatgacgtaaaaatttgaattgttatttttttgacacatgttctgtgttgtccatcagttcatctgagttccaaatgtcccagctgttttatgctttgtctctgtttcccagagaccctgagtgtggtctagagttgggatgagcattggtctctaatggttctgaaataattgtatattcctgcaaaaacattaagtctattagaaaccagctaatttcattttgtcatttttataggtaacatattctggtgcaggtagtatgtttttaaaacaagtttgcaataaacaatttcccctcaaggttaatataataggcaacaccttttgctgcaacagacggcaagaggtaatgaaagattagcttacattatgattcattatttcaaaatgtcaggataaagtggatctgctgcatctcccagagagtgcatgttttgcttttctaatgttaatggatttactgtttttttccccccaggccaaattcagataatcgacgccagggtggcagagaaagattggccagtaccaatgacaagggaagtatggctatggaatctgccaaggagactcgctactgtgcagtgtgcaatgactatgcttcaggctaccattatggagtctggtcctgtgagggctgcaaggccttcttcaagagaagtattcaaggtaatagtgtgttgaaaacgacttctatttttgatcctatgagcagatcctaagagccaaagcgactgaggaaggaagacatagaatcagccatttgtacaaaacatgaatccctagtaggtccactagtatctttggtagaaacatggagaagagacaggatctcaggagaaggagttgacacatggcagggcagctgaggctgagtaattccgcttccttcctttggcaagactcaatcagtcttgagcaactctacagaagaattccactagctggatctctgaggaaaaaagaaatgttgtctgtgccctgactggggaatgccagatggacattcatgtttggtaggcaactttgcctatatgatctggtatatgctgttaattgtccatgcataattatctctctactcaggccttgtccaggcaaatattctgttttgttctagtttagcttgttctcccctttctctcttccatctctttcttgtctcaatggatgacaggatattttgctatgagctgactcagtggttggtgtcttgtaatggggagatatcatctttatcaaacagttattaagtatctacctgtagcatttcattttcccgcctgcctccattgttttcttgtctatagtttgccaattatagctaatatacggagagctatactttatttctactccagaaatgtctctattattgcattataataggataccctggggaaacactaatcatttttactacctaaaatacctatgctgaatatcctttatctgataggaacagagatctgacagcagcttaggctaaccaaattcattttttatcttaagtgtggggcatttttctctcttcttattctttaccttttcagcttaagtgaaggttagtataaacactaagaatatttctgatggagttttcatgtgattccttctacaaaaacccagatttaagtaacttgttgaaaaccagagtccgctaagttaataaacactgattgaagaagtgattctcatggactttctgtgatagctctttcctgccctgatatgagatgaaagctgggggatggtatatagtatttatttttccttccgttgccagtgggactttttttttttttttaaaagctgttcatatcttaatcgagtagcatgtgaggtcaacatggtctattttaaaagcattttcttcgacacattgcttttaacatcttttagaactctgctgtgagacacatggacttttttgttggtatttttatacaattaatgatattctcaatagtaatctttgtgtgtgtatatatatagaaataaattctaaatgtaagttaatatatttattatttttctaaacatatataaatatatatatgcacacaggctatttaattttattagatgatgctattttaattcagaaaaaaatgacatttatattttgatttaggttagtataagcccttagaggtgttttgacaactctcttaatttgtggttttactgtttatttgattttatataatctaaaataccattgtttttaccaagcatttaatttggcagtgaaagagcgtctgacagaggtatggttagtagataggtctaactgcacaactggatggattgagctgagactgtttcctcatcagtaaaaatgatttgaagcagtggttggcaaagtttttctgtaaagggccagataataatattttaggctttacaagggccatgcagtctctgttgcagctaccgaactggattatagcctgtaaggtgacctgtaaacacatggaagtgattatgtgctaataaaactttatttatcagaataggtaacagatcagccctggcccgtggccgatccctgatttaatgtttatttatctgatctaaatacctttatttatggaagggaataggggatttttaaatctaaagttttgattattcacattttactgagaacttactctatacctgattagatgttccgagagaaataaaaaaaaagtgtaagacataatccataataccacaaaatttaaaatgtatttaggaaatttatttgaggaagtaaatgtacttgttctcatgatacaatcagaaagtaagtcagtattgataaagtgttacctgtatgagaaagataaggaaaacaatagagagatgtaagaaatgaaaataccagttataaattaaaattattaagattgaaagtggaaatgatcttcctccgagaaacaatggcaatattctcacaaattttttacatcatttttgttcagcatttaagataaaattatataaattcccataacatttagtattgtctctaagcattaagaacagaaaaaacagaaggaaaatatatttctaaaaatcaacgaatacagtgtgagatgtttcattggtatggcattatctcaagttcaaacattttgaaaaatgtctgcttactctttgatagttaaaaacaagtatctcagctggcgtggtggctcaggcctgtaaccccagcagtttgggaggctgaggcgagtggatcacaaggtcaggagatcgagaccatcctggccaacatggtgaaaccccatctctactaaaaatatgaaaattagctgagcgtggtggtgcacacctgtagtcccagctacttgggaggctgaggcaggataattgcttgaacctgggaggcagaggttgcagtgagctgagatcatgccactgccgtccagcctggtgacagagtgagactccatctcaaaaaacaaacaaaacaacaccaccaccactaacaaaaacctcttatcgccgtcttgtatacgcagaccagctagtagaattttactgaaacagtagcctataaaaatgcaattccacttggtttcagaaacttcttgtgtatcatagtgtgaagtcacttatcttaggcttttaaaatgggataaatattgagtccaaagttctggaagaagcctagaaagaaggcagagttattaacttttagatatagggaggaaccttaaaattattcagttcttcattcattcacttattcattgactagctttactaacaaagccctatgcaagaccctggaaatgcaatgatagaaaaacctggtccctaccctcacagaacttgtgaggtaaagggggatacagactgataaaccagcaattagatgatggtgtcaagatagaggtgaaggcagtgtcttataggatccaaactccactcagtcctggtggtggttgagtctggctatcagaggtttcctgattaaatctggagggtgagtcaagggagcatggtgaagaaggagggaatgcatgtttagccatgtgaatgagtccatgagtgaagaccaggaggaaaggcagagcgcggggaattctatgcgtaatatttaacaaaattaatgtactgttaaacaaagacatttctgggccatggatttaatcctagactgtgtaaaaaccaagtaattgatttcctttatactttaaaagcatttccatgtatttgatttgtttgtgtgtataaaagggaaataccacaacaagtttaagggtttctagttctgctttctcatcatagtcttgataacttggaactaaaaagtttttgctgaaattgtctgtgactctttataaatcacactgcccctcaaacacatttaaggatggtgaagggtctgacacgtaggtgggaagttctgaagatgccgcagctctccctgttttccttgttacttaagaagagagctagaaatgagtgtacatcagattattctcatgttctaagtgttttggttgaagaggtaaagtgtttggcttgaaagcatacaaattttcatccactacttagtgtacaaacttgattacttaagagattgagtaatggcctccagtgaaacgcattctttttaaaaagcaaagtgaaggatgctatttaagtcagaaggggcaaaattggatattttatgagtttattaatcattgcaggcatagaagtagtgttccttaagatgtgttttagacagagtccctgggatgagttatataagcagatctggttgtagcttcagcagccagatactacctttgagtattacttcaaggaaaaaggactccactgagctcactgcttctctttcattattatttcagaaggttgtgtggcgtagagggggctcaggcctacctatacaccactagctatgttgccattttatattatttctataaggtgccaacagaagctgctcatcagatcagacagacatagcccaggcaagtattgatttacagatgatctttggccaggaagacatggtatcagggtagagtctggttatgggtcaatgcagtggggaccttaggtcctacaggtataactgagagcctgatccaccaggccttagaaagcttcagggtgagacagtccagcaccctggatagctcctttaacagctgtggccggtaagcaggcacttatttgcttaagaactcacgcccatttagctggcttcatctgctttgtagagctctgttaaaaagagttcctatttctccacatcctctccagcacctgttgtttcctgactttttaatgattgccattctaactggtgtgagatgatatctcatagtggttttgatttgcatttctctgatggccagtgatgatgagcatttcttcatgtgttttttggctgcataaatgtcttcttttgagaagtgtctgttcatgtccttcgcccactttttgatggggttgtttgtttttttcttgtaaatttgtttgagttcattgtagattctggatattagccctttgtcagatgagtaggttgcgaaaattttctcccatgttgtaggttgcctgttcactctgatggtagtttcttttgctgtgcagaagctctttagtttaattagatcccatttgtcaattttggcttttgttgccattgcttttggtgttttggacatgaagtccttgcccacgcctatgtcctgaatggtaatgcctaggttttcttctagggtttttatggttttagttggtgggactgtaaactagttcaaccattgtggaagtcagtgtggcgattcctcagggatctagaactagaaataccatttgacccagctatcccattactgggtatatacccaaaggactataaatcatgctgctataaagacacatgcacacgtatgtttattgcggcactattcacaatagcaaagacttggaaccaacccaaatgtccaacaatgatagactggattaagaaaatgtggcacatatacaccatggaatactatgcagccataaaaaatgatgagttcatgtcctttgtagggacatggatgaaattggaaaccatcattctcagtaaactatcgcaagaacaaaaaaccaaacaccgcatattctcactcataggtgggaattgaacaatgagatcacttggacacaggaaggggaatatcacactctggggactgtggtggggtcgggggaggggggagggatagcattgggagatatacctaatgctagatgacgagttagtgggtgcagcgcaccagcatggcacatgtatacatatgtaactaacctgcacaatgtgcacatgtacactaaaacttagagtataataaaaaaaaaaatttaaaaaaaaaaagagatcttagttcttttgggcttggggactcactcttgttcacttaaagtggattggttcttacatttattttcatagttgtgtctggtcaccttctggcttgatgtatgcccctatgtctggaaaaggttagagaatggggtagaagtggaggctgcccgcccatcatgtaactgttttatcttttcagagatacaattgggatcctaactctttggtctccgtatttccacacttgctcttatacgattcagtttccatgcaacagcaggagagatattttagatatattaatcaggtcctatggtcttgagtttacagctctcagtgtaaatcttactctcaagagaaaaattttccttctgcagctgaaaacattcgacatattctctctcctattccttctcccccattcactgtactccaggcacaccagcttttatttttatttattttttgctattccccccaacacgccaacatgttccttcctcaggatctcagcacatgtggttccctttttccctttgcttgaaatacccagatctttacttggctggtttcttgtcattcagattctgcccaaagtcactttctcagaagtagtgttacccttccacgagtaatactactcttacttctctttacagctctcaaattcttatgaagttttcctatttattcatttgtttgattattgtctgtctgcatcaggtaccgtgcaaacttggatgtaaactcagtgatagctgatttctgttcagcattgtttgttgctatagctccagtgcttttagtcatgttgggcacgtccctactaaatagtagaatatggcgaagggtcagagtcatgatagatagccggatgtggtggctcatgcctataatcccagcactttggtaggctgagatgggcagatcacgaggtcaggagttcaagaccagcctgaccaacatggtgaaaccctgtctctactaaaaatacaaaaattagccagttgtgatggcatgtgcctgtaatcccagctactcaggagactgaggcaggataattgcttgaactcgggaggtggaggttgcagtgagctgagatcgcgacactgcactccagcctgggcgacagagtgagacttcatctcaaaaaaaaaaaaataataatgatagataaaaactgctagaggctctctgagaaggaagaaatgtcactgggttaggttggtaagagaagtgttaatgcaagtggtacatttgatataagcatgcaaataaatggtagtttggaggaaaattccagaaatgtgaaacagtattgagaaattgagtaagccagctttgagagaacacacggcttattgtcctctccttctgttttgctcctcagctctctaaagtgggcattctctagggtcctgtcttcaatctcagcttctttttcttcttcatccttctctttccacctagtttcctagggaattatatatatatatatgtctggtacaggctgaattgtgtctcccagaaagatatgttgaagtcctaatgctcagtgcctcagaatgtgaccttatttggaaataatgtcattccaggtgtaattagttaaggtgaagttatactgtggtgtaacccacagtatacttccagtatatacttcagtatatgggcccttaatctaatgtgactgatatctttagaataagaagaaaatttggacacaaacacagagaagagaatgtcatatgataacagagagagagagagagaagagagagagggaggagagagagggaggagagagagggaggagagagagagagagaaggagaaagaaagagaggagacagaagagaaacatctacaaagcaaggaacaccaaagattgctggtgcctaggaaactaatataataacataatatttggggcctaaagtgttacagctgcaccaatatctcccaaatcttgctcctagctcctgccccagcctgattttctcagtgactcccctgtgtttccctctgccaccagcccctccttctgcctgctgtgtgtgacagttcccttgccactccctccggcatccgtacttcaaactggggagttagttatttccattgtttcttattgcagcctctggctctgacgtttccagagctgttgcatagctctattgagtctatctccttaaatgcattttcatccacttaccattgctgagttagctgcattacctttcaccaggatgcttgcaataatttattgtttccatttgccttctccttcatctaagccgtttgcttatgtcttttttcttgttgcgagacattctgcacattgccactctattagtggtcataaagcaaatcactgatcatgtcaatacgcagtacaagatcctttaatgacctccatagcccatggaatggtccttaaacaagagttcaaggactgccacaatcttgttctagcctatctttctagtcattttaaagtcaccatttttacttgtgaaataggcactccagacacagtgaattccttgttcttctacaaatatgatgattccatttctttgctgggaatttctttccagatttacctgtaaaaattcttcgaaccctaatcaaaagtgactgttgttaagcccctgaagataatgcagaaattctctctctcctgggacctcgatattagtttattccattgtattgcatatatttgattgcccatgttctgtcccatactgactgtaaagtccttaaaggtgagggcccaatattctcagagtcactcaataaataaataaaagaataaatggaaattaggatcagtttgtgggctttagcaacacaaaaacattatactttttcaacatgggagaggtatgatgaaggagttttttttttttttttgagacagagtctcactctgtcactgaggctgcagtgcagtggcattgtgtcagctcacaacaacctccgtctcctgggttcaagcaattctcctgcctcagcctcccgagtagctaggattacaggcgtccaccaccatgcctggctagtttttatatttttagtagagacggggtttcaccatgttggccaggctggtcttgaactcctgacctcaggtgatctacccgccttggcctcccaaagtgctgggattacaggcgtgagccgccgcacccggctgatgaaagagtctttaatgcagattaatctggcagaggtatataggagggaccagagaagggaaagaatcaaagcgtgaagaccaatttggctgatattcaactagcttagatgtactaaaaatctgtactttttggtatttgtgaaatggaaagaaggggaatagaataaaggatattataatgaaaggatatacattgcttgaaggtaattaaatatgggttatccaggagataaaagagttaaagaggttcagacatagactgaatgaactgagaaatgaatgacttggtcaccaagaggaaggccagtcatcagggggtaggataagttcaattctagacatgctgcatttgagatgatagctggatgtccagatggaattatccagcagccacagaaacagaatcagctctctgcggatattccaggggtggggatttgaattaatttcctcaattaattttaaagaaacttgatgaaaagaatggtctgaatacttcttgaaggttgcacattattaataatggagaaataactctaaaaccttcctcttgattttcataataatataagcattccctgaatcttaccaaaccttgtaagaaacactcttattataaaaagtgtatgtgcaaagcccttctaaacaggaaaatgataaattagtcctacagggccaaatgcagctctctgggagcttacaattcagaaagaacatcctgctaccagcacattaagctgtacaaatagtaaactgcagaaacaaatataagcatttttatgatgtccaaacaagaaccaagcaggtgtttttttttttttttttttgcagattatttatactgtggcagttcatagcctccttttcggacccagagcttgcataatccttcccttatttctacttacgtgttttactctccatcatgtgttaacatacatactgtgcaacagaaatgactatggaggctgagggcagcagagttttagtgtgtacacatatgagctgtcatgtaattttcaagtgaaagcctttgcaatgaaactttttaaaagaaagtcatggccgggtgcggtggctcatgcctataatccagcactttgggaggctgaggcaggcagatcatgaggtcaagagattgagaccatcctggccaacatgatgaaaccccgtctctactaaaaatacaaaaattagctaggcatggtggtgtgcacctgtagtcccagctactcaggaggtggaggcaggagaatggcttgaactcgagaggtggaggttgtagtgagccgagattgcaccactgcactccagcctggcgacagagtgagactcgtctcaaaaaaaaaaaaaaaaaaaaaaaaaaaaagagaaagaaagaaagaaggaaaaagaaagaaagagaaagaaaggcgggcattaacttcaggtattggtaaatttgctaggtgtttggctactgtttctcatcagagaaatagaaagacacaccatgaaagtcaaggcctgaaaacctcattccatgtaagaatgacatccccagtgttaagtgcttgttagtggttaatgcgatcctgtgaaacttagatgtgtttgtgcacacatgcacgcatatatttgaagaactcagaagagttaaatcacagcctttcaacctgtgaaatgacagtagttcttcttttttcctctccctttggctaagtcatctttatcttggagataattaagacaaaaatgcctctgacaaataaaatcagtatagaacccctatttcttggcagcttttgtggacacagctgaagctttcagaggtcttgaaaaaccatggcaacaaatgcctttgaagggtaagcaaaggttccaaatgtttttaatcgctggtgttttttctgctaccacttcaagcatttttcttcattttttgttcatctgatcaaaattaaatttccaatttccctactaagtggttctgtcctggtcatgccattgactatttccattaaagtagtagagtttgtgcccacatatggttgttaagctcatcaacaattccattagaaagctttgtttatcagtggcaataatttcccataaaaattatagataggttttaatgggcacattttcaaaaggcatcaactcgtcctcaaaattatgtgctgacactgttcttacaaccatggttcgtggcctaattccaccaaatttctctcttcttcatagagaactgttgtcagtagctttatatccttttaaagagaatggtctgtatctctgatactcattcagagaaatgagtattttagacgtaggttgctaattttaagctatatactacactatgtcagcactatataggttatcttgtaacctgcttgcctggctatttggctgaaaaataacaacatgtaaggaaaatctatttcataagtctaacatttactttgtaaaacttgttctggctactctgttaattttccacttacgtgtgggttagagagcagatttgatttttttttaagcgaaagatatggcttacctgagaaaagaacatagtggggaaagcactcctattattttcctcatatttccattttcctttagcggaaataaaaagacatttcagtttttcagttgctaagaaatgaaggaaccaaagacaaaacaacttaattattaaattacaatttatttctgtaataagcactcgttctctctgttttcctggggaaagagtatgtggactttcaattttatccaaataagcatcatctttctctgattagtgtggcagtttcaaaatcatgtattaggaagtacagagtgaatgagtagagaatttctaaattagcacccaaggttgggtggctagattatgtttataaatatgaacttttgtattaagtgcaatgatttaaaagaatgcctgcatcactttagggcatttcattaagtgctgtgcacaatatttttccttatacatcataaaagataaattatagttcataaaatagtataaattcctaattattttgtgcttttgacacctcagagttactaataagggatttcgttttaaaatgatatttatttatttatttagagacgcagtctttctctgttgcccaggttggagtgcagtggtgcgatcttggctcattgcaacctctgcctcccaggttcaagcgattctcctgcctcagcctccagagtagctgggaccacaggcatgggccaccacacccaactaatttttgtatttttggtggagacggggtttcactgtgttgggcacactagtctctaactcctgacctcaagtggtcctcctgccttggcctcccaaagtgctgggattacaggcgtgagccactgtgcctggctcgttttaaaataatttaaaagtatattttgccaccactattaaccagttaagccatgatggtatattataatcaccatggagatggtttttctctttattttattttgtttgttttctgattgctagcatgctgattactcttcctattctacaagtgcctgcaggccagccccatttttgctctcttcacttcatttttcatttctccctgtttcactcttcatagcacatttgtactctgtccacacctagagacctccctgttgaagttcttcacattctcttccctagagagggttaacttgttgagctcagagacttaaacttaaaataaaatgtaacagatatgtattgaatgactattttattttagctctaggagaaatgcaaagatatatcatccatagaccctgaaatccagctaagggttctgcttatacacaaggtgaaaggttgtgataatgcacattaaacaatagaagagttaaattcagcactataagtgatgcctcaaagcagcataatgggaaaaaggggtatttcagaaaaaaatggtatgagttcagaggcaagagaaaacagaatgctctagattaaactcaaagactttatggaggaggtggtgtttcaatagatacctttccacagaaccatgaagagagttctacttaattgtaagtggcctgtgatttgtcgttagtcattgcatgctcaattctgcatgtgtgataactgtgtatttttatggcaaaatcgcaattacttttgcaccaacctaatagaatagtgtgggtttaaaaaaactatttgtaatatattcgaacatatttcttatatatatgtttcaccatcattagcagtaaatctattttgcatccagagattgaataatattttgtttctaggatgtgagtgatgtactattttaacttacttttgaagtttgacatgggagtgatattaataaaatctaaagatgctcctaaagaggagcaatagataatgtaggtatagataatgtagctattatggaggtaagtgtatttgatactttttattatgatatgaagggaaacaactagtcccaagctacaatttattaaggtaggcttagcttatacgccataatttttatgtttgcaactttcttgattttcttcctctggctttacttctatgagatatttatgaaaggatgtttttaaaaatggctagagacttttgcttctaagagttgacataaacttttccacaacatgaacaattagtagatgatacacttagatacactcttgaatttttaaaattgtggcagtaaaactgatctcagagaaggaagaaaatgctttggccagcttttatcaattatatacaacgtgtttggaagattcagttcctctcgccttctttctccctatataatactttttcttaaggttggtactattgatgcacttggtgtaaacacatgagataatagcaaaatatgaatctaggtcccagaaatgggcttctttcactctgccacctgttctgactgcatttctcctgactttctgtaaatcccggggaggagctggaagagcaaggtgtgtgctagcataactttggggatgaagtacccttctttttttctgattttgttcccacatctccttactggaccaagtaagggcatcagtgtcaaacttcctgattgaagatacatttttgccctaccatgaagggctctgggtaacatttattgcttataaaatgcttttttggtggctactttgtttctgaatataaggcaagataaaaagtttgattcaagagtttcttgtaaacactttgtgtgtgcgtgtgtattcatatatggctgcacacgtacataagtccatacataagtacagtccaccctccatgtttgtgggttcaacatccatggattcaaccgactgcaaatcaaaactatttggaaaaaaatggatggtagtgtctgtgctgaacacatacagagattttccttgtcattattccctaagcaatataacaactgtttacagagaatgtacattgtattaggtattataaataatctagagatgttttaagctatatgggatgatgtgcgtaggttatatgcaaatattatgtcattttatataagggacttaaacatctatagattttggtgtctgaggagtcttcgaacaaatcccccacagatcctgaggggccactgtatatatatatcttcataaacacacccacacacacaaacacacccacccacccacacacacacacacaccaatgtgtatatacttttttttcttttttttaattcgagaccaagtctcgctctgtcgcccaagctggagtgcagtggcgcaaacttgcctcattgcaacctctgcctcccgggttcaagtgattctcctgcttcagcctccctagtagctgggattacaggcgcctgccaccatgcctggctaatttttgtagttttagtagaggcagggtttcaccatgttggccatgctagtctcgaactcctgacctcaagtgatttgcctgcctcggtctcccaaagtgctgggattacagatgtgagctaccacacccagttgcaatgggtatagacttttgaaatgtgtactacaaaatattaacagtgactatctctgaatgataggattatggataaattttgttctttttgcatatctgtatttttatttttccacagtaaacatcttttacttctgtaataaaaacttcattaaaaaatccatgctgcaattgattaattatatactaacttttttttactcttccctcagtacagaaagattattctgtatttaccaaatctttacactttatttgcaaatcattttgactgtctgtttgcaagaggtcaaatttgcactcaagttcagctttcgttcattatccatgagcccaagagaaattgtgtcaggtggacatcaggtagctgaggccaatacaatattattcctttgggttgttgagaaatcatagcagaggaaagcctgtgttgataatagagtaccaccaggaatctaggtctttacagctgctggcctgaccagcaagggtaaaatatttcagtcacgcagccagtgattattaaccctagctctatattccagagaggaagagctagcctttttgggttgtgatctgtcactgattgcagttgcacatatactagccatgaggtctacacacatgtgaagagcatgctacacacatagactagatacactgactcatcagcctggaaacagtgcctgaccctcactttgattgtttgaatgtgtcctgacccattaccctgcctttggatccgttcctgtttttttttttttttttaaagcattttatctgtgaattaaaatagtactttccattgcttcatttttttttccctgaggagtttagctttgtttaattagaaacaagacaacaatcattactggtctggtgcaatcttgtttaggactcctcttttgcttagaactatacctggattagggatcactgtgatttagagtgtgcagtatgaggttatttaaatacttaatagtatatttgaaatgaaaagagtagaaattaaagactgaatcatttaccaagaaataacagaggagaccaatttacttctgtaagatttagtagaggctgttcccttctttataattggctttgtttcagttaccagttaagtggggtgaactgttattaaaaggctatgggtaaggttacagtagcattcttctaagaaaaactacaggagtagtcactgtgcagctatctgctttgtacctgccaatatggcagtagatatggaagggtcagaaaaacaggacttcatgttcaataacttttcctttttcctttctttcccttatttttttcatgtcttgtatgcaagatagcatgcctattctttaccttcaatgtatttttgaatttttaatccagatcatattttatcacaatttgtaacatgtagctaataaaaatggttattacatgagaacttgctttacaaattatagatcaaatttttatacaaattattatgtcaccatagaaaaatagttacgatttatctgtttagtcttagaaaaattatttcacatattagttaaggcttttagttttgagtgagcaaaatccaattcaaactagctttgggtagaggtgggggtaaaagagaggaatggatttcaatggaaggtttacttgcgtgtcttggctaactgcaaacatggcagggtgcaaccagaccttagtgatcacagacccagggactcagaccctgtgaggaccttagccttaccgccactcttctccatgtgtcagcttcgcgttctctgtctgcaagtatgcattttccctaaggtgggaagcagagttggcaacagctgccagggttgacttcctgtggcattcttgcagttagcaaatattagagaaggactctgcttggcccagctttgggacacacctctggaccaactagctgttctcaggaggcagtaacatgtacagaggtgatccctggggctcgccctgtgaaatcattgtgagccaatcactacctccctccctgatgctgatgtctactatgtttgatgtctctgaacttccatttcctcaattgtgaatggcaccctggttcctaccttgctggatagatgtagtgattagagttcatgcttaacctacaggtgctctgtaaagaatcattggcatcattacctcttgttggctctatcccattccctatagatatctttctgctctgagactaagcagagaaaataatttaacatttaattattgtgcttctaaatccacttttacctcttctttctttacttttctctttattatttttaattatttcaaaaataaaattgtatatatttaaggtgtacaagatgttttgatatacatatacataatgaaatgattactgcagtcaagctaattaacatcaatctcctcacctagttatcatttttggggggcatggagtgagagcacctgaaatctctcttagcaaatttccagtgtataatacagtattgttaaacatagtcatcatgttgtacattagatttctagacttgttcatgctacataactgcaactttgtaccctttgaccaatacctctctattttctccactattccatgcctgaaattgtgggatataggtatatagtgtgtgtgatatatatagagggagtgatatatgtatatataattgtgtgatatatatgtgtgtatatacaaacacacagacatacacacatgtacatatgtatatacatgcacacatacacaatgggatattattcagctttcaaaaaggacatcctgccatttgcaacaacatggatgaacctggatgacattatgttaagtgaaacaagctggacacaaaaagaaacatgcaccttacttcttagacacaaatttctttctcatagccagcacctgaaaatagggccaagtattttgcatgatttacaattgactgtataaatgtagcatagccagttatatgatgtgttaccatttctgctataaaatcaaaagaagagatcagaacatttaaaaacttccctgtggatttctacctcttacctaagctttgttcttgtttttttaaacctcatgaacacgaagctttagatagcggaggtcatgtatccttgggctcaaatatacagtttcttagcaatctttgattgctacattgcccttttttgtgtttttaactggccttccctgacttaaaatatactttaaaaaataacaaaggtggtatttagtttgcacagtatggaattaaaggtaaacaactttaaattaaatttggttggatgtataaattattaaaatatcctttctctcatggctgggtaagtctgcattttccattcagcctgctatgtctctttccatgagaacactcccgaagaatggggccctgcttccaaacaagccaagcattttgtagtaaattttaaaaagctaaatttcataataacctttataattgctacctgaaaatggagtttggaatggcaccaaattattaatcagtagaaggagaatagattgcaaaaaggtaattatatcaaattgaatgcttcttgaaatatattctgttaaataaaatacagttcctcttccctgttctcatttgtaagcaatgaggacaattcaggtagcatgaatcaggaatcagagtacttttctgttccgcagattggcttaatcattttgggctcacttcaaactgtagatgagcattgtcctttaacctgccgggcagcagaggtgaccacgttcactgcaaagcccagaagtgagttgttcatctgggttagggtctcaggaagaggcatgttatgacttccccacattcctggacagtttagactgtaattcttggttgtttaaaaaggtgtttgaatgtattttgttcagaggcttgagtaaatggctcttattcttacacttttttttttgcccgctttttccagcattagaatagtttcagccctgacaattagccttatgctgactggagtggattttttgcgtaggaccaagtgttttgcatgatttacaatggactgcataaatgtagcctaacaagttatatgatgtgaagaaaattacttaagggtaaaaatggattgtttactgagaaaatgatgttattataaactggtttgagggtattgtggtttagatgctgtccttacaaatttgagctctgttggtttggagatttaatatctaataataatagttaatgtgtaatgaatacttgccctgctccaggctctatgttacgtgtcctgaatgcatcatctcatttaatcctccataaaatttgaagcagtcagcattgtaattaatctcacttttcagatgaggaaaccaaggtatgtaagaaacaaaaccagtgttgaatctgactagtacgactgcaaagcctgactcttaaccattgtgttctgttgccttctccaagggaaaggagtgcttccagaaaggccattggaagtgaggagtgtcacctgataatagctggctcctcatcccactaggttaacaggcaacagatgggggccacagagttggctggagttagtcctgattgccaagggtaaatggggctgttaccatgcaatggatagaaactaggatgctcctgtgtgtctccttatatcctaccaggtgtagcatgaaggttaaggacaattccgtcctcttatttggagaggagaccaaggccctgtaggactaaaggtttgggtgagctgaaagccaagggcaattggcccagcttggggaggagagttacaaatacatttgtgactatcagaccagaaacagactgcggtgttcacctgcggtttgggtacctgctgcttgttctttgctggggtatctgaagactgaaaacacagctcacacttagcctttttcctattctgtgtgaaagaactgtagtagttttctcttgcttaacaaggttctagtggtgaagtttattgcttagtctgtgagttgtagggaaataaccacaggatgggatggtagcagaacgagaaaagaaaagaaggttgtagatgccaggctggtgtcggcttgaaatttttaaagtatacagttcttctttatggattattaaaaaaaaacagcaaatgaatacacaagattaaatgttaagcagtacaacattgtacatgatgaaaggttaaagtctttctctggtctcattcaaaaatctacagtctcttgtagtatagtttgaagtcaggtagcgtggtgcctccagctttgttcttttggcttaggattgacttggcaatgcgggctcttttttggttccatatgaactttaaaattctgtgatgaaagtcattggtagcttgatggggatggcattgaatctataaattaccttgggcagtatggccattttcacgatattgattcttcctatccatgagcgtggaatgttcttccatttgtctgtgtcctcttttatttcattgagcagtggttttgtggttctccttgaagaggtccttcacatcccttgtaaggtggattcctaggtattttattctcattgaagcaattgtgaatgggacttcactcatgatttggctctctgtttgtctgttattggtgtatagaatgcttatgatttttgcacattgattttgtatcctgagactttgctgaagttgcttatcagcttaaggagattttgggctgagacgatggagttttctagatatacaatcatgtcatctgcaaacagggacaatttgacttcctcttttgctaattgaatactctttatttctttctcctgcctaattgccctgtccagaacttccaacactatgttgaataggatggtactggtaccaaaacagagatatagaccaatggaacagaacagagccctcagaaataataccacacatctacaaccatctgatctttgacaaacgtgacaaaaacaagaaatggggaaaggattccctatttaataaatagtgctgggaaaactggctagccatatgtagaaagctgaaactggatcacttccttacaccttatacaaaaattaattcaagatggattaaagacttaaatgttagaactaaaaccataaaaaccctagaagaaaacctaggcaataccattcaggacataggcatgggcaaggacttcatgtctaaaacaccaaaagcaatggcaacaaaagccaaaattgacaaatgggatctaattaaactaaagagcttctgttctttgctggggtatctgaagactgaaaacacagcaaaagaaactaccatcagactgaacaggcaacctacagaatgggagaaaatttttgcaatctactcatctgacaaagggctaatatccagaatctacaaagaactcaaacaaatttacaagaaaaaaggaaccccatcaacaagtgggtgaaggatatgaacagacacttctcaaaagaagacatttatgcagccaacagacacatgaaaaaatgctcatcatcattggccatcagagaaatgcaaatcaaaaccacaatgagataccatctcacaccagttagaatggtgatcattagaaagtcaggaaacgacaggtgctggagaggatgtggagaaataggaacacttttacactgttggtgggactgtaaactggttcaaccattgtggaagacagtgtggcgattcctcagggatctacaactagaaataccatttgacccagccatcccattactgggtatatacccaaaggattataaatcatgctgctataaagacacatgcacacgtatgtttattgcggcactattcacaatagcaaagacttggaaccaacctaaatatccaacaacaataggctagattaagaaaatgtggcacatatacaccatggaatactatgcagccataaaaaaggatgagttcatatactttgtagggacatggatgaagctggaaaccatcattctcagcaaactattgcaaggacaaaaaaccaaacactgcatgttctcactcataggtgggaattgaacaataagaacacttggacacagggtggggaacattacacactggggcctgttgtggggtggggggaggggggagggatagcattaggagatataactaatgtaaatgatgagttaatgggtgcagcacaccaacatggcacatgtatacatatgtaacaaacctgcacattgtgcacatgtaccctagaacttaaagtataataaaaaatatttaaaaaatctacagtccctttctcaataggtaaacactattaacaatttcttctgaaaattacatatgtacacacacacacaccccacacatagatattttgttaacatacattaccttatgctctacacattattctgtgcctagcttttctcatcgaataatgtgtattggagatctttccatataagtacatattggtctcactcattcatttttaatggctgtatattagtccatagtatggagtaataataccttttattggcacaaagttttgcagttgacaaagggtttgcatatattgtttcattgggttgtatagcagtcatcaacggacatatcaagaatcccagaagggtaacctgggcttcacccaggatcgcatggagcttgggactcaaacagctaacattccctaaacaggcccatattcctgcaatttagtgcagctgctacaacatttaggtaaactctttgaaagcagtaaaaagatcaccaatctgggacatcaagaagccagacgacaaggagacatagacctcaggtgagtgagaaaagagaataattgaagtttagaactgaatgggcactaacgaacaacagatacatctctttcctttcaccgatgaggacctgggtgtggcctgtggatgttaagtagcatgtttaggccacacagctggattgttttctttcctgaggctagctctggagaggggaggaaacggagatgctagatttttccgggctctcttttctcatcagctagaatgggatgtggatggaatgcagcttgagaagccaaacacccttgagaaatgagaactctgctttctgatgtggggcgcatcctatctgagataactctcctgccagcgcagtatgaccattgcgacttgagctgtgtgggtgcccaggtggtgtagaccttaaaaccactcctgcttttgtttactgaatgtctaatattcacacagttctttgtctgagtgcagggccaaagcagcaaataacgaagaagctgtgcccaaccataagaactatgaaatgctccagatcatctacgctagtttgagttaaatttaccatgcaaataaatatagaacatttcttcttatgcatagattgtatttgttctattaaacaaccatcctgtaaaggttttattcattcatttatttttatttgttaggagaaattgttatttaagctaagaaagtagactagtagttatttctttttttttgcttattatactttacgtttggggatacatgtgcaggttagttacgtaggtatacacgtgccatggtggtttgctgcacccatcaacctgtcatctaaattaggtatttcttctaatgctatcccttccctagccccccaccccctgacaggccccagtgtgtgatgttcccctccctgtgtccatgtattctcattgttcagctcccacttatgagcgagaacatgcagtgtttggttttctgttcctgtgttagtttgctgagaatgatggtttccagcttcatccatgtccctataaaggacatgattgcatccttttttatggctgcatagtattccatggtgtatatgtgccacattttctttatccagtctatcattgatgggcatttgggttggtttcaagtctttgctattgtgaatagtgctgcagtaaacatacgtgtgcgtgtgtttttagaatagaatgatttataatcctttgggtatatacccagtaatgggatggctgggtcaaatactagaaggctacagtaaccaaaacagcatggtactggtaccaaaacagatatctagaccactggaacagatcagaggcctcagaaataatgctacacatgtacaaccctctgatctttgataaacctgacaaaacaagcaatggggaaaggattccctatttaataaatggtgttgggaaaactgactagccatatgcagaaaactgaaactggaccccttccttacaccttataagaaaattaactcaagatggattaaagacttaaatgtaagacctaaaaccataaaaaccctagaagaaaacctaggcaatacaattcaggacataggcatgggcaaagagttcatgactaaaataccaaaagcaatggcaacaaaagctataattgacaaatgggatctaattaaactaaagaacaactgcacagcaaaagaaactatcatcagagtgaacaggcaacctacagaatgggagaaaatttttgcaatctatccatctaacaaagggctaatatccagaatgtagaaggaacttcaacaaatttacacacacacacacacacacacacacacaaacaaccccatcaaaaagtgggtgaaggatatgaacagacagttctcaaaagaagacatttacactgccaacaacataaatatgctgccaacaagcatatgaaaaaaagctcatcatcactggtcaagagaaatgcaaatcaaaaccacaatgacatactatctcacaccagttagaatggcaatcattaagaagtcaggaaacaacagatgctagagaggatgtggggaaataggaacgtttttacactgttggtgggagtgtaaattagttcaaccattgtggaagacagtgtggcgattcctcaaggacctacaattagtagttatttctaggtctgacgggctgtcttttagtttgttttcttattctgaggtggacttaaaccaattttaaaaacagggatgactgaattcgtgtgttaatcttgtactacaggaaccctttgacattgattcagaagcacccaagtgtttgttcattaatccttttttatttttgcatattatttatttttcaacttttattttaaaaatcaggggtacatatgcaggtttgttacaaaggtatattgagtgatgctgaggtctggcatatggatgaatctgtcactcaggtaatgagcatagtacccaatgatagttttttgtacccatgaagttttttgtttctttgtttttttttgtttgtttgttttttgagatggagtctcgctctgtcacccaggctagagtgcaatggcttgatctcggctcaatgcaacctccgcctcccagattccagcaattctcctgcctcagcctcccaagtagctgggactacaggcgtacaccaccatgcccggctaatttttgtatttttagtagagatggggttttaccatattggccaggctggttttgaactcctgacctcaggtgatctgcccacctcggcctcccaaagtggtgggattacaggcgtcagccactgtgcctggccccaatagatagtttttcagtccttgcccctgttcctccttcccacttctagttatcaccagtgtctattgtttctgtctttatgttcatgtgtaccaaatatttagctcccacttataagtgagaacacatggtatttggttttctgtttctatgttagtttgcttagatagacctccagctgcatccacgttgctgcaaatgacacgatttcattcttttttatggctgtgtagtattccgtggtgtagatataccatatattctttatctaggataactgatgggcaattgggttgattccatgtctttgctattttgagtagtgttctgatgaccatatgggtgcatgtgtcttttcaatagaacaatttattttcattactcttatcaggatacctgggaggaacttctcctacgaagttaatttggggggactcctgaagatgagtgaaaccccttattaagcacttagagggtcgaaagtgtacaagggaacgttcaggtgtgacagcttgagagacatgcatattccacccccacaccagagcttagtgaaccgtcttttctattttctcccaaagcaccaaaatggcccagaaattggaagatggaaaatggacttatttatgagtctgggaaggcagggcagtaagcacagtcctgttcagggtttctgagttttaccctcttgctctgattgcgagatcattttcctcttccttgcttcttcagcttaggacaagaacagtttggaaattgtttctactactttggacaccatagtttagatttcaaatgagtacaagtgggaggaaagcttggataattctctggaaataatcgaacagagtgaaggagaggggtctacaggtgagctgaatgctgcatggcattgaagtaatcacaccagtcgtcacaattctctcctctttgatggttatctgttgtcccagaaggaacaatttcagaaagtccttttctggactgtagaatagcacttgcttatttgatgagccctgagaagcattactgaaagcggttcattgtccctgaggtattacaatgagatggtggtcactgatttcattatgttttcctttattgcagctgttggtttgatcctttgccaggtgcttaaaacaattgtggttttgcagatggtaagttagaggttggacaaaaaaagggatcatgtcactgccctggccaaaatttcaacagactggggtctagtgagggcaaatagatagaggctttcctcttcactttgtgttatttagaaaaagaaactttccaggacaaatttctttcctagaattccttttttaaaaattttttttctttgaaaatttacttagatgcaaataatatatttttcttccttttaaataataaaagtaagatgtctcttggaggtggtggttgtcactgacaagattaactagaactgactagctgtaaaaatataatttgggatgcattattaaggcatgccatttttatttgcatgccattgtgtacagatgtggttgtgaaatagttcaaatcatggcacattgaatgtcctcactggatttttaggaatgtgttcactgagacagccaaatcctatttcattttctttggctcattgcattggctgtaaattggagatattcactttaatatgtgagtcaaaatttatttccaaacataatactgcagttgttctgtcacagaatataaatttcttatttatttccttaatacgttgctttctactttttctttttttctttattttattctggagtatgtggaaaggttttccagaaagatttgcatatgccataatctactgatgaatactttttttgggttactctttcatattttgggagatataactatggaagtgttaggaatcatgggttctggaaatagttttattactgcttctgaaatgccctcccaatgataccatatagtaattccatcagggaataatatttttattatagtttaaaatataacttaatatttaggtgctcttgttcagtcatcgtcaagttctttttatttcaccaaccctaccatggcactcctgaaagacttgtgaatgcgacagacctggatttaatcatggctttgccatctgctagccaagagaacttgaacaagtgagtcaacttcttggagtctcattttctgcttctgtaacatgggaactagggtaatctaactcattgcttgtgatgattagatgaggcaaaatgctgagttcacctagcccagcacctggtccatgggaagcatgtgggttctgctgctacccagtccttggcccagtgcatggtgcacagaagggaatctgaacaggccaactttattcctattcttgacccaccccatgtagatgcttcctacatcttcagcttcttcttcttcttctttttttttttaaggcagggtctcactctgtcccccaggctgaagtgcagtggcacaaccacagctcagggcaacctcgacctcctaggatcaagtgatcctcccacctcagcctcctgagtaactgggatgacaggaccacactaccacacttggctaatttaaaaacttttgtagagctggggtcttgctatgttgcccaggctggtctcaaactcctggattcaagtgatgccctcacctcagcctcccaaagtgcctggaaaacaggcctccacacccagccttcaacttcattttaaaaaattgtggtaaactatacaattcatccatgaaaccagaaaccacttgtaccccaaaagctattgaaatttaaaaatatatatattaaaaataaaaataaaattgtgataagatatacataatatgaaatttactactttaatcatttttaagtgtacggttcagtggcattgagtacattcacatttttgtgcaaccggaacttttcatcctcccaaagtgaagctctgtacttattttttattttattttattttttgagatggagtttcactctagtcgcccaggctggagtgcagtggtgcaatctcggctcactgcaacctctgcttcctgggttcaagagattctcctgcctcagcctcccaagtagctgggattacaggtgcccaccaccacacccagctaagtttttgtatttttagtagagacggggttttgctatgttgggcaggctggtctctaactcctgacctcaggtgatctgcccgcctcagcctcccaaaatgctgggattacaggcatgagccactgtgcccggccagctctgtgctcattaaacaatgactccaagttccccttccccacatctcctgctgacctctcttctactttctgtctctgtgagtttaactattctaggtacgtcatgtaagtgcatctatgtgatatttgtccttttgtgtctggcttatttcacttagcataatgtcttcatgattcattcatgttgtagcatgtgtcagagtttccttcctttttaaggctgaataatactccactgtatggatagaccacactttatttatccatttgtctgttgatggacatttggatgatttccatcttgtgggtatactgagtaattttgctatgaacatgggtataaaaatatctatttgagtttctgctttcaattattttgggtctacacctcaaagcggaattgttggaagtggaattgctttccacttgttggaagtggaacatggtctcccacttcattttgacacaacttccaagcttcagaactgtatttacaacagcgtgctgggaggtcgctttgagtttatgacggaaatctcatatcaacaggttttaaattgttccatacgacttcttgccacccctgtcccaattcagatcttttttttgattaatggtatgaacaattttcaaaatatcctggcacaatctattagaatatttgactttctcctcctcctccctttagccctaactatttggcaaagctgttgaaaacttcttcacatcttctctctgcctcatctactttgctactcaaagatgattagtagatgttttggtatgattttttttccttggcataactgtgaatacttttaatccttcatgttttatgacaatcatacattcccacttttgtgtaaaaacattttgaattcttctttctataacaaattctttgccagtcttccttttctttttgcttttagtgagttccaatgatatcattgtttgaacctgttttctaattctatgctgctattcccatactccctctttgctttggttacagtagataatgtgggtggtcctaccaagacaaagcatcactcaggagtcaagggctggggtagatacagacactaggtactgcagaaagtcaatatctttctcagagtgtaaggcaggacaagacttctgttcccttgtaccgttgtggctggggagttggactgtgcatttcatccttgtcatataagtcaaagtattgcccaaataacttaattttggtgtggtcttagtaagtatttgtctcgtagatatgttaaatagaagacagtaacattgggttggctgtgttaattcctcactttttctttcctatacatgagcttcctaagaagcggaacacttggtggtcagacagttgcagagattccttgcatgattgcaatctggaaagtagataccattcttgaatgaagagcttgccctttggagaagctgggctttccatatatggaggttgttagaatgcataagagttcagcttctggaatgaaaggagaccttggttcaaaacccatctgccacttgcttgctgtgtggcttaaatcaggcttttaaacttcaattataattttgcatctgtataataggattaatataattccttcctcataaagttcctagggggttaaatgaaacaatcaatgtataacacacttcctggcatgtgatgttcagtacctagaagactcggtttccttggtagagagaatatttggctagacaagcttatggaattacccccagataggaagtgagcacaagtgtgaaatgaacaagccagagcaggaacggctcttggaagcgtctactcaggcctgggcagttgctggtttatataacagtgctttgaaaattcacgtgcagattcttactattttcccaaatgttacagctcaaaactatgttgtctgtaccttaacacctaaaggataatatagtctttcactgataaaactaaaatgtcgtaggttttcctttggccaaatatgtatagaaacttgtgatttcacatcagatttaaagctgtatttaacactctatgaaaacatactgatgcttagaagtagaaaggaagtcagattttgacatcttacttgtcaacttaaattatttatagttcctggatgcttcaaaatgtgataaaccatagttaattttatgtaaatattcgatgagtgcctttaataaggagactgtaaaggtagccaagctttatatatgttagctacatttatgggtcaatcgggtataaaaaataggacttcgaaaataaaatattattttgtcggactcctccaatgaggctttttcgcaggattagctaaaattggctcttatttgatgtgtgagtgcttaaacattggagaattcatttttcttttagaattcatttttatttctgagccttaaaatatgaacagttagctaaatgtttgtatatgttgataaggaatgctaagtgtttattccttaatgggacgacaccttttcccggtttacataacttgccttttaatctaaccttatgaaagtctccttgactttaattttttttcagagtactgtatatctctttagggaatgcatttatttaaaaaattataaagcaagaatagatgtgatatattttgaagttttctagtcacaaattaaatccctagatgtgttgtagtttgtggagcactttgaaatgtgccaattcaagatggaaatagcaggaaagaaccattcaagtacgatttctgactccataaagttaggaagttatgataaaggaaaaataactacaccacatacttatggcacagaattgcattattgggacaaattgatcttcaaatttgtaggctatgatggaagcaaatatttgtagtatcttaatattcaactgttaagccaggagacgagtactctgaacttcagcttctcataaaatcagtcagttacatgacagtttatgtagtttatatgtaagaaaccctttgatcaagatatgccttttcttcagccttgttaatacttcatttataaggatttttatttctaggaaaataataccatagacctattttatttaaagctaaagtgtttcctggtgatggtggtgaatggggagatgattcaaggaaactgctaatcttgtagagtttagtaaaatcttggaatagaaattttaaaaagttaaaacacactatgaaaacaaatcattattagtaaaatgaaccatattaaaatgtctccataaccaacgtattatagcaggggaaaatggcattttaattcagaaaaacatttctatataaaacaagctttggaataatttgaatatgttgatttttctttggggcaatcatgaaatacagtcatattaggaaagaggcaaggcctcaaaacggaaagagtagtgaggataattcatgagcaatgcgtggcttcatggatcccttcctggccctcttcatctatgaacatctgctttatgttcatgtctggcctcacccagtgctgaagagcagactgcccctgcttagaaccaagccttgttcttgtggatttgagttttggggtcctgaggtagaatggccatcatattgttcagggtcctcaccttcccactcattacttcctttatagaaccccagtcatccccctcaggaggcctgcgctccacaaatgaagttgggggtgaggggagctttagcatctcagtattgttcagatattggatacttgttgagctccactatgtgtgtgagaatgcgctgggctcaggatcaatagccataaatgagacagatatggcccatcccttgccatgcctaaactgatctgggcattgagacaagcagttaaaacccaacatagtaagtcctatgatgagacacaaactaagcatggctggaagggcagataagatttcacagaggaactgacatcttgactggcacacttagaagatgagtaggagtcagttgggccaagaggagaaaaagtgtgtttccatgaagaagaagagcatgtgccaagtcctgggggtgagaagcatggcatgtgtcaacagaaagacatgatcagagcttggatgggagttagagcggggagagaaggcaaggaaaaacataagagctttgcaaactgtgaaggcattgcatttagatgtcatttttagagcttggaggagcctcaggacattgaggcaggatagtggcctgatggcgtatgattttaggaaaaatcactgtggccaccctgtggggaaggattggcgggggaaggctggaggcaaagggtcctgcggtgggctgtggtaatgatctgggctggagaaggtatggtggtgcccagcgcaaaattggtttcgctttgaaaaataattagaaaatatttgttttgatctgtgtgcctgtggtgggaggtggggagggagggtcaagtgaggaaggagattgaatctagaataatgcccatgtttcaggcttcacgtgcagacatttcttggttcagctgggaagtgaataggaacagactggcgaggaaagaagacagtcgtcagttctgtctggggcacatccatcttgacgagtgtgagagagtcaagtcttgatggacaggggcaggtggacattcaggaaactcaggaaagagatttgatctgaagtgaccaccagaaaatactgacggaaaagaggtgacaaaaggagagacctgcaatattatattggctttctctcaggcaactgcttggcctgtctttatattccttttgaatctctgcatatgtacgggccattatttattttcacaactaacaaatgcagactttctgtgtaatgacaacaaagccaaaccagctgctaccaaaggagggaaaatcagaagagaaggaaaaagaacaagggaagcttggggaaaagctgaatgtgggtccttctgttgctgcaggggctggggtgggcccggtgattcctactgagaggcgttttctctccccgcttcctgtctttctggttccatctcattcacctcctgtcccctccacttcctgccagtcaaaccttagattcctccagaggctttttatttttatcttttgatgggcaagaaaatagtgcggattatttttccaaaccttcacctgaacatcacatcgtggctttggccctatgggcttggttcatccgggcctgcacagaaggacttttcgggccagtctggtcacatacatcgagtcctgtcttttcagttaaaaaaaaacacacacacacacactgctatgtttcactaagacaactggtgtgagttgttttttagaaaatcaactctacttcagtaagattttctcaagcattatcttgagaagaccagataataaaatttaaaaagaatttcttcttttttttttattatactttaagttttagggtacatgtgcacattgtgcaggttagttacatatgtatacatgtgccatgctggtgagctgcacccactaactcgtcatctagcattaggtatatctcccgatgctatcttaatgcaacttaaatcaattgctttaataacacatattgaccaagttacactcattaaggaaaaaaaactactttgttgtttttcttcttctgacgtgagctgaagacttagaaatagttgttaatagtgtttggttaataagaatttgttttaattgcatatatcaaatatgtatttattaaacttttctttttgtcagtttatcaattctagctttgtcacaaaaggtttgccgtatgaacatgattctgttgtacatctatttccatttttgttaagagacgaattcaattgtaaaaatctagtaccttttattcattaaacatgttagttcaggaatttcacttggttctacaaagatacatatctacagtggatggccagtgcaaacatgagactcagccaactggtctctgacccaattcagttctcctgtcttcttctggcttacaaagtaactggctctggggagaaagtgagtcaaagtaatatttggtttgaatggttattgactattttcttctgaaacttaatgtatactaattaattttttattttattcttttttttttagagatagggtctcgctctgttgtccatgctggagtgcagtggtgctatcacagctcactgcagccttgacctcctgggctcaagcgattctcctgtctcagcctcccgagtagctaggattacaggcatgtgccatcatgccaggctaatatttaattttttttttttgtagagacaagatattgttatgttgcccaggctggtctaaaactcctggtctcaaactatcctcccacctcagcttcctgaagtactggaattataggcatgagctgccacacctggccatatactcattttttgttaaaagctgaaatatatcagcatatactgcataaataccacaggagactaaacactgaaagtttctttagggtatcagaagaatacactttttgcttgcagttagcatctgcacagataagttttgtttctggttctattacttcttcagtttgaccctattaataaggacaattctaaaaataataactgtgtctggatatctgaatccgtgtgtggtcttttactgaagttacaggtttataactctgctgactagtttgctggtttctgttatgcaatagaagagtgcaaatgttaatttgatctgaagcccgtgtatacagtgacttttataatgtatatttaaagatggaaagccaagttttatgaggccagcatttcttgtcaagtcctcactccaccctcttctaattgggcctgacccttaagttgaataaagaacaaagagctctgtagttaaaacatttcactgcatgttgcatcttgcccttagtaaatggaaaaaaatagagacttaagcagagaatctgaactagggtgtgaaatatatattcagttttggggtgggagaatgagaaccatgttttacaatagtatacataacttccttagtctaaattcaggacatttccccaagatatgtaagaatttagacttatgcagacagactttataaaaacatgccaatatttattagtttgtgaattttaatattctgctccctataaaccagatttattttgagggataaagggatggaggtgacttctaagtcttagagcagaaacttcctgtgggcagctggacatatgtaccaggagctcagagaagagggttgtgttgggagcgtacattctgagcgatctgcatttggtgatgatggaagccatggacatgcactagattgtcttgtgggagaatatggagtagtaagagaagaagaagacctaggattgagccctgagcacctctggcttaatgttggatggaggaaattgaatctgtaaacaataccgggaggctgcagcctgagaggcagaaggaactggggtgtttgggattatggaagccaagggaaaaagcctgtctcacagcgggaagggaggtatcaacattgtaagctgcttcagataggttatgtaggatgtggactgaaaaatatctgtaaaatttggcaacgcgattcattggtaatcctagggaagttgcttttttggggtaactaaggtggaaaacagattggtgtgggttgagcaatgcaagagaggtgaagaaaaggagatttcatgtgcagacgtttctgagttcagctgggaacaagggataagatagaagatggaagttagagagcatgtggggcaagggagactcttttatgggacagtctcgcatgtgatcaaagccaatgagtaaggagcatttgagggagagagagtcaatcaacaagagagaaaagaaagagggttcatcataaaataacggtaacaacaacgaacatcttttgagtgttttctatatccggggaactatggtaaactcctaacctgcattctcacattcaattcttagaatcgttggatgtggtgggttccatgatttcctctagattagcgaggaggaaagagagatctagaaatgtcaggtagcttgctcagagttctccaggtagtcagtcatggactaatttgtgaactgaaggactgaacttcgtcaccacccagcccaccaagccggcttgactttaggtattctgtgctgcatgtgagtaccgacttaaattatattttaagaagggctactttgaaactctctctctgaaaactctatttctaaaagctctaccctcacaacaattttggcaagcagtcttggtaaaaccaaaccaaaccaaaccaaaaccaaaaaaccttatctgctgagaaaatataaccacataaaatatggtgctacaaaatatagactgtgtgaactgaaggtgacttgcccaaaggactcctgaagcaattggctgctgtagaaattaagtccacgggaggttttttgttctgtttttttttttttttttttgagatggattctcactctgttgcctaggctggagtgcagtggcgcaatctcggctcactgcaacctccgcctcccgggttcaagcgattctcctgcctcagcttcctgagtagctgggattacaggtgcacaccaccatacccaggttttttttgtatttttagtagagacggggtttcaccatgttggtcaggctggtcttgaactcctgacgtcgtgatccacctgcctcggcctcccaaagttctgggattacaggcatgagccaccgtgcccggcccatgagaggttttgtttgcacttcaagaaggacagaaaaaggcaggcaggctggggagcaacatagtaaggctgaggaagtgataggaaaacagcctccaaaaggtttccctgtagattctgactggctaagtttcctgaaataatattaattctgtcctcttgcttttaataggacataacgactatatgtgtccagccaccaaccagtgcaccattgataaaaacaggaggaagagctgccaggcctgccggctccgcaaatgctacgaagtgggaatgatgaaaggtggtaggtacatctctcccaggggcccttggggatggccctggccaccgcccagtgctggctctacccattggaataacaccatgggaattttgtgtttttttcttttaattgttttttttctattcttatttttctttgcaacaaaagtattttcataatccattttattttaaaaaggtggaagtgtctggaactggaaattctaacatggcattttgtgttttggattttcaatgtaaataattatattttaaatcaaaggtgtgtgggaggcggtgatggaaggaaacgaagagtgcttagtaaattattctagaaatatttttcagttactgtttatgttgcaaatgctagaaaatgatatctgaggataaactttccctaaattgagacttgtaaatgtgaaagctgagtagctaatttatagccttccagtctgttatcatcccttaaggaatgtgaatttcaatcaaaaggcagttttctcctttagaacctgagtgaaccagccactttcttaacctcagtgtctagcatggtgctggcatagttgattactgagcactacactaacaagtgtcagagcatgcacggtttgtgactgtgggtttgtgtttttgtggtctttgtggctgtgtgtgtgtgtggttttctgtcttctcatgtatccgatcttccagttttgtcatacaggaatctggaaactgaatcccagttctgggaatattaggagccccataaatgtggttgcctgattgacctcattgtattcttgggagtctcatcttgaggaacattgcttctagtcttggatagccttcagtgtagtggaagagaacaagtagaaaatgtgtaattaaaataaagtcatgaggctgaggtgggcagatcatctgaggtcaggagttcgagaccagcttggccaacaaggtgaaaccctgtctctattgaaaatacaaaaattagctgggtatggtggcgagtgccagtaggcccagctacttgggaggtggaggcaggagaatcacttgaacctggcaggtggagggggcagtgaactgagatggcgccactgcactccagcctgggtgatagagtgagactctgtctcaataaataaataaataaataaataaataaataaataaataaataaataaagtaacggattcatttagtgtttcagaaggatactgaagggagggaagggctgatgatggtgctacctgctgattgtaatagggaaaagcccgtttcttttctgaaggaggtgaagcttggggtgatttaaggagaacaaaatttcaatgaaaaggaatagtgattttgcaaatagtgggcagctaacctttaaatcattcttactgggacgcaggaggaaggagaggaaagaccaagaatggagattatgatgaagacaagcttgattgttaacaagcttacagtgacaggtttcatagtcccggggtcataaatacgccggacaggttgaggtttggaatgcagcatttggaataaattctcctggtgaagagatgcaatgttgaatttacgcattctgtgagctgtgactatgactatacatcttgaacatctgaaaaagcagctttaattcaaagggtaattaattccaagaatttaacagctacattcagaaaatgacacttgagtcatatggattaaatatttaaggaattcatctttctttgtactgttggagaattagtcaggcttaattaaacttacaaaatgcgtcttaaggtaacttggtaagtgacaggaatataacagctgcataagaaaagctttatttgaaacagtggagtcgaggtttaatattcttctttggcgattatatgtaggttaagcacaggctcttccatacattctccttgaaagctgaaataatcaagtcatgaatatgtccaaaacaatttttaaaatgtgaggggtacccatgcattgaccccatttcataaaaccgattctgtttttttttttgtaattaatatccagatacggtctggctgcatgaatataaattacgcattctcatttttaatctaacaaaaattcatatatgcaaagacataataaaagtctccccactgttttctcctaggaatctagataatttgactgtacacaacagactgtggatggctccatacacacttgcacatgtatattgatgactgtaaaatatatatctgtattagttttctagggctgccataatgaaataccacaggctgggtggcttaaacaacggaaattaattttctcccaattctggaagctggacatgcataatcaaagtgctggaatatttggtttctagtgagccctcccttttttttttttgagagatggagtcttgctctgttggccaggatggagtgcagtggcactatctcagctcactgaaaccttcacctcccaggttcaggcgattctcctgcttcaacttcccaagtagctgggactacaggtgtgtgccaccatacccagctaatttttgtgtttttttttttgtagagacggagtttcactctatgttggccaggctggtcttgaactcttgacctcaggtgatccgcccacctcggcttcctaaagtgctgggattataggcgtgagccaccatgcccggcctgtgaggcctctcttctaggcttgtggctagccgtcttctgcctgtgtcctcacatggcctttcctctgcgtccgagcactcttggtatctctttctcttctcacaagccctgttggattaggagtccacccttatgacctcatttaaccttagttaccgccaaaaaggccctatttccaaatatagtcataccaggggctagggcttcaacatacaagttttgtggggacacagttcataacaggctgccctcccaaaataccatagactgggtggcttaagtaacggaagtcaattgcctcatagctctggaggctgaagtctgagactaaggtgttggcaggtttgatttttcccgaggcctctctccttggcttgaagatggctgccttctctctgtgtccccacatggccttttctcggggcatccacagcttcttcttcttcttacgaagacaccagtcatatcggattagggccccacacacaggacctcattgaatcttaatcacctcacttaaggtacaatttccaaatacagtcacattctgaggcccagggggtaagatttcaacatatgagttttaagggtacacaattcagtatgtggcaatatcccataggggttactcagtgattgttcagtatttctttacatgtaaggaaaacatgtatctttctggcagtttttatatgtacataagttttaaatgaagctttaaattcataaaattatagcccgtgagaacatcttattttaatgatatgtataaagtacttgccataaatcaatataatttattgtattttctacaacatggaataccacacatggccacaggataccctctataacaactccttgaaaaatcccattgaataaagccttaatttacaactggaagtacaatgataactaactataaaatgtgcagtcacatggcaaaggccagctgtgactgaataaatctttacaacatgttttcaaccattagggttcacaacaatccactttcttaaccaggctggttaccaactaggatattgaaactctacctatgaaataaaaagtttagtttcagttaaaagagaaccacagacctactccctattttcatagcaaggctgaaaaaattcactgaagatctattgtaaagatccaaaagagtgcatgatttgtctccatgaactaacaattttaatctgttataatacttactgcctctgaaaatcccagcatcattattagatttggttctgaatcatggtagttctataagatgcaggatttgaattgcactttcgggaatgtgcttttctatcctagtacatgtgctggtttctctgcattgctttttcctcttcatttgtctccttcctcttgaactttaggttgtagattacatgtctcttcttcaggaaggcctacacagttacctgacagttcctgaggctcgaagttcaaaatcaaggtgctggaaaattcatgttctagctttaatggcaaacagctcttctcttagctcttatcaccattattattagtcattcaatgtctgtctttacatatggtccataaactccatgatggcgcgggggtggggggtctctgtgtcttgtttaccgatcttgcatgaaacaagtcacaaggtaggtgttcaagaagtatttttttgcactaattaatgaattgattcaattcatttaaatagttatttgtgtagggcttcttatatgcaaacccttgggaataaagcaaatatgaataagattgtagtcccttccctcaatgtcctcacagtataaagagaacatttgcatgggaagcggcaaataaaaatctcaacggcaagtggagactgggttgcaagatggctcaaatattgaatgatcagaatgggagtctagagctttaaacaaccactcccaggtttagtccaactcagagtattactcagacacctgacatccaagacatatattattactcaagaatgtggcctttttgctgagtttggtagaaagaggaactcttccaaagataaatgtgttcaaatgctggctcctcctcaaacttgctgaacaaccttgttaaagtcacttttatgagcttcactaatttcaaatatgaaatggagataaataaattttattgtccaagcacggtggcttacgcctgtaatcccagcactttgggaggctgaggtgggcggatcacctgaggtcaggagttcaagaccagcctggccaacaaggtgaaacctcgtctctacaaaattagccaggtgtgatggcagaagcctgtaatcccagctactcaggaggaggaggcaggagaatcacttgaacccagtaggcacaggttgcagtgagccgagattgcaccactgcattccagcctgggcaacagagtgagactctgtctcaaaaataaatatataaataaacaaataaataaattttacttaatgagtttgtcatgaagatgacaaatcgtaacatgggaaaatataaatctaaagtgccacacaagtgttagctattacatatcttttttgtcttaaaaataattactatcttagttaaaaatttcatcatatacgagcactgctgggttttttttttcagctgaaagaaagagaatggcaatttcatcacttctacaagatataaatttctaatttctttgtggagaataaaaacttggcttaaacacctaagcttttttttcttttctgatctcatatgctgaatatagctgaatgacaagtgagatgtgttatttatcattttatgatgccagagatttacacgaatttgtgaaaggttttttcttaccatagattcagaggcgtgtttgaggcaaggttttcattgtgcagtgaggaaattggcacatagaaatcaattgatgtgcaggactcttggactgactattctggttatgtttccttataacacattaagaagaaatttgagataaagtagtaattgtcaactagtctttatttattttaataacaaatgttgcagtataatttttagaaatattccaaaataacaaataaatccaaaaattaacgggataattttaaagtgagaaaataacatactactaatatagacagggaaatatacatgtgtccagaatgattcagaagcccaatgaaacactggaaaataaaatattttcctgttgcttgggtttaatatttatcactatgagttatcgtaatttgctttattgatggataaactcccaacctggggactgcgattggaatcctctttaatcctacattggctatcctttatcaaaagtaaacaaccggctggccatggtggctcacacctgtaatcccagcattttgggaggccgaggcgggtggatcacctgagatcaggagtttgagaccagcctgaccaacatggtataacctcgtctctactaaggatacaaaaattagctgggtgtagttgtgcccacctgtaatcccagctatttgggagcctgaggcaggagaattgcttgaactcaggagacggaggttgcagtaggccaaaatcacaccactgcactccagcctgggtgacggaatgagactccatctcaaaaaaaaaaaaaaaagtatacaaccaattattaatgttcatgatggtagaatcaaattaataaattaaaaatgtagatgtgaattactttttttggattgccgaataattgtggaagatttgtagctgcatgtgaatccaagtttcctcaaaaggtaggttggggtgctcctatttaggattgaatttaagaaaaatgttaaagaaaagctagctgctctttaccaaagagagactggttgttttaagcagtaatctaatctatatatttatgatattgaaactattattttattaattcatataatagatatttattaaaaactccccatattataattttttatttgcaaacaaatatactgaatcaagtaagtgaatcacatatggaccttaaagactaatgaatccaatgtttgacagtattttatatcaatcaagctctggtttccacaagcagaagcagatcgtcatctatgaaacagataaaagttgatttggcataccctctctttattcattatgatgttcatgagaaaccttcttggaaccctagggctccaaggaacacagtttgcaagccactgatctaatctaactccttcatcctctaggtatgaaaatcaaggccctccattacctattagggatgaaggcaggtcagcctctgtgactgtcagttcagctggaggaagcatgagtgtaggcagcacaacaatccctataaggaccatgttcttaagctggttttttttttcctagtagtttttacagtttcaggtctaacatttaagtctttaatccaggttgagttgatttttgtatacggcatgagataagtgtccaatttcattgttcggtgtgtagatatccagtttctctagaaacatttatcaaagaaactgtcctttctccattgtgtgcttttagcagctttgtcaaaaattaattggctctaaatgaatgaatttatttctgggttctctattctgttccattggtcaatacatgctgttttaattactatagctttatagtatattttgagtcaggtagtgttatgcctctagctttgttcttctagctccagattgttttggctattcagggtttttttgtggttccatacaaatttttggattgtttttccacttttgtaaaaaatgtcattgcaattttgataggcattgcattgaatctgtagattgatttgtgtcatatggatatttttaacaatattaattcttccagtctatgtatggtatatctttccatttatttgtgtcttcttcagtttcttttattgatgtctatagcttttagcatacaattctttcacttccttggttaaatttattcccaaatattttgttttatttttatagctattataaatgaaatttcttcttgatttctttttttggatagtttgctgttagtgtatagaaacactactgatttctgtatgttgattttctcttctgaaactttactgaatttgtttattagttctaatagttttttgtgtggagtctatacttacatgatctatgtgtaagatcatgtcatcagcaaacacgggcaatttaacttcttctttttcaatttgcatgcctttattttttttcttgcataattgctctggcaggaactctcagtactatgttgaatagaagtggtgagagtgggcatccttgtcttgttattgatcttaggggaagacttttcaaattttcaccattgagtatgatgttagctgtaggcttgtcatatatggcctttattgtgttgaggtacactctttctatatttaatttgttgagagtttttgatatgaaaggattttgaattttgtcaaatgcattttttcctctattgagatgattgtatggtttttgtccttcattctgttaatgtgtgtaccatagttatagatttgcatatgttgaaccatcgttgcatccctgggcaaatcccactcgatcatggtgaatgattctttttcatgtcatgacaatcaattttgctagtattttgttgtggatttttgcatctatattcatcagggatattggcatgacatttaattttcttgtaatacccttgtctggctttagtatcacagtaatgctggccttgtaaaatgagtttggaagtattccctcctcttcaatttttgggaagagtttgaggattggtattagttctttaaatatttggtagagttcagcaataaagcccattaggtcctgggcttttcttccatagaggactttttattgctgattcagtcttctttctagctattggtctggtcagactttctatttcttcatgattcagacttgctaggtttatgtgtctaagactttatccatttattccaagttatccaagttgttggtgtgtaattcatcatagtactcttataattttttgcatttctgtgctatcagttgtaatgtctcctcttttatttctgattcagtttatttgtgtcttctcactttttttcttagtctagttaaaggttaatcaattttgtttatctttttaaaaacaaattcgtagtttcactgatcttttgttttgtgtttttagtctcaattttatttatttttcctccgatctttattattttcttccttctactaacttggggcttagtttatttttatttttctagttatttgtggtataacattagattgtttgagatcttcttctttgatgaagacatttattgctataaacttccctcttgaaaatactcttgctgcatcccacaaattttggtatgttgtgtgtccattttcatttgtttcaagatatttttcaacttttctttttatttcttctttgacccactggttggttctgagtatgttgttttattttcaagtatttgtgaattttccaaaattattcttgttgatttatagtttcatattatttatggttggaaaaaatacttgatatggtgtcaatgttcttaaatttattaagacttattttgtgtcctaacatatgaactatactgttttttttctttttttttttttgagacagagtctcactgtgttgcccaggctggagtgcactggctcaatcttggttgactgcaacctccgcctcctgggttcaagctattctcatacctcagcctcccgagcagctgggaatacaggagcacaccgccatgcctggctaactttttgtattttttagtagagatggggtttcaccatttgggtcaggctgctctcaaactcctgacttcaaatgatctgcccaccttagcctcccaaagtgctgggattacaggagtgagccaccgtgccaggccatgatctatactgttttatctaacattcagtggataatgttccatgtgtatttgagaagaatgtgtgttctgttgctgttggatgaaatattctgtatgtatctgttaagtccatctgtgctaaagtatagtttaagtttgaactttcattattgattttctgtccgaataatctgtccattgctaaaagtggggtactgagttccccaatattattgtattacagtctatcttccctttcatatcaattaatatttgtttcattcatttaggtactccaatgttgggtgcatatgtatgttcacctgttatatcctcttaatgaattgaccctcttgtcattatttaatggccttctttgtcttattttatagtttgtgacttaaagcctattttatttgatataaatatagctgtctctgctttcttttggcttctattttcatagaatgccttttttggtcccttcgccttcattctctgtgttttcttaaccatgcattgaatctcttctagacatcatataacagggtcttgtttttttaaatccatttactcactgtatctctttcttcctatcttgctgtcttcctttgtgattaggcgattttctatagtggtatcctttgaattcttactttttgccttttgtatatttgctacaggattttgctttgtgattaccataaggcttacataaaagatcttatagttataccaggctatgttcaactgtttataacataactttgattaattttttaatactcaatttatttgattgcttatttagagataattttgattcctatcagaagaaaactgaggtatctttatgtaccttttcaggaatgaccacgtctcaccttaccttgaatgttacaagaaatgctggcagtgactcaaggccaggcaaaaatttcagaaagggtttatcttgtttgtacaattttcttttgcaaaaataaatgattcttgatatgatgtaaggactttttccgtagatagaacctataaaatgcagaactttggggcagtaattatatgaatgaattgctactttaaaattctgtaagtccccaggaatttccatatgcttttttttgtttgtttcagtggttgtgatcaggctaatgggtagtttttagagctgaaaagaacttaaagatcatctagtgcacctttttgtttttcagttggattgttcttgtccaaatcactaagctaagttaactgctcagacaggaaaccaagtctcctgacccatggtttaatgctcctttcattgttatgcgtctgcctggctgacctgttagtaacataaagtgtcatgagagatagacatatgcatgagtaagatattaatatcccataaaccaaaactgtgacttaggaaatgttacggtgggcacaggatattactcctcttcaacaaaaacatcaatcatatgttggcttagttgcacagcagaagtaccaaaataaatttatatagacggtgtcacagatactttaaaaagacctacttaagatttaattacctaatattatttaatatttaatataatttaaaaggggcatttttatctttcagccaaggttttaattgtttttagataattctatttttgaaagtctgattttgttttaaaatgcccattctggtatataaaaacatcattttgtcaaataggagtcccagctaagggccaagcgtgcaattaaacttgactctttacctactacctaggaaccttgggcagatcacatactttttcttcactcagtttttacttctgaaaaatgccagctgaagtatgtttcaaatcttaaattttatgttttatgatctaagttcagattaacaatggaatggttagaatccaaagctaaaggtagtatatacaagtgtatattgggggttgggagcaactgccgcagctatcatatttacatttcaagctcaatttagaacaactgcgggcaactgtaaaaaccggtaggaatgggcagagttattgtcttcactagtcattgtggaaagtgaatctcttctgaatggagagtcacaaaaatgagtttgatgctttcatgatagtgaaatgagaagatggccatatattgctataaatcaccagcaacataaaagaaaaaattcaaaaatcaagtttgttgaggcaggactctgaaaagataactaagcttttttttttttttttttctgttagagatgtaataatcatgactaagactggaatcccaagagctggtgagactttctagtttctgccttgtggaaagagaaaggaagaggccaaaaaagataatgaattttggaaagttcctgattaaatatcgcataggctagtctggttatgtctgcttgaaaacttatccagtaggtataaaccaacacacttgaggccagtctttttggaaattacagaaatatatgtcagccttaagagacatcctatgatgaagagcagagggagttgtttataaagaaatgttctcattggctgggcatgatggctcacgcctgtaatcccagcactttgggaggccgagctgggtggatcacttgaggtcagaagttccagagcagcctggctaacatggtgaaaccccgtctctactaaaaatataaaaaaattagccgggcatggtggcgggcgcctgtagtcgcagctactcgggatactgaggcaggagaatggcgtgaacctgggaggcggagcttgcagtgagccaagatcgtgccactgcactccagactgggcgacagagcaagactctgtctcaaaaaaaaattagccaggcatggcggggagcgcctgtaatcccagctactcaggaggctgaggcagggaaattgcttgaacccaggaggtggaggttacagtgagttaagatggcaccattgcactccagcctgggtaacagagctagactccatctcaaaaaaagaaaagaaatgttctggtcatgcctggagataatacatggtttagtttatgcttgattcagcaaataaaaattggtgaggaacatacagaattatatttaggtgattatattttttatattttatatataaaatttatattttttatattttaggtgattatatttttaaacgcttgctttacaagactaatcattattacttttttaagttttgtgatatattttatttaactaatataccccaaatagtatttcaatacagaatcaacatttaaaaattattgatacattatgtatgtttttttccttcactaagacttccaaatcctccaagtgtttcacacttacatcttattttggaccagccagattttagtgctcatttgaccatgtgatctgtgcttaaggaggctgctggagctgaggctgggctgcagtaccaacatagaagtctttatctgtcaaaccaggagtttgagatccctgagggatatgggaaccataaaggatcttaagcagagaagtgactttcttaattttgaacctatcctggtgttctcatagattagaggagagagatttaggagtgagggatcaagcaagaaggtggctccacattgttttccatagtagttgtactagtttacattcccaccagcagtatagaaatgttcgcttttcactacatccacaccaacgtctattattttttgattttttgaaaatggccattcttgtgggagtaaggtggtattgcattgtggttttgagttgcatttccctgatctttggtgatgttgagtattttttcatatgtttgttggccactttgtatcttcttttgagaactgtctattcatgtccttagcccactttttgatgggattgtttgttttttttcttgctaatttgtttgagttccttgtagattctggatcttaatcctttgttagatgtatagattatgtctccttctctgtgggttgtttgtttactctgctgctgctccttttgtgcaaaagctctttagtttaactaagtcccacttatttatctttgtttttgttgcatttgcttttgggtttttggtcataaaatccttgcctaagcccatgtctagaagggtttttctgacgttaacttctagaattttatggttccaggtcttagatttaagtccttgatccatcttgagttgatttttgtgtaaagtgagagatgaagatccagctgcattctcctacatgtggtttggcaattatcccagtaccatttgttgaatagggtgtcctttccccactttatgtttttgttggctttggcaaagagcagttggctgtaagtatttgggtttatttctcggttctctactctgttcctttggtctacatgcctatttttataccagtaccatgctgtttcggtgactatggccttatagtatagtttgaaatcaggtaatgtgatgcctccagatttgttctttttgcttagtcttactttggctatgtgggctcttttttggttccatattaattttaggattttttttctagttctgtgaagaatgatggtggtattttgatgggaattgcattgaagttgtagattgcttttggcagtatgatcattttcacaatattgattctactcatccatgagcatgagatgtgtttccatttgtttgtgtcatctatgatttatttctttgagaggtgttttgtagttttctttgtagaggtccttcaccttcttggttagtttttgttttttttggttttttttttttttgcaactattgtgaaaaggagtgagttcttgatttgattctcaccttggttgctgctgttggtgtatagcagagctactgatttgtgtacattaattttgtatcctgaaactctgctgaattcattaatcagttctaggagctttttgggggagtctttagggttttctagttataaaatcatatcatcagcaaacagcgacagtttgaattcctctttactaatttggatgtcctttatttctttctcttgtctgctccggctaggacttctggtactgtgttgaatagtgagagtgggcatctttgttttgttccagttctcagaggaaatgctttcaacttttccccattcagtattatgttggctgtgggtttatcatagatgccttttattacagtgaggtaccttgtataccgattttgctgaaggttttaatcataaagggatgctggattttgtcaaatgctttttctgtatctattgcgattattgcgatggtcatgcgatttttgtttttaattttgttcaggtggtgtgtcacatttattgacttgcatatgttaaaccatccctgcatccctggtatgaaacccacttgatcattgtggattatctttttgatatgctgtttgatttggttagctagtatttcgttaaggatatttttttgagatggagttttgctcttgttgcccaggctggagtgtagtggcactgcaacttccactttctggtttccagcgattctcctgcctcagctccctgagtcgctaggattacaggcacctgccaccacacccagctaatttttgtatttttagtagagatagggtttcgctatgttggccaggcgggtcttgaactcctgacctcgtgatccacctgccttggcctctcaaaggactctcaaagtgttgggattacaggcgtgagccacagcgcccggccagatttttgcatctatgttcattaggaatattggcctgtaggtttctttttttgttttgttctttcttggttttggtacaagggtgatactggcttcatcgaatgatttagggaggattccctctttcttcatcttgtggaatagtgtcaataggattggtaccaattcttctttgagtgtctggtagaattcagctgtgaattcatctggtcctggactttttgtgttgttggtaatttttaaattaccatttcaatcttgctgcttgttattggcctgttcaggatttctaattcttcctgacttaagctaggaggtttgtatctttccaggaatttacctatctcttctaggttttctagtttatgtgtgtaaaggtgttcatagtagccttgaatgatcttttgtatttctgtggggttggttgtaatatctcctgtttgtttctaattgagcttatttggaccttctctcttcttttcttggttaatcttgctaatggtctatcaatttcatttatcttttcaaataaccagcttctttttgtttcatttatcttttgtatttttttttcaatttcctttagctctgctctgatcttggtattttctttcttctgctggctttgggtttcgtttgtttttatttctgtagttccttgatttgtgaccttagattgtctatttgtgctctttcagagtttttgagtaggcatttaaggctgtgaactttcctcttcgcattgcttttgctgtatcccagaggtttggatggttgtgtcactattattgttcaattcgaagaattttaaaattttcatcttgatttcattgttgacccaatgttcattcaggagcaggttatttcacttccatgtatttgcatgttttggaaggttccttttggagtcgatttccagttttattccactgtggactgagagagtagttgacatagttttaattttcttagtttttttgacacttgtttgtggcatatcatatggtctatcctagagaaagttgcatacgctgatgaatagaatgtatattctgtggttgttgggtagaatgttatgtaaagatctgttaagtccatttgttccagggtacaatttaaatccattgtttctttgttgactttctgtcttgatgacctgtctagtattgtcagtggagtattgaagtcccccactattattgtattgctgtctgtctcattacttaggtgtagtagtaattgttctatacatttgggagttccagtgttaggtgcatatatatttaggattatggtattttccttttggacaaggccttttatcattatataatgctcttctttgtcttttttaactgctgttgttttaaagtttgttttgtctgatataagaatagctactcctacttgcttttggtgtccatttgcatggaatgtctttttccacacccttaccttaagtttatgtgagtccttatgtgttaggtgagtttcttgaaggcagcagatacttggttggtgattgcttatccattctgcaattctgtatcttttaagtggagcatttaggctatttaaattcaatgttagtattgagatgtgaggtactattctgttcatcatgccatttgttgcctgtataccttggattttttttagtagtatttttgttttatacctccaatgagatttacacattaaggaggttctgttttgatgtgtttccagcatttgtttcaagatttggagctccttttagcagttcgtgtagtcatgtagtgctggcttggtagtggcgaattctcttagcgttgtttttatctgaaaaagactgtatctgtccttcatttaagaagcttagttttgctggatacaaaattcttggctgctaattgttttctttaaagaagctgaagatagggccccaatcccttctagtttatagggtttctgctgagaaatctgttaacttgatgggttttcctttataggttacctggtgcttttgcctcacagctcttaagattatttttcttatcttaactttagataaccttatgacaatgtgcctaggcaatgatctttttgtgatgaatttttcaggtgttatttgagcttcttgtatttggatgtctaggtctctaataaggctaaggaagttttcctcaattatccccccagatatgttttccaaacttttagatttctcttctttctcaggaacaccaattattcttaggtttggttgtttaattctgtcccaaacttcttggaggttttgttcatttttttttttttttcttttcttttttttttttaattgatcattcttgggtgtttctcgcagagggggatttggcaggatcacaggacaatagtggagggaaggtcagcagataaacaagtgcacaaaggtctctggttttcctaggcagaggaccctgcggccttctgcagtttttgtgtccctgggtacttgagattagggagtggtgatgactcttaacgagcatgctgccttcaagcatctgtttaacaaagcacatcttgcaccgcccttaatccattcaaccctgagtggatacaccacatgtttcagagagcacagggttgggggtaaggtcacagatcaacaggatcccaaggcagaagaatttttcttagtacagaacaaaatgaaaagtctcccacgtctacctctttctacacagacacggcaaccatccgatttctcaatcttttccccacctttcccccctttctattccacaaaactgccattgtcatcatggcccgttctcaatgagctgttgggcacacctcccagacggggtggtggccgggcagagcggctcctcacttcccagtaggggcggccgggcagaggcgcccctcacctcccggacggggcggctggccgggcggggggctgaacccccacctccctcccggacggggcggctggccgggttgggggctgacccccccacctccctcccggacggggcggctggccgggcggggggctgacccccccgcctccctcccggacggggcggctggccgggcagaggggctcctcacttcccagtaggggcagctgggcagaggcgcccctcacctcccggactgggcagctggccaggcggggggctgaacccccacctccctcccggacggggcggctggccgggcggggggctgacccccccacctccctcccggacggggcggctggccaggcggggggctgacccccccacctccttcccggacggggcggctggccgggcagaggggctcctcacttcccagtaggggcggctgggcagaggcgcccctcacctcccggactgggcagctggccaggcggggggctgacccccccacctccctcccggacggggcggctggccgggcggggggctgacccccccacctccctcccggacggggcggctggccgggcggggagctgacccccccacctccctcccggacggggtggctgccgggcggagacgctcctcacttcccagacggggtggctgccgggctgaggggctcctcacttctcagacagggcggttgccaggcagagggtctcctcacttctcagacggggcggcccggcagagacgctcctcacatcccggacggggcggcagggcagaggcgctccccacatctcagacgatgggcggcagggcagagacgctcctcacttcctagatgggatggcggccgggaagaggcgctcctcacttcctagatgggatggcggctgggcagagacactcctcactttccagactgggcagccaggcagaggggctcctcacatcccagacgatggcggccaggcagagacgctcctcacttcccagacggggtggccccgggcagaggctgcaatctcggcactttgggaggccaaggcaggctgctgggaggtggaggttgtagcgagctgagatcacgccactgcactccagcctgggcaccattgagcactgagtgcggttttgttcattttttaaattcttttttctttgtctttgttggattgagttaatttgaaaaccttgtctttgagctctgaagttctttcttatgcttgttttattctattgctgagactttcaagaacattttgcatttctctaagtgtgtccttcatttcctgaagttgtgattgttttttatttatactaactatttcactgaagatttctcccctcatttcttgtatcatttttttgacttccttaaattggacttcacctttctctggtgcctccttaattagcttaacaatcgaccttctgaattctttttcaggtgactcagggatttcttcttggcttggatccattgctggtgagctagtgtgattttttgaggggtattaaagaaccttgttttgtcgtattactgggattgtttttctggttccttctcatttggtaggctatgtctgagggaagtactagggctcaaggctgctgttcagattcttttgtcccacaggttgttttcttgatgtagtactctcccccttttcttagagatgtggcttcctgggaaccgacctgtagtgactgttatttctcttctggatctagccattcagcagggctaccaggctccaggctagtactgggggctgtctgctcagagtcctgtgctatgggctgttttcaggtctcacagcgttggattccagcacctgctctgatagaggtggcaggggagtgaaatggactctgcaggggtccttagcttttgttgtttaatgcactatttttgtgctggttggcctcctgccaggaggtggcactttcaagacagcgtcagctgtggtagtatagggaggatcaggcagtggccagggccttagaactcccaagagtatatgacctttgccttcagctaccaggatggatagggaatgaccatcaggtggggcaaggctaggactgtctgagctcagactctcctcgggtgagtcttgctgaggctgtgctgtggggcaggggggtgaggttcccaggtcaatggagttatgttcccagaggattatggctgcctctgctgcgtcatgcaggctgtcaggaatgtgggggaaagccggcagttacaggcctcacccagctcccttgcaacccccaaaaccggtctcactcctgtgccctaccaacagcatcaagtttgtttgcaggcagcggatgagcaaggctaagaacttgccgcaggctaccagcctcccagcaaagaatgtaagtagggctttcatgcctcccttcctgttgaatctgtacaccaaattcactccctcccccaagttctggccaggtgacttcatgtttggttggaattgttacaaagttcagctggaggtttccttctcgctgtggtcttttcccagttcctctggccaccctccccaaggacccctgtgagacaaggtagaaatggcttattaggggacccagagagcccacagggcttttccccttgctttctctaccctttatttcactcagctgtctaattaaatcagctccaggtaagttcatatccttctcccatgatctggagctgcagattccccagtgagggtgtgtgttcgggggtgggctatccccctttcctactttcacagcttgggcactcacagtatttggggtgtctcctgggtcctgtaggagcaaactgcttccttcacagggtctgtggattctcttggctttcctggtatattcctgcagtagttctggagcagaagtttatggtgtgagtttccacacactgctctgttcatccaagtgagagctgcaatctagtcctgcctcctttccaccattttttggccttgacgtattacatttattttatgtttgaagttttggcagttttattttgaaaattttacataacaaatgccaagccaaatccaaacttcttggcctaaatcatttacagataacctttactgagcatttactacatgaaggtgttgttgacacaggggatttaagatgtgatcactgaccacaacatccaggcaacctaaaagtgaaaagaggtcattcacaaaaaataggaccaaacttcctccattcctcaagggacctaggactggagttggcctaaaaattcctgctgtatcacctcacccaccagttttgatcttgctctcagggatcaaggaagctcaaggtttctggcccttttggctcatgttcttggaggtatattctattgtcaagttaaagtcgtacccatcctagatctatttctctctctttgtggttccagtctcatagaaaacataactatgtgaaaacaccaactaccccataaagctattctgagactcaaagacatgaactctattttgataatcacaaattgatgtatagatgtcagatatcattcatgtattatgtagcattgtggtttaagtcttagctgttggaatcagactacttgcattcaaattttagctctgttgataggtgtgtaaccttgaacaagatacgtaacctcttcagacctttgtctctttgtttgtcaaataacgacaataataatactaacttagtaagtatgtataaggaggcatgtaaagcttctattgtatttggcttatggtgagcccttcatataaattggttacaatgggtaatgaaaagtacgttcaatttttcccacaaggatttaatctaatctctaaataaaatgccagttttagtatactgtcatcattataaggaaactataattcttaagtaattaattactttggttccctttggataattagtgatacataaaatgcagtaccttgccctgaggaacctacaagttagcctccctctaatcctggcattcaaagtcctccaccttccgaattacacctgttttttcaggcattgtctcccactttcctagcaagcctttggctccaggaaactgttctgttcattgacgacagaatgtattttgtcccgtatgcctcccttcaatctgaagttcatttttagtaattttttttattagtagtgactttccccatttactaatgcctttctctttagctcatttagaattccctggaagtcatcatgttttccttctgaattgctatcatattctgtctctgtgtctaatcagaaagttaggtgagctgctgtctcagctcctgtgttaatccaggtactgagctctttgtaccctgccagcttgagggcaacttggatgcgctggtgtgtagtgatttgcaactgtgagagagccgtttccatcaacaagtgacagcttttggttctaaacactgcttgacctcattctggtttgaacatatactttggcctctgccctctacctcacctccagttctgatcttgggcatgccacagaaccccatctacactaggctttcattttggacttctaagtcctttacttgaccacttattttctttaattgctagacttaatcatccatgcatatgacagccactcagctctgaccccaatacttcattgaggctcatgccagtctgacctctcacagggaagagcacccctgccggtgagcccctggcccttggattatgctgtcccaccagtgcccagctggctgcttggcactgcatgtgatgtatctttgtttattgatcgcttaattgaatgggatataggattatattccatgttccagatcaagttgagccaagctgacaacttagtattaaaaaaatatatttatctcctatctgtccaattaaaattttaatttctagaggtagagacagtcacattgctatttaattcctagcacagcagtatttttgtcaatatttgttattagtggtgagtttaaattataaaggaaaaaagagaagtggtgatttatgtcagcgcttggctaaactattcccttgatataagtctattattcaggtcacataagcatgactgaagtaatatcacaaccataatatcataattatctctcttgctgtctctgtcactttctcacttttgtttgtgcatagtgcatagacctgtagaaaatttattagtaatctgaagcataaaaccaaatattacaactatcataacaaataaataaaactgtgcactcctttagggagtagtaaagccatttctaaaattaagtcaaagtaagattcccttattattgagatattttagtggtatacactatcataagtaagatgaataattttgttagcagctgacactgctatatagatatttatcttgggaagttctcagtgtaacatctttactgtgtttttctctttagattatacttttatgtttattattttgtttcgtgggggattcaaaaatatgcattttatgccatacttggggattccctataaattattagttgtaatatgacagttccatcatgaattttccaggtattcttttatgcaagcagataatagctcattttggtttttaacacattcatgcatattctttctctctcaataaatatggttttaatttattaaatgaaagatttaaaaatgtgctaagcattttaataataatcgattttggattaacttgttatgtttactctagggctgtagttcaccatttattcagttaagtccttccccaaattcaatattgaacatgtggaattgattcgtttcacgtggatgtatcatttactcccaagatgttggtttttggcatttagtactggtaatgggccaggaaagtgctcatctatatttgttgttattcactgattgcatcttgcccttgcacccactgagacgatgggaaagtagcaacaatactaggtgatttctttgatttaaacccaattaaaagaattagagagttgtctgatacaaggccaaagaactaagaacagaaacaaaagcaaaacaacaaacagcagcacaaactccagtgagataaatttttaaaacattgggaatatttaaaaaataaaaacactccaatgaaccacccaggttttattaaagagtagagaactcaaacagcagaaggcagagctggtggaggaaactcagcaactgctcagaaatgaaacaacctaggaaggaggtgcgagtgacctgaaactccttttaaaaacagaaaggacaaaaagaggtatgggctgacaaaaggaaagtggtagattactgatgtattgcattatgcttagaatgtctcagaatgcgagaggcagtaaacacaccagaagaggatacaatatccggaccatgtgcaactgcaaataaatgtttgggttaaaacttggttgattctaaattacatgaagagctgatgataattgaggcagaactgatagacctaacaatagaaaaaaatcgatttaaattcagagaagaggtcatttaagaaagtataatgaagccacttaataaaaggaaatattcctctaactaaagtttgagatttagggcataatcctcaaagacaggctaatataatctattttttgattaaaaaaaggaacttttggtttaaagtaagatgttcagctgctcttagagtttatttctccatatttgggcatataagaatttaaggaaaaatatagaaatataagaaagatttcatgagaatcacaagcatagtttataggcaagatagccttttctgtttgaaagcgaaaaatactatttcaacatgtaaaaacctaagtcagttttcactggcatgtcccacaatcatgcctgaaataatggttgaagacagatgtgagacatttcaagggcaatagattaatacatgaaacccacttatgcctagcgttccattattggaacgctaagcatgtgggagttatttatatcctattgctcaaggtcatctccaaggtctgagttttcactcatgcaaaaattcaaaaaattgcaacctcggcgtaaatgggttaacaaaaagttaatgctggacagtaaaataaactactaaattagacacaccatattttttaaattataagagattaagaactatgagatatttaaaaagccacccacagaagtagtaggacaggtagagaaggataaattctaacaatcaactgtatctccaccccaccttgtaaatgacaaattagtttacttagtcaattcaggaaattaaacgtatacattttgtgttaaaacagaagactttttttaaaaaagtgtgttagttaaggttaattttgacctagttaagaaaaagcagtttagagtcttgaaatggaaatgagaaatacataattacccttaaaaataagttgatagtgaattttatctaggattcttaagacatttttaatatttaatgaaaatgaactacacaattattaaaaaatagttgcctgggtttagaaaaatgatcccttaataagacatatacaacagcctgaatttttatttccaaatactatagcaacaaaataccggcaagaaaaatgcacagaaacattggatagtctcttcttactaatcttttacagatatttatatattctgaattctaacttttaatttattttatgtattataaatgtcatctagtatgcagcttgactttgctttatggtatcatctgtttcacagaaaattttaagttgtggaatttatcgtattttttctttatagtttgtgctttaagacctgtctaataaatctttccttccctggacgctataaagttatttgtctatattctgttaaaaggaataaaactttgctttttttcacattttgttacttatttcacctgaaagagaattttgtttattatgtgaggtaggaatataacttaatttttttccattgaataaccaaattgtcccagagcaattaagcaatacattctttccctgttgatctgtgaagctacctccattaggcatgaagttgtcctgttgaagagaatctgattctgagctctcttcactatttctttatttgtctatgtctacactaaaagcaatttaatttctgtgtctttataattactttgactttataatccttgaaagggactttgttcttcttcaaaattgttttggctatttatggctacttttgctttcaaatgagtttttaaatcaaactttaatgagattgcattaaacttataaattaatctgaggaggattgacatcttcatgatatttagtcttcctacccattaacattatataactctccatttattttaggtctttttgaatgacttctaataaagtttttcaattttctccaaaatatcttacatattaaaatttactcatagctgtctcatcttactgatattttaaagacatatctttttaaaaattatattattaaattgtttcaggtatgtctttttttttgaagttttacaaatttgggattatactgcctcttcattcaacattttcccatgctgttggggatccttcaagtcaaaattattagaggagctgcattaatattccagcatggacatactataatttatttaattatttcccgaattgtatgtttttgtttctaacttcacagttttcaacatgactgggaacagcttttcttgctaaatccttgcacgccacagtaattatctcactgggccaaaagataggtactttttcatgactttcgccatatattgtcaaaatggaaccaatggtgatttgttcagaaatcatggtacatcatataaaaagattactctgcaagcatcacaaactgtgatatatagaaatgtgtttattgacatgaaatagatcatgaagaaagtgattacaaatggtatttaagcattttaagttatataggcttatactgagcaataacaaagagggtgaataaatgaatgaatatgtgattctggaagggtatgtaacaaaaggttaacaatggttagccctgggtaaggggattatgtatgacttttatttccttctttttttcttcctttccccttatgtttttaacaatgtacatgaatcgtttatgaataaaataaaaaactttgatattcttatataggtttagtaggataacatttctccttcatttctttcatttttagaaatctttcttcacggaaattcttttttttaaatgtttatttctgtctttgaggagtgagattgactggctatcttttaatacctgtgtgcattatcattattgtatcttgctgataaatttcacaacagttaattattttattccccatttcatacttagctctattttaggcaagttcacaaatatcattgaatgagttcattcaatgtcatcatgatgatattgaaatgtcaatagcagatgacttgtttctggggtgttaatatgcctgttggttacatttgtgttttttggtgatggaaggcagccactgaggcaaacagcaagaatacagctaagcctctaactgcatactcttctcactcgttgcttaaaactgaagcgtggataattggtgtgcattccctaaaaagttatgtcatgatgcagtagagaaataagttaactttcctatccctgtatcaaagtttcttttgaaggtaactgagacagcgccaaataaggagcagagtttctgtgaatcatgaaatctttctaaacaattgagaaaaaaaaaactgttctgaaacaaaaacttgtgccctatccttttatttgaatgtgttttcttaaggccacaactggcagagatttgatgattttatgtttaaagcaattttttttttttttcatagcaaggagtcccactgccatcaggttttgtttttggagagattctgtaactgacatagggtaacttactctgatggcttgctccacattcactacaagtacatactgttctgaaaaatctcaaagttgaaatatttttatttgggcaacttctgcaatcaaggtaattcactctatctttggagaataaaatggaaaagggcaacccaatctctgtgaccttaaacttccactgaaacttagagacggttagcttagctggtgagagcgtgctgctaataacaccaaggtcgtggtttctatcccattacagggcagtcaagctcaagggaaaaaccctgttctttggcacagcttccatggcctgctagccgtttacagcgaggcaaaagagtagagatgttttagtgaactaggccatgacttggggagtctccaccttgaatctggttgtgggaccaaggaagagaatctgctgaggctgggtagagagactctagagcaccttaggccacaggacagcagaggatgagaataacagaactggcttcagaaagtaggtgtcagtccaaggcactgtattcaatacatgtagcaaagaatgagcttctgacaccaggaaagtcttcagatggcagtgactgcataaaccggtgtcaggatgtctgactataaaggatgggacaccttccatcaggtgagagctctggaggtggagtctgttcctggaagaagcatgggtaaatgtcatcaaaggttccctcagccaccactgggttcagggctgaggtgcacctaggaaggcttgggcagaagcatgacccctggaacttggccaactgagccatcagagagtggtgcaggtgaggagtggtagatgtgtagtgaaccactcagctgtctgcccaggccttgggtgtggaagtagagtcttctgtgtctttgggcagactgaattataagcttcaccagatcgccaagctaggaatgttgacatacctggcttggggtcagggagggactgaactgtaggtgggggcccccaacaaatctaatcataagaatctatgagcgtggagacagaaggaccaaagaagggatgctgtaaccaattatcattattgaaaaactaggcagagattacattcaattggcagtaccaccctttttatctctgacatagttccagaaggatatactatgtatctagtgtgacactgtctgatagaattgtctgaaatgatggaagtgttctgtggctacccattttgatagccactagccacaggtggctattgagcacttgatatgttgttggtgtgactgaggaactaaatttttaattcaatttaaattaaatttaatttaaatttaagtagcaacatgtggctggtggttactggattgaaccgaacagatctagatactagagtaagtggtagcagcaaatcctatattggaacaatgtaaattaacaattataaatatatgagcaggacaaagcccaaatgggcctgtactcttagttttgctatatattcaaccataactagcactcattttttaaacttataaaatgcaaactcatttggttgtgatgatgaatgctcaggtaattgttgagtttcaacacagtgacagccaggaactcattttggagacttggattgtgccacagtttgtccctctataaaatgatgatgaaaattttatcagtatctgtctcaagctgtagttaatgggccaatttctaaatattcctgtcaaattgtatagccattgttttcaaagtagttttgaaagtaggccattggtaaagcaatctattaaagtgcaggaagaaagtaatagaatctcttactttttaaagtctcattatgaaaattatatttcagtttgtatgccttcgatgtacataatatattaatacacaaatatattaatgcagcggtccccaaactttttctcaccagggactggtttcctggacgacagtatttccatggattgcagcggggatggtttcaggatgaaactgacccacctcagatcatcaggcattattaggttctcataaggagcacacagccttgagcaggtgcagttcacatatagggtttgcgcacctatgagaatctaatgctgccgctgatctgacaggaaatggggctcaggcagtaatgctcgctcactgctcacctcctgctgtgtggcccagttcctaacaggccatgaactggtaccagtctgtggcctgggggctggggagtcctgcattaatgtaattaaatatgtacatttcttgagagtgtttgttcaaatattttttcctaatagagacgtataacttagaaagtatggaaccctctggtcagtagcatattttatcaaaaaggctatccgtcgtgctaaccaatgtgattaaatgttcattttagtctcagatattttgataacataataatagggaagttatggttattgcatggcttttctttactgtattttcaataactatattaatgggttcagttgttactagttttataattctgttttattctcaatgagtcttcctgtttctccccacgtctttcctatggttcatttccctgcatctttacagctccctggaacattctctcaaatcaatcagaggcttcaaaactgggcagtctcattttgtaacctgctctgactcgcctctgggaggcctccctccccactcacagctgccttcctgcatgatgtaaaatgaatacagtgccagaaagactgatccttggaacctcttccttacttagtttctttatagttctgattttagaaatgaccattttacttccagtgcccttccccacaccagttagctgagactctatgcaggaagttcccagtgatcagaactgttcccatagctcccaggtgattctgacatgcacccggcattgagcaccatggacatggctgctgtttgttatcctcgagctctgcaaagcagtgtcggatattgcttgattgttgcacattaatctactgcacggtccggtaggtagccactagccacatgtggccatttagatgtaaatgaatttaaattaaatagtattataagttcaacacctcagttgcactctctgtattcaagtgctcagtagctacaagtggttggtggctaccattttgggcagtgctactatacaacatttctatcaccacagagagtgctgatgaataatagtactaacaactggaaacattgaaatggagaggtgaaggagagaaggcagaatataagagaaacttcaaagcattcagcgtgtctgataggcgctgtatcttacattatgtttggagcatagtttttgaatttcttaattttcaaattcggttgaaacagattttggtcaattgaagtgaaggactatgcctgctttaatttgcgtagcttacctttgtttcacgtgtctcccttattacagtgtttgtagcagcatctaactcaatccctaacttctttttggtgcagggaccatttaaaaacaatttgatcatagaggttatctcctttgcaatccatattgttttatggaacaggtgaacagctggtgacaatagcctcaaggtttctaatcccaccaaaggaaaatatggtgtcagtaattaccttgtactatgatatttgtgaaatccaagagagggctagatctcaggctctaataatacatccgtataaacatctcagtagggcaccacggaagagtcttaggatatcaggaacaataagagcgggagaatatcgaccttaatattctttacacttattaaaaagtgaaaagacagccataaagcagaatgagttcctgtcctttgcagggacatggatgaagccagaagccatcattctcagcaaactaacacaggaacagaaaaccaaacacctcatgttcgcactcataagtgggagttgaacaatgagaacacatggacacagggagtggagcatcacacaacggggcctgtcgggagttgggggactaggggagggagagcattaggacaaatacctaatgcatgtggggcttaaaacctagatgacgggttgataggtgtagcaaaccaccatggcacatgtatacctatgtaacaaacctgcacgttctgcacatatatcccagaactaaaagtaaaataaatgaaaaagaaataaaaaataataaaataaaataaaataaatgaaaagtagccattttaccagttgagtatttactgacttttggtgaaaatcactttctaagattactagaaaccttatgaccctcggcctctactcccaccacgtgcggattttcacctccacctactttgtcacgtcacatgcccttctgctctttaggacacttgtattgggttcctcccccacacgtaaacagaacacacaggtctgtgaatggacctcattatgctcatttgtctttgccaagaactattgaaaatgatcacaaatgactatgtaattataattaagattttgtacatgcatacactttatttttaacaagtttgtcctgttaaatgtcaccccattttgaatagtaacattcactggtgcaaggaagaattattaaaatgacaatttaactgatatccttgacaggtaagccagttattgtatttcataattgtgattattacaatacctatgaagattaattaggacaatttattctataggacttggttatcaaaatgatcttttttcccattttagtccatacatcttcagttttaatttccttcttccaaagaactctgagtcttgcccagtgtgatacttcagattttgtaaaaatataatgaagaagaataacatgtatcagatcttttttttaatgtactgggctaaaaattataagcaccatcaaattactagaaaattcttttaacactctgcttcttagttaaaaaatgattcctttttgtgataatcttataattttcaaagtatcattttagaaattttaaaaaattattcttgttttcattcagtccatttcatcagaacttagattttttcttccctctacagtatgtggtcttgatgtgctttctccttgcaaaataaaatctttagtttcaggatctctgtgttctattccttcaatttaaaatcataggaaaaataactatcatttccttatgtctgtctccaattcccccatcattttctgtgagccaattttcttctttttcttctgtctactgtaaggaactttttactctgctctattctctgcaattcagggctcacaatttctttgacttctcagattatcctttgtacttgtgtctactttttcattaaaaaaaaaaaggcttcggtcttattttgactttatcatctttatattgccatatttaaaacccatctgcttattgattgaaccaaacttttcatcttacttcatcatactgaatgtataacttctgaatgacttaaaaatcatcacataatgtgagagaattttctatcatattcaggtgactgcattgtaagcaatgaagttgaagaaaaatagcttataatggatataataccaagaaataataagaatgagaatctgcgtatatcatatactgggttaacaagctcacaaggcaaatcaccattttattagatatttaacaaatcatactagtactggaggaagtatagcagaaaaaaggagtatggacattgggattagctgccttgctaatcttttgtcagtccctagtgacatgcttttgggttgagtcattgttacctccctgagctgtttgtttataaaatgggggtaaatatctcagatgtttcagtgttgtgacatataaagcgtcctccatagtacataataccgtaagcactccataaggtaattcttgtccttttaaaaagtatacacttttgagttcaggacacgtacactgtaacctagttgtaaccattttaataaaagaaggttttgatcatttttgataaatgtactacatgaatagttaacttgcctttcacttcctataccaacggaaattttggtaacaaatttaaagaaagcattaggttgaatatcccatctgattaaatgtcaactaaatattgtttctggcttttaaaatatttctaattcagttataaaacaggtctattactcaggaggctgaggcaggaaaattgcttgaaccagggagtcggaggttgcagtgagccgagatcatgccattgcactccagcctggcgacagagtgagattccgtctcaaaaaaaaaaaaggtgaaatgaaaaacaaaaaagaggggtgaaatttctctgcattctccctttctgctgttgggaaagccctttcattaccaagaatgcatggaattctgcttattaatttctccatctatgtgtctctgtgaaaaatactaattatttacaattttgtaagctatgaataaggtctatgttttctctgaaattatagcaacaggagcatttcccccttatttgggccgcaatcttttcattctgattcttaccataacttctgacttctgactttatcatgtcttctgatttctactaaacatgaacagaatgaatgacttctagaaatggatacaggtgtaatacatataaggccagggaaccacttaattatctttacaaagtactaggacttcagaaaaatcaaatgatgaaatggagctagctttagtatgttctacttatcattggactattaatcatgtctgtctgatgagttacctaggacttcaactgtttttatagatttaaagaaaatattataaatgtatcttacctggatttaagactggacagctgattttggatttttttctgctaccctgttgttgatatcactgacatcagcctttgcattttgactggaggctcctttctctctttctctctctctctctctctctctataggaaaccagtagttatgtcaggttgctaagtattttcccactgaaggacaaatattctggagcagtatatatttagcatttgacatttgataaacaagcttgtttgagatattttcaatacaatttcagctttggcaattgtaagcaaaggatccagttggtaattggtgaaatgaacagatgtggacacgctgcctgcatcgagatgcattaatttttctgaaaagtggataagatcttgtgagaatgaataatggaattcaaatcagatggggtgagatatttgatattcaggaacaaatcacagtataatagatctgctactttgtttggttttaatggggagttgctaatgctgaaatatagtcagagaaaaggaacgtggaatttctatagaggagagcctggctctggggtaatactactgtccttggtggaatgttgtcttttctgaagacactggttcaattcaatacatgaaacattcatcgattattatttagaaaagctaatctactgacaagacacagagttaagtagtgaaaatacagagacctagacacagttcttattaagaaattttttaatttaggtggcatatttcagagagaaattctctgcttggggcaataggtacctcctttggaataagcatggtgagaaagaattgcttctggcagattagtgagaagagtgagatattttctttcgatgacctctctattaaaatttgagtggtaaaactttgtgatgattcaggctcttcataattcttaattttatcatcctctaataccaggacttgcccagatcaatattttaggaaacagtcatgcttgctaaacccagggatttctattaaccactagataagacataagtttgtcatgcaacaagtatttattgagtccataatttgcccagcactgggctttggtactctgggccttgatactctaggttgtgtcagagatgtctaatatatttaaggtgacagagttcacaaatgagactttatgaaaatgaatatccctttttaagtctcgagaaatatgatgtgcacccgcttgaggctttattaaatctccagcgagcatgaacttgtttgtgacccaattgtagaattgttgtatgatgactatcccactggcaggcacttcttgtccaagagaatgtaattggatgttggtgactcaagcaatcctgggaagactcctccatgaccaaattaaagacaacaggggcttggtttgtactcagctctacaccaatcagcatgagacaaagaagagatccatggcaaagtggggagactactgtttattttacaagctagagaaggaaaactgcagttcctgagttgcaaaactgctaagaaatgggagaacacagaactttacaggctgaaccttggtgtcttagttattcctcttggctacagaatgccaaccagtaggagattcatcactgagatattacagggaaatgaagccaggcaagaaaaatatgtattccctttcttctcagcccataaattttgttattaataaatcagactcttatagaacagcttgccacggctgtctctagaaatgtttttattagcagaatttttattaaaataaaatacacagtagttttaagagtgaacattatagttttaggtcataaggggtgtcatggagaacacatgtggatgctacttgccagttacttgatctaggccttgactcttggttttctgttgctcggataagttagcatgatttgacatgcagttaaaggtgtggtaacctgtgattgatttcccattcttgatgctccctgcctggacttctcggaaaatttcaaaacaattcattcttctatgagggctgcctccttggttgcttcggctaaacagtgttgagcaacaagttgggaaaggaacgttgcagtaacttttaaaaattaagttagaaacaaatgtcatcaaagtaaatgataatttgccaatatgattgagcaaaaagatgaagatgcacgctccctacgtatttgctttgcagaagaattaatttgaaaaataataacatattttaaaatgaattgtaaatataaacacatgctaattgcagaggggaatccctgtgattattcagcagtttgtgtttgtcaagtgcttttcagtcagtccattccagctcagcagggcagaggcttgggctgttgtaaacttgtgggcagatacccagtgatggggcagacatgagcaggtagggctgacagcatgtgaattgagttttcttcagtcatgctgttgcagctgctcccttccctcattgctgagtttgccacagcaggtaggaacctaactctggagcctgggatgaaggagaacccacattgggcttgaggaacaagatctgccaccctggtaggccctggttaaatctcatgcaagtgtagcaatgagagagggtatgattgagttctaatttaggaggaaaggggataatgtgccctttgcacccccaggagaaatcattgctcatctgtgcctaagtagacttatcaagggcagttggttcacaatggtgtatcaccccaaaggactatagtgttatgagaacttgccagtgtatttgaatttgggtgctggcagatgacatcatgaggtattatggttacccataaatatgctagtttattgagaaggtggtagacatgctagtggatgagagggaaggacagaagcagttagtaaacagcatctgcaacaattcagttaactggtggttgtcacagtagcatggtggaaaagttggcaattaataacttctaagaaaactgaactaatgaaccaatcctgcgtgtgctatgtgtataacctccttctcactattaacagatttgttccaaacttatataagacaatgaaaataaagcttggcaatatagggaagggatggagggataaagctgtaaatcacgtcacaggcaaattaagatataccactggatcaagggatttaatgcagaaagactgatcctaacttatttcttttatttagcaataagatttgttacttacattgattatttaaaatgagttgcattattagaaaggactattttgaagacaactataataaaatgtcagtaactgatagtagccaagatattttaaatatatcaaagttgtgtcattaatattaatgtgtcccttaatatgaagtcctgcccaggcttatttatgtattcaacagacacatacctgttgaagtgtaacagatattctggacacaagcaatggtaaacaagacagatgcagtccctgctttcatgcaatttgcaattgaatggtctttgacattttattgtgattgttttagttatttaattggagaagtttttaatttaaatttgtgttatgttcagtgttaaggaacaaaaatgtgatgtgcatttctgagactcagtaacacttctggtttttcctttttcatttaaagaaaaatttagtgcccaagataagctagaatttttggaatcaagtaattgatgacctgggagccaattttattacaatagtgtttttagtggtcttagaacttttcagaggtggtagctctgaaaataacactgtaataaattcacacatacatctatcatccaataaatgttaattgaggcccactacagcattgtgttagattctgaggttacaaattgttgaccccatgtcgaacatgttgaccccatcaatgtaatcagtttgacattacacagtcatttaaacattaaagtgtcagcggatattttagttgtaattttgataagtgctctgaaggagaaaacagtgggtgttgtgaaaagcagtatttggttgattgattattatagaggatctgagaaaacttacttgaggaaggaacatttggctgaactcaaagagatgagtaggagttaagtaagcaaggaagaaaagaagacacatgaaggaggaagaatgttctagaaacacacacacacaggtatatgtatatgtacatgtatatgtatatgcatatgtcttccttagaaacatataaacagctgcaacatgattgaacttatttacccaattaccaaagcttattttgcaccatgaaggtggagataaaggctttttaagcagcaaggatagaatctttgtagtttttatttataggctggttcttctgacaactttaatttttcatctttaccaacttcatggtcttcagtacatacaatgcaatcattattataaaattatattttgactcaaactctaaggtaggatgattcagctgtgcgccatcaacatagcagcatgaatggtagagactagtcattccaaacagtgaaggggcaacgtaaaactaattttaatattatatgaaagtacttcttgcccttgactgcttttttttttttttgaagaaagcaaactttaaaaatttattttagatttacagaattattgcaaggatagtaagagagttctcatatatgcctcacccagtttcctctattatcgacatcttacattatatggtacatctatcataactaatgaaccaatattgtttcattattagtaactaaatctatactttattcagattttctaagttttcctctaatgttctttttctgtcccaggaccccatcaggatatggtatgtatagttgtcatgtcttcccaggctcgccatggttgtgacagtttctgagactttcattgtttttgataccccaggtagtttaggcattttgtagaatgcctcccagtctgaatttgtctgatgttttcctcatggtttgactggctttaatgtgttttggggaggaagaccacagaggttaagtgtgattgtcatcacatcgtatcaagggtacatgccatcaatatgacttatcactgttgatattaaccttgatcatctggcttgagatagtatttgtcaggtttctgtattatacagttactcttctccctgtccatacagtactttttggaagaagccattttgtgcagctcattttttttttaattttaattttaagttctggggtacatgtgcagcatgtgcatgtttgttacatagttaaacgtgtgccatggtggtttgctgcacccgtcagctcatcacctaggcattaaagccaacatgcattagttgtttttcctaatgctctccctcccccaaccccaatctgacaggtcccagtgtgtgttgttcccctccctgtgtccatgtgttctcattgttcagctcccacttctaagtgagaacatgtggtgtttgggtctctgttcctgcattagtttgctgaggataatggcttccagctccatccatgtctctgcaaaggatttgatatccttcctttttatggctgcatagtattccatggggtttatgtaccacattttctttatccagtctatcactgataggcatttggtttgattccatgcctttactattgtgaatagtgctgcagtgaacatatgcatacatgtatctttgtaatagagtgatttatatttcactgggtatatacccagtaatgggattgccaggttgaatggtatttctagttctagatctttgaggaattgctacaccatcttcctcaatggttgaactaattaatttacattccgaccaacagtgtaaaagtgttcctatttctttgcaacctcgccagcatctgttgtttcttggctttttaatgatcaccattctgactggtgtgagatggtatctcattgtggttttgatttgcatttctctaatgatcagtgatgttgagcttttttcatatgttctttggcctcatgaatgtcttcttttgaaaagtgtctgttcatgtcctctgccaactttttaatagggttgtttgtcttttcttgcaaatttgtctaagttccttgtagattctggatattaaacctttgtcagatggatagattgcaaaaaatttcccccagtctgtaggttgcctgttttctctgatgattgtttcttttgctgtacagaagatctttagtttaattagatcccatttgtcaattttggcttttttttgcaattgcttttggcagttttgtcatgaaatctttgcctgtgcctatatatttattgcatagattttcttctaggggacttcaaactatgctacaaaacttcaataaccaaaacagcatggtactggtacaaatacagacacatagaccaatggaacagaatagagaactcagaaataagaccacacatctacaacgatttgaccttcgagaaacatgaccaaaacaagcaatggggaaaggattgcctatttaataaatggtgctgggagaactggctagccacatacagaaaattgaaactggaccccttccttacaccttatacaaaaattaattcaagatggattaaagacttaagtggagctcatatttaaggagtgagaagatatgctctacctctttaagggtggagtagctctataaattatttggaagtgtctattctcctccattaatttatttagtcaacaattagtatcagccatctagaacccatgaatatttatgctttgggtacagtccaatactattttattttgtagctcatcttgttccagctttggccatttggagatttttcagttggctcctgtatctctttggcttcttacatatcattgtagggttttttaaaagccttttcttactttctgtcactacaagatagttcagacttatcttctgtattttttgccccagttctatgatcagccacttctccaaggagcaataatttccttcaatgaaaaccaagatatgggctgttggtgtacttgttgttattgtgtgttgttacttctagatcctctaagctgatagtgcaaagagatatatgtgtgtgtaccaacctatatatctacacacatataaaaatatttctatttgtaaccatctgtatctatcttaggctaaacctgagtacctactgatgtctccaattctaacctgcaacagcatggaacattctagccttctcctcttacttatctgtcacttcctataccaatagtgagaaacctggctcctaccatctgctatttatttacttaattatttaattccactatacttctatggaagtttcagaattgttaatctgtactcatgtacgaaacaactttatcaactagagtatagtgtttatatacagttcctttgcctttattctaacagattccacttactcattttccgagtcacttaggttagcgccttattttcctaagtccattagtgagtttgcttcatgtatttgtcatacatttaaattcttttgtaatattgtgcattccatcccagtttcccctgacatcctaaattaactttttaagtttggatacattgtggtctattctttgttctgtaaagctttatggattttgacaagtatttaatgtattgtatcaccattatagtaatatagttcctatggaatagaatagtttctatcgctgtagcatagaatagtttctctactctataaaatatcctgtgtttctctaattcaacccctccttcccaccttgaactcctgacaacccctggtctgtttaatatctttcttttgtctcttctagaatatcatataattgaaatcatacaatatgtagctttttcagactggctactttcacttagcaatattcatgtaagtttcatccatatattttcatggtctgatagctcatttctttttaatcactgaataatacttttatttatccactcactggtgaagaatctcttgattgcttctaaattcatggcaattatgaatgaaactgctctaaacatttttgtgcaggtttttgtgtgcatgtgtattttcaaattagttgggtaaatatctaggaattcaatttctgcatcattgtggtaataatgtgtttagcttcataagaaattgccaacctatcttccaaaatagctgtaccattttgcattcccaccagcaatgaatgagagttcttgatgctcgacatccttgtcagcatttgatttttgtcagtgttttggattttaactattgtaatagatgtgtagtagtgtttgattgttttaatttgcaatttctttttcttttttgagatggagtctcgctctgtcgcccaggctggagtgcagtggcacgatcttcgctcattgcaacctctgcctcctgggttcaagcaattctctgcctcaagctcccaagtacctgggattacaggcgcctgccaccatacccggctaattgttgtatttttagtagagatggggtttcaccatattggccaggctggtcttgaactcctgaccttgtgatccacccgccctggcctcccaaagtgctgggattacagacataagccacggcgtccggcctgcaatttcttaatgacaaaaaatattgaggatattttcacatactttttttgccaactgtattttttttaattaatttttatttttattttattttgtaacttttattttagatttggggtacatatgtacatttgttaatacaggcaaatttgtgtcacaggggtttggtgtacagatcatctcgtcacccaggtactaagcatagttcttgatagttctttttcctgatcctctccccactcccactctgttccctcacgtaggccccagtgtctcttgttcccctctttatgcccattggttctcattatttatctctcacttaaaagtgagaacatgcagtatttggttttccactcctgcattagtttgctaaggataatgtcctccagctccatccttgttcctgtacaggacatgctctcgtgttttttttctttctttttattttaatggctgaatagtattccacggtgtctatgtactacattgtttttttttaaaccctgcataccattgatgggcatttaggttgattccatgtttttgctattgtgaatggtgttgcaatgaacctacatgtgcatgtgtctttatggtagaacaatttatattccactgggcatatacccaggaatgggattgctgggttgaatggtaattctccttttaggtctttgagggatttccacactgctttccacaatgggtgaactaatttacactcccaccagcagtgtataagtcttcccttttctccataacctccccagcatctggttttttttgtttgtttgtttttttgtttggtttgtttttttagtatttaataatagccattctgactggtgtgagatgatatctcatcatggctttaatttacatttctctaatgattagtgatatgtagcattttttcatttgttgccaactgtatgtatttttcaatgaggtgtacatcagatcttttgcccattttaaaagtggggttttgggctgggcgcagtggctcacgcctgtaatcccagcactttgggaagctgaggcaggcagatcacctgaggtcaggagttcgagaccattctggccaacatggtgaaaccctgtctctactaaaaatacaaaaattagtcggacatggtgtcgggcacttgtaatcccagctacttgggaggctgaggcaggagaatcactggaacccaggaggtggaggttgcagtcagctgagactgaaccattgcactccagtctgggcaacaagaatgaaactccatctcaaaatacatacatacatacatacgtacatacataaaattgggtttttgttttctttttgttgagtttgaggagtttttttgtatattttgattacaagtcttttatcagccatgtgtttcacaaataatttctcccagtttgtggcttatcttttcactctcttaattgtttttttcaaagtagaaatttaaattttaatgaagcccaatttattaatttttttcttccatattgtgctattggtgttgtatataaaaacttactaccaaattcaatatcatatagaattttttctgttttcttcaagaagtagttttataattttgcattatatgtttagatcaatgattcaccttaagttttgtttaaggtgtaaggtttgtgtataagtttttctttttccacatcaatgtccagttgcttcagcaacattttctttttatatatatcttaagggtaatcagcgcaatattttctgaaaagatgacctttttctcatttaattggctcttctttgtcaaagatcagttgaccttatttgtgtggatctatttctggacttcttactctgtttcactagtccatctgtttatactttaaccagtaccatactgcctttattactgtagcctttatggtaagtcttgaaatgaaatagtgcaagtgctccaccttcttcagaattttgttcttcttcagtattaaaggctattctaggtcttttgcccttctttaaacatgttggaatcaattgtcaatatctacaaaatagattattgggatttggatttagattactctgaatctgttaattaagttgggaagaattgacattttatcaatattgaataatatgaacatgtaataatattgaactttcaatctctattatctcttcatcattttaagatcttctttcatttttcattgttttatagatttttacatataggccttgtacatactttgttaatttatatcttagtattgaatgtactattataaatggtattttctaaactttgaattcctgttattcatgatgatatgtaggaaagaaattgacttttgtatattgacattagatcctttaaccgtggcatcattacttattagttccaggggagattttgttgttgttgttgattcattggaattttctgcatagataatcatgccatctgtgaataaagatgttttatttcttccttcccaatctatatatcttttatttctttttttgccttattgcacttgctggtatttctagcataatgtataataggaggaatgagataagatatcttagaattatcctcatcttcaggggaaagtggttagttttttgtcattaagaataatgttagctattgtttttttaaatttcctatatgaaattgaggaaatttctgtctattctgaatttgctgagtttttaatcataaatagctgttgaattttgtcaaatagttttcctgtgtcaattaatatgatcatatgacttttcccgttttcactgttaatgtggcagattatattgatttattttcaaatgttgaatttgccatcagacatggaataaatcccatttgttcatgatgtataatttattttatgcatcgtttgttctgtcttgctaacattttgttgagattttgtgccagtgctcaggagagatattggtctctagttttactttcttataatatctttatctgatttgggtattaggataattctagactcagaatgagttaggatgtgttttctctgcctgtttactaacacagattgtagagaattggcacaatttctttcttgaagatttgttagaagtaatcttgccaccacctgagccagatgatttctttagaaggtaattagttattgaatcaatatatttaatatatatagagatatttaggctatttatttctccatgtgtgagttttggtagtttgtgtatttcaaggaattggtccatttcatccaaattatcaaattcgtgagcatagagttgttcataatattcctttattatccttttaatctccaagagaccagtcgtggtgacttctctttcatttatgatattggtaatttatgttttctgtctctcttttttttttgccagagtctaactctgccacccaggctggagtgcaatggtgtgatctctgctcactgcaacctctgcctcttgggttcaagtgattctcatgtgtcagcctcccgagtagctggtattacaggcatgctccaatacacttggctaatttttttttttgtatttttagtagagatgaagttttaccatgctggccaggttggtcttgaactcctggcctcaagtgctctgcctgcctcggcctcccaaagtgctaggattacaggcgtgagccaccgtgcccggcttctttttcttaattagcctgaatagaagtttatcaattttattgctcttttaaaataaccagtttttgtttcactgagtttctttatcatgtttctgttttcaattttattggcatctgctctaatttcagatgctccttgacttatgatggggttgtgtcccagtacatccactgtaatttgaaaatatcataagtcttttgacttatgtaatgcatctaacctaccaaacattatcgcttagcctaacctcccttaaatgtgctcagaacacatacattagcctacagttgagcaaaatgatctggcaacaaaacacactatagagtattgatggtttaccccgatgatcacatagctgactgagagctgcggcttgctgctgctgcccagcattaagtgagagtattgttccatatattgctagcacagaagatctaaattgaaaattcaaaatacagtttctactgaatgcatgcatattacttttgcaccattgtgaagtcaaaaaaaataataaatcaaaccatcttaagttgggaactgtctatattattctttctcttctgcttgctttaagcttatctagtttttttcttctctagtttccttaggtggtggcttaggttggttattgatattatatatttttcttatctaatatatttacttaatgctatgaatttttctctaagcactgcttttcctgcatcccacaaattttgatgttctatttttatcttcatttagctcaaaatagtttaccatttattttgaggctttttctttgactcatacgttctttaaaagtgtgttgttcaatctctaaatatttcgatattttccagctatctttctgttgatttctaatttatttccaatttggtgtgagagcctactttgtacactttctgttcttttaaatttgttaagggtgttttgtgacccagaatgtggtctatcttggtgcgtattccatcagaacttgagaagaatgtgtattaagttgtggtttgatggagtattctataaatattaattagaccatgttgattcatcataccgtttaggtcaactatatctgtattaattttctgcctgcttgcactagcaattactgacagcggaatggtgaggtttctaagtataataatggtttgggcttgtctatttccccttttagtttcaatcattttgcttcatgtgttttgattcacttttgttaggtatacacatatatacacatatttatgattgttgtatcatcttgaacaactgacccctttatcatcatctttatccttggtacttttccttctttggtagtctgctttgcatgaaattaatatagccactccagctttatttttgtgaatgttagcatggtgtatctttctccattcctttacttttaacatatcagagttattacatttaaagtgggcattattactaggataaataccaaataaagtattttgcatgctgggcttaaaacctagatgacaggttaataggtgcagcaaaccaccatggcacatgtatacttatggaacaaaactgcacattctgcacatgtatcccagaatttaaagtaaaataaaaaataaataaataaaaattaaaaagtaaaaataaattagctgggtgtggaggcagccacctgtagtcccagctactcaggaggctgaggcaggagaatcaaaataaataaatcaataagtggggctttttgtagacaacatatagtttggtctttcttaaaattcaatctgacaatttccatcttttaactggtatatttaaacaatttatatttaaagcaagtgttgatatatttgaataaaaataaacctgtgtttattaactatttcatatttgttgccaaacgcttctttttggtctttcgtagttttatttgagcaatgtatgtcataccattttatcttttctcttagagtattaactatacttcttttttttttttttgagacagagttttcctcttgttgcccaggcgggagtgcaatggtgcgatcttggcttaccgcaacctctgcctcctgggttcaagcgattctcctgcctcagtctcccgaatagctggaattacaggcatgtgccaccatgcccggctaattttgtatttttagtagagacggagtttctccatgttggtcaggctggggtcttaaactcctgacctcaggtgatccaccggcctctgcctcccaaagtgctgggtttacaggagtgagccaccgcacccggcttaactatacttctttaaagaatttttgtagtggtgccgctaaagttcacagtatacatttttaagtattctaaatacaccttcaaataacactattcctttttacatgaaatatagggatattataacatagtattctcaattcctccctactgtcccttgtgacatagctgtcatttatttcatttcacttacctatatactataatcacctatacattgctgctattatgattttaaacaggcagttattgtttacgtcaattaagaatttagaaagaatttagaatcctgtgtaaaataaatttccttttattttaccttaattcatgcattctctgattatcttccatgctttatgtagatccaagtttctgacttatatcaccttcctcttgcttgaagaacatcttttaacatattctgcagggcaagtcagctggtgatgaattctctgaatttttgtctgatttttttttaatatttccttcacttttgaaggataatttccctgcatctagaattctaaattggtcacttttttcaacattttatatattttacttcactttctttattaatgtacggtttctgaagagaaatctgctgtatttcatcctgttctctatggttaggtgcttccctgccctggctctggctttttcaagattttctccctgtctttggtttttctacagtttgaatacaatatgcctaggtgttgtttgttttgtttttttgtaaggagtggcatgtatttatcttcttgatactccctgagcttcctggatctgtggtttggtgtctgtcattaattttgaaaagttctcagccattactacctcaaatatttcttcttcgcctttctttttttttctttctggtattccaattatgcatatgcttgttataccttttgctttttcattcttttgattctttacatttcagttggggacgtttctgttgacttatctttcagctcactgattatttccttggccgtgttgaatcaattgattagtcctcaaagacatttttcatttctgttacaccatttttacatttctagcatttgcttttgattctttcttaaaatttctatctttctgcttatattacccatcttttattgtatgttgtcttctttttccattagagccctcaaactctttttttttattatactttaagttttagggtacatgtgcacattgtgcaggttagttacatatgtatacatgtgccatgcttgtgcgctgcacccactaactcgtcatctagcattaggtatatctcccaatgctatccctcccccctccccccaccccacaacactccccagagtgtgatattccccttcctgtgtccatgtgatctcattgttcagttcccacctatgagtgagaatatgcggtgtttggttttttgttcttgcgatagtttactgagaatgatgatttccaatttcatccatgtccctacaaaggacatgaactcatcattttttatggctgcatagtattccgtggtgtatatgtgccacattttcttaatccagtctatcattgttggacatttgggttggttccaagtctttgctattgtgaataatgccgcaataaacatacgtgtgcatgtgtctttatagcagcatgatttatagtcatttgggcatatacccagtaatgggatagctgggtcaaatggtatttctagttctagatccctgaggaatcgccacactgacttccacaatggttgaactagtttacagtcccaccaacagtgtaaaagtcttcctatttctccacatcctctccagcacctgttgtttcctgactttttaatgattgccattctaactggtgtgagatggtatctcattgtggttttgatttgcatttctctgatggctagtgatgatgagcattttttcatgtgtctgttggctgcataaatgtcttcttttgagaagtgtctgttcatgtcctttgcccactttttgatggggttgtttgtttttttcttgtaaatttgtttgagttcattgtagattctggatattagccctttgtcagatgagtaggttgcgaaaattttctcccattttgtaggttgcctgttcactctgatggtagtttcttttgctgtgcagaagctctttagtttaattagatcccatttgtcaattttggcttttgttgccattgcttttggtgttttggacatgaagtccttgcccatgcctatgtcctgaatggtaatgcctaggttttcttctagggtttttatggttttaggtctaacgtttaaatctttaatccatcttgaattgatttttgtataaggtgtaaggaagggatccagtttcagctttctacatatggctagccagttttcccagcaccatttattaaatagggaatcctttccctgttgcttgtttttctcaggtttgtcaaagatcagatagttgtaggtatgcggcgttatttctgagggctctgttctgttccattgatctatatctctgttttggtaccagtaccatgctgttttggttactgtagccttgtagtatagtttgaagtcaggtagtgtgatgcctccagctttgttcttttggcttaggattgacttggcgatgtgggctcttttttggttccatatgaactttaaagtagttttttccaattctgtgaagaaagatattggtagcttgatggggatggcattgaatctgtaaattaccttgggcagtatggccattttcacgatattgattcttcctacccatgagcatggaatgttcttccgtttgtttgtatcctcttttatttcattgagcagtggtttgtagttctccttgaagaggtccttcacatcccttgtaagttgtattcctaggtattttattctctttgaagcaattgtgaatgggagttcactcatgatttggctctctgtttgtctgttgttggtgtataagaatgcttgtgatttttgtacattgattttgtatcctgagactttgctgaagttgcttatcagctgaaggagattttgggctgagacaatggggttttctagatatacaatcatgtcgtctgcaaacagggacaatttgacttcctcttttcctaattgaataccctttatttccttctcctgcctaattgccctggccagaacttccaacactatgttgaataggagcggtgagagagggcatccctgtcttgtgccagttttcaaagggaatgcttccagtttttgcccattcagtatgatattggctgtgggtttgtcatagatagctcttattattttgacatacgtcccatcaatacctaatttattgggagtttttagcatgaagagttgttgaattttgtcaaaggctttttctgcatctattgagataatcatgtggtttttgtctttgtagagccctcaaattcctaatcacaattgtttatctctttcctgacattccacatccaatccatcagcatgtcttattggctttactttcaaaataaattaaactcagccacttctcagcatttttaaaatcaccctaatacaaaccccctgctacctcatcaactgcaatggcttcctaacttattttgtaacttttgatctttgagttcttccaagagccaagagttcttccaaagctataaaccctatcattggcactcctctgctctatggaaagcagtggcttctcatctctttcagagtataatgcaaagctctcaccttagctggcatggccctgtgggattggcctcccttgtcttactttttccttgttcaggctgctgtgacctctctggtctttggctcttactagaaacctttgaacccgtttccttcccagtgtcagtatttgtgtgttgttcgttcacccttctcacttcattctggtttctacagcacagagaagtagtagtccctgatctaaacaccctctccacctgctttccactttgttttttcccctagcacttaccattatcagatatcatatatttatttgtttattgtctaacttcctcacaaaaatatgacgttgtgaggatagggatttggctttttgccccagagcagtgcctgactctcaataactttgttgtattaagtgaatgaataaaataaaattaaaattgattcaaagtgtatgagcatgtgtacattttacataagtgatacatgacattcttccattccttgggggctcttttaaccattctcaaccagttgtagtacctttaaaaaatcatgatgaagatgattttgagagctaattttggtaggagacagcagttttagcctgtccgctccatgtgcagaataatagcctattttattacatctgatattcaagcactagaatctatcaataggtaaataatttccaaaaataaaagcatcagtgggaaaacagggaaattatttttaaaaaagaatttctagaccaggatgtgtgcaatttgtaatctctaataagaaacgttatagctgataattccagcaattacagaatcatgatcatatccataatggatcagtagaggctctggcttatataatagcttgccctctcaggattctagagccccatatgtaaacacagaacacatttatattgattgacagtgcatgtaggtttctacagattgtgccagtcagtgttttctaaggcagttatgccatggtaattaaaattatgggctctgaaatcagcctgcctgggttcaaaccccagcttcatgtgtcagcttccttggctgtaataaggaatactaatagcacctgccttgtggctttgaaaattacatgatgtaactttgtcaagagcttagatgagcacttgggatatggcgagtgctcaataaatgttagtttaccatcatcatcatcattattattattactgattgcaagcaagacaaactggttctcacttcagcagaaaaagaaattactgaagtaattttggttagatcacagatttaacgtgaaggatgaataaccagacttggaaaacaggtggaaaccaagaggcagtcagcatggcatagcagccagcacttcaccagtgtggtgccttgggggcagcctggcaggagccactgccttcactcctggactgcagatctaccacaggacagcagactgaattgtcctatgtccagacttcacagtcacagggagcaggctgcatgcaggtggggcccaggtcacctaccttcaccctagagtctggagccacagaaaacagtaattgtccttgtagcttttgtgatggaaagcaagtcctgacacccaccaactcacatactagggaattcaccaaatgtaggacggcagctaagatgctgggaaaccaagaattaacaaatgagtattacaccaattagttaattcattacagatttcaatattttccaaaaaacatcctacaaagaacagctcactttaatatactccaacaaatgatgaaatctctccttggtcatcagcttttctaaatttctgtaactttaggtgattctgaatttcttagtgattctgaacttctagaagattctgaaacagaacagtcttactttgggatgtattcaaatcctagagatcagtcacatcaatctgtgccctttttcattatgtaacatgaaacaggaggacctttccaacttgccttgggaacctgctcctacaacagggtatattatcacatttaataaagaaagagtaatatttgcattgtgacccttcatctgaggtcatcgggactgtgctgtcctcccaagctccactgtaaagggatagacaacaaccttgtctcccagtcattgtaatctgtatcagagagcatcattagatgaatgaagatggaaatgttctcacggtcagcaggtggggaaggcaagacttgctgattggaagcaatgaaccatagttcattctaaggcttggggagagcaactttgaggaaatgaggcccctaaacttgccatgtaggagaagttggggggtggtaaattgggcaccctttatctactaaacgtaatctttacttccccaccctctaatttttctcagttgggcttgaaattgtttttgcttgttacactttatgggaaaagaaagggaaatcctaataaggtccatgccagcaaaactctagaagaagaaactaagaatttcaaattgacagtttgttaatgagaaaagacaaggttaaaggattttgttaaacagatgaccaaaataattattggaaacttctgcttctggccaaggtggaataataagggctacatttaccttcccaccagaaaatataataacaaacaaaaactggacaaaacactggacatgacactgttgtctttaaaccttggacatcaatcagtgcaggatgttattttgtaagaaagggaaaaaaattggggtgagccttctgattgtttccagactggagagaagtttcaggccacagcaagtggggaggaacctaggtgtaagtatatgtataaggtagcacatcatagtggccaaatgaatggcacaggaaagaaaaactacaagaacagaggaggtagggccacaaaactagagtggggtccaagattcactatggataaaatggggtgttaatttggttttcaaggccaatacaagaggaggcatagaaaaagaacaaggtggtgttgggaagtagtataaaaaggggcacaggcttatccttgttttataaaaaacaaaggtttttggaagggatttgtagagataagtttgaaaagtagtttgagactatgtgtggaaattcatgaatcttagagtttgattttattcaggagatcagtagcttttaaaatgtaaaataaaaccagtaaactctatctaaaataaattcttcccctaatcccaatataaaaaatacatataaaagcgtagctgctctagacaaaatggcgggtatgagatgaccagaaacctcaacagcactacctctggtagccccatagaactgccaagagttttcagagtatagttaattcctgctgacggctaaggcagtcattgagtgattggaaagaagacggaagatagacaagatcagttaattgggttggagggaagactgaagataggcaaggtgacaaattaggaactgttgcaatgatctaggcaagaaggaacctatgaactaggagggaggcttaaagacagcaaggagggaactataggcagggacatgtgaggaaatgcttagtagttaaggtgagtttgtaggtatgaaaggagagaaggaaagaacattaagtagcattaagtgaaccagataatttatagctccttgacctgaaacatttagaggctgtgataacactaataataataatctataattacataaattacgtagtgtaatgatatatcatgatataatcatcttaccaatgctttacagtcaatgacattgtggtacagagactttggaggcagatagacctcgattgtaacctctgtgctgcccgtggtatgaccttgagcatggtagttaatctgaacttctttcttttctgttaaattggggacaatgacagtacttaaccttatagtacttgaagggagagtgttagaattgatactggggagtctctccacagaaagttgtattagttattgtctttatttcattcttaatgaattagcactcccgttttctttaacatgttgaatttaaaacctcttagtgtatttctttgtcttgccttttaataccccatgaattattgagaaacaaaagaaagtgattatgcaaatgtttgaaatatctaataatacatgaacgtagtcatgggaaactggagaaataactttactgatattatactagttttttttctggaagcatagcatattaagaaaactcatttcaatgaaagaaaatttaaaaattagagtgcattagaagcataatccaatgaattctattcctaatgaatactcaggcagtatgttaactttttctgagatacaatagccaagccaaagaatttaaagaatgaaaaaaacagatgattaaacaaactgtgaagtaattagaggtagtctttgaaaatgcctcattaggcatttgactcattaggacagatccttttattttagggccaggacataattatttaagcagttgatgtgtctttagctcctttcaccttgccacaagttgtcgcctgtactgcctttccacctagcttccaagtccaggccgactttgaagagattccttagggctcacctcccctggagagtgccctctgtaccatctctctccctttcctcctcattcctattgcctgagtttattgttttaataaattcccataagttaacacctcctagggtggattagaatcattcaaatccacattgattgttactaagtagaaattttatactgagcctttctaaatccttacaacaacgtgacgaggatattatagttgctttaacccaaggagatgaaattcaaactggtggcattgcacacttacagtgggcttgcaggatgaaagagagcttggtatctcgatcccttatacaaaacaggtgggtcttgttagaaaaattcttcaataattgttaaggttaaaattttgaaaagtggttcaaagaaatttgctttgatgcaaatattgtctagtcagttacataacttgagctataatgacagtgtacactagctatccagggcacaacatctctattgtgctgttgaatatactgctcaaccattctggaaaatggcatgttcatgtatgaatgacaatgtatcttgtgtgtatggcattccaagccaacatgttggtccctgcaagtaaacttcttgactgtcaagaggctgcctgtttaatatttgcatgatctaaactaattgtttcctttgtttttttcctctgctttatgagctggtagtttgaccttttggcttttcccctgagagttaacaaaagttagacagttggggggtgaacttaagtaaaatccatatcactctatgttgctgctctactaacaattcaagaaaatgtcttggtagaaagcaaggaatgagttttaaattttctctttgaatttcaattatccatgccactcctgtggtccaccattctatataattaagaataagctgtatgttccatagtgacacaggctgttatttctgatttgcagttttcacttaacctagggtaaaattgaaatagaagtcgcatccttttttttttaccttcttccactcaattctagttagatatttttgaacttctataaaatgtctatgcaatattatcaccaataatgtgcaaaattactactcccatgtagaagaggatccattcttcattgaaccatacccttgggatcctatcacatgcagttggccatataatattttatattattgtttttttgttttgtttgttaagtttgtacctacataatggattaaattcaaaatctctgtttaactgaaacaaaatctgtttaactgaaacaaaaaaacaaaatctctgttttttgtttgtacaaaacaaaaaacaataatatttttgttttgtttgtatacttcatagggactttggaatttggaaaatatcgttcatttagggtatatatattagtccattttcatactgctataaagaaatacttgagactgggtaatttataaagaaaaataggcttaatgaactcacagttccacatggctggggaggcctcacagtcatggcagaaggtgaaggggaagcaaaggcatgtcttatatggcagcaggcaagagagtatatgcaagggaactgccctgtatgaaaccatcagatctcatgagacttatttactatcatgagaacagcacaggaaaaacctgcccccatgattcagttacctcccactgagtccctcccacatgtggggattatgggaactacaattcaagatgagatttggatggggacacagccaaaccatatcagtacattaaagaaaatatttgttagcgctaagtgaatctactttcacctacttgattatttgatgattttataaatagtcatctctttcctcatctttccagtcgtattttgttgttccaaagccaaaacctgtgtgtcttgtattcaacaacctgaatcatacagttgtgagacgtaaatgggtgtggtggttccacttacttctttacatagtactacaactaagccatctaagtagtctgctcctaaattcctccaagaagggaaatatcatgatttgatttaaatgtgacatcctttcttagagaagttttctttgtctccttcttccccagtcacttcctcccatccactgtgctttcggcagttcattcgttcattaattcattcaacgaatattgaataacttttgatcaatgtcttcctccctccaagctgaaaacttgatggagggtaacatgatctgtctttgtttaccactgcatcttccgtgaatatacattgtaagtattgaacggatttttactaaatgaacaaatactttgataaaatatttttgattactgccaatatcagtttctgaattgattctaaaattcttctgctggaaagtagattagcgttagtgtgactgctgaagccttttaaagtgggtggtaatactacgtttcgttttgtttcattaacctaagtgctgttctttggaatctttttaaagtaagataaattacattcatgaaagaagcatattatttttaaagtactttattttggaaaggtaaaatgcttgtgtagttataatttggttactcttgatttcaccttaggaaaaacaatatcaccttctaaccatttcttttttagtcaaatctcttgcttctatttctctctgtagatccgctattaaagactgtaatcactgctgcatctttcctgtaaggcttgatcgcattgttaatttctttctaaacttgtagagtaggtgtataaatcgtatttgggtaatacactgactaatactgaagaaccaggcattttcttaccccagtcctcacacgaagtagggaaatacaagtcagaacttatcttctcaaaactctgacctcagaatttcctgagaaatctgaacctaaaaagattctttgcttttgacattttttctctggtgtccaccgcaaggctcttgctcttacattttttttttttttctaatgtttcaaatagaagatggtagagtcatatagtacaagctcagcatcggaggggctactggaggtcaactagtgcaaatgctttctgaataatggaatcctttgggaatacccccttgaaagtcttcatctagcctgttcttggaaaccctcagtgatacccctcatcgtctcctatgatggcagcttctatctttgtcgtcagctctgactattacaaactgcttccttacattgagctgtaactaactaaaaagtttccacaccctgcttctattttagcctttgggctcataaagaacaagttgaacccgtcttatgcagaacaacccatctacgggagatgctcaggtttcctccatgttttcctttctctaggctaacccttcgttgttcctcacttactcactatataacctgatttcatgtctccttacccttcttgttactctaacttgagtaggctagtttcaggatccagcaataagtgtgatacatcaggtatgctctgatgagttgagagtagagtggacatagcatctcccttaattcagatattgtgatctaattggcaaatctggcaataaaagttgaaatgcctgatccaggacaatggctggtcaggtgccattgttctcatcttttacttttaggtgtccctcaatttgttaagttagtacctacgtaatgtcctgaaacttgttaagtttgtacctacataatggattaaattcaaaatctctgtttaactgaaaacaaaagcaaacttcttttcagagccagaatctggaatcatacgtaacagagaatgatattgtacaagttgcttcatctctttaagtaacggtttctcaaacttacaagattattgtgagaactaaattagttctaaagtgcttccatgtaaagtgtatgtaaatgcttaaaatatatagtaagtgctgaatgcatattagaaataataataatctttattataatttttactatttcatgagaagtacttattttaatactgagcaaataggaagagttcatggcttctctatgtttttgaagtgtcatttaatatattatatatataaaacatatatatatttcagtcacacatttgtccaaataccttgacaaattaaaacaaaataagacaaaattctcacgctagttatttgttataaagtaatagaacaagtgatatgttataaagagcatttatttctcatgtctttgatattaaaaatagttgtattaactttttatcaaaacgattgcttccttcatataaatctaagaattatgctgtctgataaatattggagagattaacttctttgaaaatatagaagctttttgtctttttaaaatagttgtttttttgcagatgttaatacatttcagcagtacagtatggcctttttcaggttaaggtgctgagcccaaacctcaaagaatcactgcaaaaagattggatcccccctcttcaccccatttcgtaatttagttagtgagaaccacaactggctaaacctttgtggggggccgggcactgtggctcatgcctataatcccagcactttgggaggccgaggcaggcagatcacaaggtcaggaaatcgagaccatcctggctaacacggcgaaaccccgtctctactaaaaatacaaaaaattagccgggcatggtggcaggtgcctgtagtcccagctactcaggaggctgaggcaggagaatggcgtgaacctgggaggcggggcttgcagtgggccgagatcccgccactgcactccagcctgggtgacacagcgagactccatcttaaaaaaaaaacaaacaaaaacaaaaacaaaaaaaaaaccacctttggggggaaattatcaaataaaacaaactctttttagaattttacaacttttatgttaggaaaaaacaaatacatttgtgaaaagcttaaaatccagtaaatgacttgagggacttggggcaatcctagggtgatgaggagcaggttagtaacagtgaaggacttagcaccccagggggccagaggctgtaatataccttatgagcaagtcattcttatttagtcttgcccattaagaagtctacttggactaaatgcttttaaaaatgcccttttaatttactattaaaagaatattcctagcagaagtagtcttggatgctaaattctattttaagaataactaaaattagaattctgttctttttataacacctgttacacacacacccctacctagtgtgtcggaatcagtttgtatgggctcaccaaagcctactgttcaattttcaggagttttgtaagccatttgatgtcagacaagtggcctgaagtttgttatggtggtggtatttacaccatgaaaattggcatgttatggtggtagtatttacaccatgaaaactgctacaaatagaaatctttttcttcttctcttggagagccacttgttgaacacttaccagctcacctgtgcttgaaagtatttcttcaaataaaatgaaagctggttagctttgaaaattttttgtataaaagtttacacgggaaaaaaataaactaatttttttttccacctgtgttttcagggatacgaaaagaccgaagaggagggagaatgttgaaacacaagcgccagagagatgatggggagggcaggggtgaagtggggtctgctggagacatgagagctgccaacctttggccaagcccgctcatgatcaaacgctctaagaagaacagcctggccttgtccctgacggccgaccagatggtcagtgccttgttggatgctgagccccccatactctattccgagtatgatcctaccagacccttcagtgaagcttcgatgatgggcttactgaccaacctggcagacagggagctggttcacatgatcaactgggcgaagagggtgccaggtaagaatgcgaagcgcagcttttaagagtcaatagcttttcaagaacttgttgtgatgtcatgggagaaatagtgggggaaaaagaagcaataacatgttatgtaattggtttcaaggttacaggagatgtgttcattttcagtatcaatacactgtaattttccaggagattaggaaataatatttttaaatcagaatctagaagactgaaattcttaaattgacataatttatttttaacccatctcatttaccaaaaagatttagggtggacactacatggtaaaactatttaatagtgtatgttcacagtagcagaaacttttaacactaaatgaactacaaaagtttgtaatattaatgacctttgttgaaaacatctcaattattaatcaaacgattttatcttaaaaagatttttaagattcggtgtggtggctcgtgcctgtaatcctagcactttttggggctgaggtgggaggattgcttgagcccaggagcttgaggccatccggggcaacgtggcgaaaccctgtctctacaacaaatttttaaaaattagctggatgcagtggcacacacctgtggtcccagttatgggggaggccgaggtgagaggatggcttgagtccaggaggtcaaagctacagtgaaccatgtttgtgtggagtgccactgcactccagcccaggtgacagagcaagaccgtgtcataaaaaataaaccacacaaaaaaagagaaagatctttatggattaaaaagataataataagtgtatttactgaatgccaattatttatccaacctggtgtatgcttagtattttaggagaaagagaaaggcaatggaaaaataaattaaggtatcatccctgaaagaaacttttagaaagacacagtggctgaagtgataccttgttccttcagttgattctctcagaactggtgttctggtaaaattggactgttactcctgttattcagggagaagaactcaagtttgtatggcaacaagactagaaaatgactttctccctgccccagtgtattcgttcaggagctaatgtagataaaccgaggcaagaagaagctaaattttttttctgggcttataggttaaatgagtgatagatttagttggaggttttctcatttggtttcttttaatagatgaaattaattgtttcctatgaagcatgaaatgttttatatgaaactaaaaaaatgtggagtttgtacttgcatttcaagggtcactgctctgttataggccaagtgaacttatgtctggccttagagaatcttacatgtatttgcatctatcagtatataaacatgtgggccgtagaataaggagccagcagtaccagaacccagccttgttagaggccaccattttggtggttgagtggttattagtttacatggaagcatggagaataataggcaaatgtaggttttcagtgtcagtcgaactggcaaacaaaaatttctggtcatcttcagaatgaaaagttttcttgagtacctacatattttagcattttcatatgaagcagatacattataagttaattgttggaatctaattgtaatatggctgtaagttttttctttatatttgttattgccttgttcttatattatagggaaagagaaacaaacaaacaagcaaagaaactaatggtcatatatttgagagccaactcttggttgctgttcagttttattttcctgtaaacatatattttcccttatgaaatcttgggaatattagctctggagcactgctgaactcaagtacagacattttcatgtgtatcagtagattcccatcatgacatttttataataatgttgaagagcattttaaacaactggaattaagctcaaatacattaccagtggttgaagaattcacatcaataatcttctgaatttaggaataaaatggagaagtcaaggaaaggaaaatattatacacaggctagcaatagttaaaatacaattattaaagccagagctagacaaaattatggcaatgagatgtgtaacaaaaccactctgtaacttcatcatgttcgtttaaaagacctgaatgattccaaaatccttagaccaataaactatgtcttcttacttgataattaaaaaaaagaattataaaggcaaaaatgaaattatatgtatgtgtgtttgtgtgtgttccatgggaatacagctgttgtaaatcaaaggcctacttgcctgaccaagcagaataaaaatagtcattgattttaaagagactaaaagtgagggaagaaaaaagtcttctgcaaaagctctacagatggttgtcaaacttttcagaaaaatagacaaagcaacattttgaaaaggatttatatcttttatatattcaaataccatctgttatttaaaaaacatagcccacactgaatatctgatatagacaatataacgtttatgagataatagtttgagaatgacaataataatagtaagttttaaaagaggaaataagccgggcacagtggctcatgcctgtaatcccagcactttgggaggccgaggcgggtggatcacctgaggtcaggagttcaagaccagcctggccaacatgacaaaaccctgtctctacaaaacagtacaaaaattagccaggcttggtggcacacatccatagtcccaggtacttgggatgttgaggtgggagaattgcttgaacctgggaggcagagactgcagtgagccgagaccccacaactgcactccggcctgggcaacaatgagactctgtctctaaataaataaataaagaaggaaatagtaaacgtcattagtaagaagaatagcaaaatttcagttctagaaatacccagaattagctatatgatacaaaaaccctcatgaaacatttggataatcctcagaatacctatcaatataacaaaaactatgaattgacttcattttgaatgatgaatttttaacaaaaatagtcaatactttgggcttagtagctctagaagtgcttctttcttctttcttttaattaacagaatattgtcagaattttcaaatgttgatgattataagttgaattttccttttcattaacccctggggcttattttttgacttgatatgtttctctactcagaattaagatgtgaagagctttgggatagaatgcatcatacaagtgtgagagtcaagttccaatccataaagtacttctggtagacctggataaagatgaccttaagaaatgattttttttctctttgcagtttaaaaacaacagtagcaacaagaatgataaaacctatgaagccagctctgacaaaagatgtttttttataacacatactatgtatctactttttgatatttatctatcgagaagacttttctccttattgtttgctctgaaatttgtttatatttaataggaattttatagccttatccctgggtagaaattcagtttttttaaaagtagataattaaatcttaatttactattattttacacatggtgaaactagtcaataaatgtaatatcattgagctgaaggttaaaaaggaaaaaatatgactgcaagagtggttgtatttttgatttcagcatcacactcaattgcatcattgagtggttcattcttagtttcagtgttaatgaaatacatctgagtttttttccccagaagcttgaattgtgtcaccaaagtgtcattttgatttattgaaagttaagccctttccaaaattcaccataattttacatgtctcgaaagcaattttatacttcaagtctgtgctatagttctatatattttatgaagatttggatagatatctagccctgagttttttattgcctgttaaatacttataacccaaagtgtagcagcctcatgaactgctgctgggcacagatctgggagagtgcactcagagtgttggcccaggaagaggaaaagaggaaaaggggcagttcagtggcagcttggcttcctgtgaaacatgtcaccttaaccacttcctcattcttttagtggcaaactagacgaccttctccttcccctttcctgccgagtccccctctaatcaacactctagaaggcccctcttcctcctcagtcctgactccctgtcatttacttcaggttgcctccttgctcagttttggccccaggggtaggcaatctcctctttctggacatgtctcccaccagccccaagttcagatttcttggaagtttctgtgttgtctcgaggatgcatggttgtgtgagttattccagggctcaaggcctcttctgtgtctgtattccccaggaatccaggaattcacttctctgcctctcatcctcatcctcatcattaaaatgagcagatttgagctcaggaagtgcttgaataaatgaataaatgaacaaatgaaaggtgatttttgaaagtcttaattttaagaagtctctgagccctgttacagctcaattttcccataaactagaactgctctctaaggctgtgacatttctcctttttcctctcctcaaaatctacctgctgttctgatatctccctgacagccaccatagtgagattctatttccatttccaatctctcttttgtaagggacagagaaacagctagagaaatatggagccatgcgctctgaggactttagcaggcttcaactctatctgcaagtgagtttcacttagcgaatgaaattggaaacttaaagtgggtagggatgagggttcccggagaaggtgtaatacctcagtctgggaattgggagcatctacaaggaacacactcaattctgggaggttcctgtagatttcagagatttagcagggcttcccagcactctgcttcccaacctgtcattggaccagtaaaccctgctctcaaactgttgtggtgtccagcatgctttggcaaggtaatgaaagataacatgacatggacatatgggtgacatcctggagagatgacagaagcctctgtttaaggacaagatttgccatttagattttgcacccactgtataataagagccttaggattgggctggaatcgccctagcaggcatgatggcagcccctctggactggcaatatgcagcttttttgcaagtgttccatgtccaagtcaccccacccagctttctactgctcccgtggaagctctggtgaaacgcaaggaaagcagctgctgttgactggatttttctttcacatgaaactttgaagcctcatagatgcttattggcctggatgctattaaacctttaaaaatccctttctcatcttgagagtatttgagaaacatgtctggggcattttgcccaccctcctccaggttctgtgtcagtgagtgatatggtttgcctgtgtccccacccaaatttcatcttgaattcccatctgttgtaggagagacccatggcaggtagttgaatcatgggagcaggtctttcccatgttcctgtgatagtgagtaagtctcaagagatctgatggtgttaaaaaggggagtttttctgcacaagctcttcttctcttgtctgccaccatgtgagatgtgccttccaccttctgccatgattgtgaggcctccccagccacaatggaactgtaagtccattaagcctctttcttttgtaaattgcctactctgggatgtgtctttatgagcagtgtgaaaacagactaatacagtgagtctgggtcagtgtgtgtttatgttgaacgtagtggacttgtggtgtccccagggcaccctgtggggaatgttggcctgtggctttgctacttccagggggatttggcatggagaatgtgtgttttaagtaatagatagattatgattgaagtgtgttatgggctgagttgtctctcctcaaaaagacatgttaaagtcctaacccccagtatctcagaatctgaccttctttggaaatagtgcctttatataggtaatcaacttcaagtgaagtcattagcacaagccctaatccaataaggactggcattctaatgaaaggggaaatttagacatagaaacagacatgcacagaagaagatgatatgaagagacacaggaagaggacggtcatgtgactggagtgctgggtctgcaagctgagaaatgccaaggtttactggccaacatcggaaactagaaggggcaagagtggactctccccctcagagagagtatggccttgatttcagacttctagcctccagaactgtgaggcgtacatttctgttgtttttgaagccacctagtttttgatactttgtatgggagccctaggaattaatacaaagtgtattaaaaatagaattttcttctattgtatttttgaggcaaaagaaataaggagctattgatttaaggaggaaggtttggctcatctagtatagacttggctaatcatttactcttgtatatttctcttctgcctgcccaagtagttcactgaacaggcttagaagttgatttataattgtaagagtttacacatcagaagttaatttataattgttaacagtttcatgcatctacctcataaataccttgtaaaagattttacccttcagaataatgttttcctctggtactttagtagtttatcctttttttgcatctttgatgcatttgaattcatcctggtatgctgtgtgagctggggctccaatgtcgttttcctacagatgactccacagttgtttcggtttcattcgaacagcctcctacagaagtatttttcagacttcttttatacttgacttccaagtttactactggttaagagcttttaaagtagggggaaagatatgacccattggcctactcgtttgattattttttccaattctgaaatcaaaaattaaaaaatttattcaaagttatagtttcacttaatttatattaactgcatagatagtgtgattcatctgtcctgcttggacatatttagtaacttttaattaatcttagagataaaagatagaaatctatgagacttgagacattcaaataagaccagtactgataagaggtaatcaggtgaagtgccatttggttgtaataggacatcaaaattgttccccaagagtgaaggatgttccattctcacttttcccatctgtcctcccaaattctttcactcttcctgatgctttgaaccaacttgaaaagttagtccactcagaacctcagctgttaaacttttagcctctgcaaacaaactagccgttttcctctttgtccctttaccatcaagctcagttgcttctcctactcctctcccttctgccaggggctccacccttgttcctcattcaacagtggaatcatctgtgtgcctgtctcctctttactgtgtaccattgggtcctcttcttcaccatctctaaatttatgcttcttccctgttccactgtcaccagcttggtctacatcctactttgatcatttggatttaggtcccaccctaatcgagtatgacttcatcttaacttgattgcatctgcaaagacctgatttccaaatacgaccacaagtaaaggttcaggtggacatgaatattaggagagacagcacttcaattaacagtttggcattaggactttattatctagcttagtaattgttttaacagataaataatagtatcccctaaagtttaaaatgcagaaccagattatgcctcagggtgcctaacctgagaggaagagtctttcttcaacagactctgggaaagacctttgtaaaaaggctggtgaccattctatttgatttctactttccaatattaactgcttaagtcagacaatctccttggcccacgctttcccctgccattctccccttcacataatgtcttcattttatttttcccttgttttattccctgaactcccttctctctattcagattccctgcccattttttctcctaatgagacgcctgacttcctacctcctttttgaaacttcaaactgcttagcaaatacaattttgaattgagtttgctgtcacagaacaaaaactagtccttggtccagagtatcttgcaggactgaatcaactgtggtctaagacacaataataactcttaattattttcttgtttccttcatggtatatttgttgctggatgatgagtttatattatggttgaatttcctttttgaaatgaaaagatgaatagtctttattggctgggtatctatttttatccagaagactttgcaaatgagaaatatttctacaatctgagtttaatttgcttaagcaatgaacttgttctttaaaagtcgtatatgtgcaaaataaatttaaattaaataaatcatattttaatgtagtcagggtagctttcatttaaataaaacctatgacaaatatccacgtgaagttatcactcctttaacaaaacaagtgttctccttttttattgaaatactagttttcacaaattgagattccttaatgtgatgaccgcttggactgactatagtatagctgcgttcttagaatggccctgaaaccacaaggcctctccaagatgcatgtggctgactttctgaggtgactgcattgaatctttctggcttagcttattctgcatccagatccctggaagctatttatccccaaacagtggtatatttagacccattgtgtgctaacctctctgtgccctaagtaccaacatagccaagccaaagttcgaactttgctgccttacaatggaggttacatcgtagtgatgaaagaggttaattttctttaggagttgaagaccagagaactgcaaaaaggggagaaaatcagtgtggcctctaatgagagctaagtgagtgaggcaatagaaaacagtgaggaccggccagtgcggtggctcatgcctgtaatcccaatactttggaaggctgaggtgggcggatcacgaggtcaagagatcaagatcatcctggccaacatggtgaaaccctgtctctactaaaaatacaaaaattagctgggtgtggtggtgggtacctgtagtcccagctactcgggaggctgagcggggagaatcgcttgaacccgggaggcagaggttgcagtgagtcgagattgcgccactgcactccagccggagtgagactccgtctaaaaaaaaaaaagaatacagtgaggaccttggagggaatcttacagtggagcagaattaaaagagaagaattcacctatttcctatataactccctctgtaaccgataactttctagagaaagctcactgaatatatttgaaatttgtttcataccacttttatgttattgccttctttcacaggaaccagagagctctaacctgtagatttgctttgttgtctttactttagactacagcctaaactgactgttgatttttggcacaattattacatctctcctttcaccccgcctctagccctttcttaattacccccattaggcatttttcttgctagcgtgaactaaatcccctgtctcaagcacgcgcctgtacattgaaatagaatgttaattcattgacgaaattaactgttcttgattgggaacccctagttccagggaatcttaaggtttcaattctgttgccttggttactaaactgttccatgcagtttgctcaactttgaatggatacttctcttaggaacattctcccttgtaagtaaattgcttgacgtgttaaaatctaagttctgttttacaattcttgagacaaattcaccatgatttagttttaaaaacaagtggccttgtccttttagtctaggatttatcacttagctgtatctagcaaagcccctcacacaatagtaggaaaaagcagaagtgtgattgctaaatgaaggggaaatgtaataaaatgatggaagtgcccttttttagggggaattaaagtttctctttgtagtgttacatgtattcattatgtgactttcataaatacaaaccccaataaaacggtgggcagttccgtctctggagatgttaagtgtctcttcatagaataacatggcacatcataacatttgattccttttacctggtcaagatgtttgcttatggcatttgaaatgcatattttcaaactaggtagatgaatggtttaaatataaaaattcattcaaggccctgagctatagaagaatatcttccaaaacatgcattcaagttctatctgtcagtgtttttctttttgcatcaataaggcagcaatggaatacaatcagatttattttttctttattgctgtctacaattcagagatataacctgaaaaatatgttgtctcttcccaagtagatcttgtaattctctgaactgtgatccagaccaatgccgcctttacattgggtctgtggaagtgggagggtccactgaacctggttatgagaggtttcaaattgaaaagatttacaagtatgtaaataaaatcaaatagtcaattagtatctaacatatacatgtcaaaacacatagccccaatctcataaaatcaaagagatctacctaaatagatttgtttgcctaacaaatagcaagaccactttgacagaatctttagcatgacagtgattgtcaaaatgggtaaatggttattattgcccagttaagtaatttctgatttgctttgccttgattactcttaataaactaaacttaacataccatagaagcaatattttttaaaaagagggtatattctagagctagatagggtgttgtgcagcaatgtgaatgtacttactaccattaaactgcatacataaaaagggttgaaatggtaaattttatgttatatacattttaccaaaataaagaaaagttataatactttccgtagcatatataaaaaagaaacagacatttcatagcaaaaataggataaaaatgatattaaattcataggggatttctcttatctaaaactttagatttgattcttagataagaatataaacacattgcaagaagataaatcaataagccaatgaagtaaggtggaataaataaatagaaataggtgatacttgcggctctgacagcatctgataataatagtacaaacagtttcatttcatttaacagttatttgatgaactcctgtgtgctaggaactgttatttaaaaaaagtaacttttattttaggttcaggggtacatgtgcaagtttgttatataggtaaactcatgactcggggcttggtacacagattattttgtcacccaggtactaagcatagtacccaacagtatttttttttccgaacctctcctcctctcaccctccctcacgtaggcccagtgtctgttgctcccctctttttgtccatgtgttctcattatttagctcctacttataagtgagaatatgcattatcaggttttctgcttctgtgtcagtttgctaaggataatggtctccaattccatccatgttcctgaaaaggacatgatctctttctttgtttttatggctgcagtgtattccatggtgtatatgtaccacattttcttcatccagtctaccattggtggacatttaggttgattccatgtctttactattgtgaatagtgctgtaatgaacatacgcgttcatgtgtctttatggtagaacgatatataatcctttgagtatatacccagtagtgggattccttggttgaatggtagttctgtttttagttcttttagttctgtgtgtgaaaacacaccagagaacaaaattgaccagatctctgccttcacagaacgttcattctactgtaccagttatttcatgaggaatatgaatactgttattactctctgcccatttcacacatgaaggagcagaaatggagcagagtttactaatttatctgttgcagatagtagctaattgtgtgccaggtgctgttccaagcattttacccctgttaactcagctgagtgcttttattttccccattgtatgcccaacttatggatgacagcactgaggtagagaaaggttaataacatagaatagtttagtattagggaaacaatttgaattctaggacacttttactgaaacttagcataggctaaagaagtgatcgtgcatgtttaaagagttgtatcattttatcattatttgactttcttttccaaaaaaaacaacccttctcctttctctctcttccatgtgacaaatacatgtctgtatacatacatatatatataaatataaatatatatataaatatatataaacataaatatatatatataaatatatatatatataatttttttttttgagatggagtctcactctgttgcccaggctggagtgcagtggcatgatctcggctcactgtaagctccgcctcctgggttcatgccattcttctgcctcagcctcccgagtagctgggactacaggtgcccgccaccacgcctggctaatttttttgtattttttagtagagatgggctttcactgtgttagccaggatggtctcgatctcctgacctcgtgatccgcccacctcggcctcccaaagtgctgggattacaggtgtgaaccaccacgtgcgacccacatgcctgtatattacagccgttgaaggacacaacttttgccattgggcgacccagtcccctagtaagtgttcaaaaatattcgctattatcattgttggtgatttcgaggatttggatataattaatttgagcctaattttttaagactattacataactatacaaaaaaatcatgagagagcctggaattttgcaaaactaggatagaaaccagtttctaaaaagcattttaaacattcagcttgtgtatttcttttcacttgtattttgtgatctgcctccatgctttcatgcctttctcttcaaacaatcttattaccactaaccaaaaacaattaaaatttgattgttttgttttgtttttacatgttgttacagttaagaaaaaaaaattctaggtattgacccctgccagttttcggagttaatattaactagtgatttggggctacatttaagtgctttaagctatcctacaagcttaaagtagtatacatgcaaatacttaaatgaattaggtacaagaatacagaggtaagaaatagaatctattgtagaataaatcctatttcaaatgtgactgttttaggatttgaatcaaccacatattacagaaaaccccaagataaagccttggcataaccaagacaaagtttatttttttctctcacataaaattagtccagacttattttaccagtggtatggcaactccacagtcaaagggacccaagctcatctgaccttcgattcccttatcctgggacaggcttacattctcaaggtcgactcctggcctaatggggctactggagcttcagccatcacactctgtgcttcctgttatatctactggtcagaacttcagatacatctgtctaaaaggaacgctgaaaatacaatctttaagctgtgcaattgtacctggaataaatgagttcttttaataaaaagagttgaatggatatttggtgggcaaatagcagtccatgctacaataataaacttcacaattttagaattagatatcttgtaatgaatattctgacgtggtgtcaacttataccatagatagattataactttgaaaaggaattagaacacaataataataaattcacactaaggctcttttggggaaaaaaaatctctaccatttattgagtgtttattatcttcacaacatccctatgagttagggactatttttgtggacattttacagataaagaaacagaggcattgagatgataactagcttgactaaggagtggcggagctctgggcagtgtggttcctgtgtgcccataaggccattgcacaatgctgcttcatcatgtaattcagaaagtattccaggatgtggcagttggtcatcatgaatgttcattgttatcttgtggctttgtgaaaaattctggtcattcaaacgatttgactgttgagattctgtgcacatgagattgtactgtgtacatgtttctaaaaatgtatgttatagatcaaaatgcacacactcatttacctctaagaacagttcttatattgaagggaaattatctgtacatgagagaacaacgtggttttgagtacaagtggtgaacagacattgaatagttgttttcagaaagcatcactcccctgtacctcagaacccagcctcagtgctggttgcgagccaacagctttgatgtcctgaagtttttgcatcacttctcttttgcccctctttgggattcaaagatgataagtttgaagtggagttctaccgcttccattggaagagaaaaagtttccgtgtgtgtgtgtgtgtgtgtgcgtgtgtgtgtttacggagaggagttctatgcatctgcagagggtgctgccatcaacaaggagaacagagtgggatgaagggtttgggaagccaggatgggcatctctgacgagctccagaactctccacctaagtgtgcaagtgtaaacactccctgatgtgtgaactggccatctcaagactaagtatttagcaggaaatgccccctattcaacccttgccttctcaggtgtagaggttgggttgtctcttccatctttgtttgaattatgtcattaatcaaccttagtgaaagatcacttagtcatttgtgacagcataagttcttaattgttaggaatcactggtgcggcacacatctttttctatccatgaacaacgtcaaatgcttattttctcatgagcttttattttttccttttaaaaaaagtttcttaggataaacacagcctttttccttgtctctcccttgccctctcatctttttctcaatctttatattcctatatgtcactgaagagtccccgtgccaacgctgtgcagtgggaggctcctacctccaccagcttttgaggaggttgtagtcctgcaaccttagaggttccacagccaagctgggggtctttctggagcatgggtggtgaatctgagatctatgcacccaggaagcctgacacattattgtggtgtctcaattcttttttttttaattagaaaaattgtatcaaattgcattgggtgagagcaaaaataaactgaagttggttgagctttggaagactacaagccactgtaatatttaagatttcttgacctccagaactaacatttgtcctgtcagagaaaataattactcctgttgagaatacatgcattaaagtaagatgttcactactctatatgatcaccaaacattaaataatatgttttacacatgtatgtactatgtgttcaagtgtttataaatccatggagccaatagaatgtaagttctatgagggcagaaattttaatccattttgttcctagaacagttcctgacacatactggtgttaggggtaggtcttcagattttatggatcaaatggaatctccacacttaaaaaaacttagagaaaaactgccttaatgtgcccatagtctggttggaaatggcagctccaggttcattgattgctttgttcattcggcacttttcactggacatgctatgagcccagcagtgttctgggtttttgggatacaccaagccctgcctccccggtgcttaacattctagtgggggagacagaaagaaagcaaacatggtggacaacttaattatctatttttgaaagttgacaggaactgtggacaaaagaaaacaagagctggagacagcagtgccagggcagggtgagggtcaagttagagtaagcctcattgagagatcttttgagcaacacctgaagggggaggtgagaaagttagccatgtggagggaacagcattccaggcaagtggcccaccaagtgcagagtcctgacagcaagagcagttctggaatattctagaaacaggaagaagaccaatgtgactagagcagagtgaggcaggagtgagagaaaatgtgatcaggaaagtaaggtcctgtggccactaagattttggcttttattctgaaggaaatgaggactcattgcaggactttgagagcatgatctgacttgtcacaagtgttctctttgtctactgggttgagaagacatccaaagggggccaaagattgaggcagggagagcagctaggacaggctctagcaatctaggtgataaatgaggaccgatggtggctctgacaagggtggtaatggagacatggtgaggagtgaccacatttcaaatatatcttgaggtagagctgacaggattttcccgatgggctgggcgtagtatgtgagagaaagaattcagttatggatgattattttgtcctgaacaatgataaaagttgagtcaacaactgatatggggaagtctacaggtggaacaagtttttgaggaggaaatcagttcagtgttggctatgttgaatttgagatgtttttagaccatctgagtggagaaatctggagtttaggagagaggctggacttgatatgatgttatgggtcctcagcatagagatgatgaatgggattagcaaagtagtgagcgtaaaaaggaaagggaaggagaccaaagattgagccttgggacagtcagaaagaagagagggaacccgcaaaggagattgaaatggaatccatctcactgtggcatcgtgaaagacaaatgaagatggtataagatgaaaaagtgatcagctgtatcaaatgctgctattgggtcaagtagggtgagaattgataattttccatcttgtcaagagcagccgtgatagagggagggggtggagatatacttggaatgagttcatgaaaaaatgggagggaagggattagaagcagcaagtataagcagctctttcaaaggagggagatggggaatggctactgggatgccatcacatagataggaaggtggaaccctgtgcactggaggagggagtgtcctcacagaggaggacaggcaggaaggtagagtgggctgctttgggcacatgtggttctgtggatgttctcttttgacagcttcagttcttcagggaattgggagcaagttcatcagctgagagtgaacatggggcagacagtgtgagaggtcaaagcggcaagagtagttgtgccacagtcttttaggagagagggaaagtaaatggaatggggaaggaaagtaaatagcatggctgctgagctgcgttacaagcccacccggtgttgggttgtgaggtgtagttgtgggctcttcttcagtcggattgtcagcatgggcagctggcagagagttgaatctgacagggcagcagttctggaaaatgagtatgatgagtcaagaaagggaccaggaagtggaaactgtgtgtgaggcagtgatgctgatgaatgactgtggaaaacaatggaggtgaggagggagtggatgttgagtggctaggggacagtgaaaagggagtaggatccactagcttgctgcttgtctcttataattaggatcaagagcttctgccatcttctaggcattctgctgcttcaagggagtctctgagattgggttctgcatggatgtattgaaacatgcacctaggtgtgtttggagtcctgccagagacctgctttctctttattcttatcctgaggccctttaggaggctcagatggaataatttttatggtttcttaaaacccaagtgggttacctaagccatcctagttctgccccctgttccctgagaggaccacgggagcaccctgaaatgggttttccactctgccatcccccacttgcctgcttgggtgttgacctcagccatctacacatatcccggatgtagtgttgggcccctggttgatgtcattccttttcaaatgggatcttttactacagcaatccagcaacaaactaaatagcgatagagttttctttcccttacaaaccacaaccacaaccaagggaaaaaccaaaccaaaccaaccaaacaaacaaaacaaaagtatgtggcttcttaccacagccccctatctcgcccaagccttgtggctctttgatctctggtgttctgaaattgcgtaatcatgtgcttgctctttttcattcattgtgctgggcacacacttaatggaccctttcaagttggttttcttttatggggtaagggtaggcaggactattttttaagatttcttccactttgtcttccaattgttctaatgagttttttaaaattgtgcctgtcctgtttttaaattccaagagatattctttgtcctctaaatgtttcttataaatatatataaaatgaataatataagcatatagttttgcatagatttgagttcgctgttacagtgtccttttatttctctgaggatattcattataggttttttaaaaaacactttttctggtccccaaattatctcttctctctagacttcctccattcatgccttccttcccccctccctcccttcctttgctcttgctcttgattttggaggcttgtcataaatatttgaccatccattcattttttaaccataacgaactaaaaatgttaattggagccctgtgtgttccttgagcagaatgtttggattaatgagcttccgtgcaatgttttctctggaatggattaatttctccagatctataatttttcaatctctttccagggggtaaaagcctggttgtctgtttcatgaaagtaaaaatgtgggtaagagtgatcccagcattcagaatgcagacttagtagctgcttgttttcagtcctgggacttcacccaccctcaccacagttggtatcccaaagtgtgaaactccttagattatctttctcaagaaaatgaaactcagatattcgtgtcctttggccatttttgattagcttatttgttttcttccttttgaattgtttgaattccttatgtattttgaatattaaccccttattagatttatggtttgcaaatattttcccccactctgtgggttatcttttcactttgtcaattgtttactttgctgtgcggaaagctttttagtttcatgctatcaaactaattttgcttttgttgcctgtgcattcaaggttgtatccaaagaactcattgcccagatcaatgtcatggagcatttctcctatgttttcttctgatatttatatagtttcagtgcttttctttaaattttaatccattttgaatggatttttaatagggcataagtgtcacttccatttttttatatgtggatatccagttttcccaacaccatttattaaagaggctgtccgttccctattgtgtattcttggcacttttgttgtaaataagttgatcttacttgtgtgggtttatttctgggccttctaatctgtttcattaattcatgtgtctgtttttatgccagtatcacactgctttgattacaatagctttataatatatcttgaaatcagagagtttgatgcctctagctttgttctttttgctcaagattgttttggttaattggggtcttttgtggttccatacagatttaaagattattttttctatttctgtgaaaaatggcattggaaatttgataggaagtgcattgaatctgcagatcactttggatagcatagattttttttaacaataataatttttccactccatgaagaggtatacttttttcatttatttttgttttcttctatttcttttatctgtattctgtagtttttagtattcaggtgtttcacctccttggttgaatttaccccaagtattttgctgttgttgctattgtaaatggaattgttttcttaatttcctctttggataattctttattattatatagaaaagctacggatttttgcatgtttattttgtatgcttcaactttactgcatttgtttatcagtttttaacagttttttgataaaagttttggtgttttctgtatatatgatgatgtcatcagcaaacagagacaatttcatttccctattttctttcttttttttttttgagatggagtctcactctgtcacccaggttggagtgcagtggtgcgatctccgctcactgcaagctctgcctcctgggttcacaccattctcctacctcagcctcccgtgtagctgggactacaggtgcccgccaccacgcccagctaatttttttgtatttttagtacagacggagtttcactgtgttagccaggatggtctcaatctcctgacctcgtgatccacccgcctcagccttccaaagtgctgggattacaggcatgagccaccgcgcccggcccctattttcttaatcacgcgatatatacaggcttgttgaaaaacatgaaaatgataaagaagtttatgtattaagaggcaaaagctatgatgttcaactcctctaaaaccacttcttagtaggtgaacattgttaaacagttttgtgaatctgcttccagattttttctaggcatgttcatacacatatacacacataatttatttttacccagttgcgatcatgtatcatctgatccaaaactcgctatttttcagttaatatgcagtgactgtctttccaaaccatagtatatatatatatctctaagaatttttcaaatctgctatagtttttaaacatatttattgttacatacatatgtgtataagttacttatttgcttatttctttgaatatctttgtctagctttggaatcacataaataatgagtacaaatggtaaagaaatttcatgtggaaggatatatagaaaaagtacaagtctctcttctcatccactctatctcattacctaaaaggttatccttagagctttatataatacatccctgaagtttagatcattttattgcctcccaattgttgagagtaaggaatttagtacatatacctttcctttcactttcctaccctctacctacttaatgagttcgattatagtttttcagttcacccactgttaaataatatacctatatttataatatacctatataatatacctataataaacctatatttttgacttatcaactttggacatatctattggtgacttgtgatgagagatgaaataatttgtacatttacccttcttttccattcttttcccctacccattctcccctttttggctaaatgattgcttttaggttgataaggtttataatagctactgttctgtggttaataaaatttgtttcatattttatgtgaaatttgattatacaactagcattcaaaacattattatgtaaatattagttactgtaatcacacagtgacgctcaaggaggtatttactaagcatacagatcattccttctggatccaactcagcagttgctttgctgtgccttacctcatctttcgtggattccttttcttttgattgcaatatatccttgagtaatttttcagaatcgatatgtactgtctgaactctcttatacccaaaaaatttgctttcacatttgctaatagtttgacagagtatcaaattctgctttcaaattctttccccttcatggctttgaagatactgccccactatatattctaaaatccactgctgctaatgagaaattctggtgtcagtctgactcttatttctttcatatcacttggcattttcttccgagaaaatattacttatcttcagaatgatgaaccttctctatcatgtctctaggtgttagggcttctttcatttaatcctgtaggtcctcaataggctttttaattaaagtctcattttattcgggctctgtgaaattttttgttatgttttggcttctttttctcttttgttgtctctcttttctccttgaatgtctttctgatagatatagcattcccattatctatcatgtctttcagattatcctacatttttctctttgttttctttttctaccatgtttagaattctcttacacgtaagacatcacttactagatcttcagtcatatcctttttattattcagtctgtgcatttttaattttcaattttggcaaccacatttttaatttctaagaatctattttgctaatagtacttttgtcctgaaactttttatatcctgcaatatttagaaagagcacacccttatccacagctgattaggagtacactctgaatgcagggcacgatgggcgaacattttgttactggcctcctcaagcctcaatgcccagaagttattgcctccatcagaaacccttcttttgttctatctctcacttccaaatgaagttccagcttaatttttgctgtcactgtagtgggacaagcaaatccctatttcacgtgatcattgctcaaacctctattgacaatcctgctttgcattcccttatttagagtgggatggaaaataaaggctatgaagggggaagaatctgatcccaccattctcctttttcattgcagttttctcctgttttatggatgcaataagctgttgcaatctctcaggatggaaaagaacattttaaaactactctactgccagaatgatctcttttttttaattatactgtaagttctgggatacatgtgcagaacatgcaggtttgttacataggtatatacgtgccatggtggtttgctgcacccaccaacccatcatttacattaggtatttctcctaaatgctatccttcgcctagcccctcaccccttgacaggtcccagtgtgtgatgtttccctccctgtgtccatgtgttctcattattcaactcccccttatgagtgagaacatgtggtgtttggttttctcttcctgagttagtttgctgagaatgatggtttccaacttcatccatgtccctgcaaaggacatgagctcatccttttttatagctgcatagtattccattgtgtatatgtgccacattttctttatccagtctgtcattgatgggcatttgggttggttccaagtctttgctattgtgaatagtgccacaataaacatacgtgttcatgtgtctttatagtagaatgatttataatcctttgggtatatacccagtaatgggattgctgggtcaaatggtatttctggttctagatccttgaagaatcaccacgctgtcttccacaatggttgactaatttacactcccaccaacagtgtaaaggcattcctatttctccacatcctctccagcatctgttgtttcctgactttttaatgattgccattctaactggcataagatggtatgtcgttctggttttgatttgcatttctctaatgatcagggatgatcagctttttttcatatgtttgttggcctcacaaatgtcttcttttgagaagtgtctgttcatatccttcgcccactttttgatggggttgtttttttttcttgtaaatttgtttaagtaccaaaaacagatacatagactgatggaacagaacagaggcctcagaaataacaccacacacctacaaccatctgatctttgacaaaccggacaaaaacaagaaatggggaaaggattccctatttaataaatggtgttgggaaaactgactagccatatgcagaaaactgaaactggaccccttccttacaccttacacaaaaattaactcaagatggattaaagacttaaatgtaagacctaaaaccataaaaaccctagaagaaaacctaggcagtacaattcaggacacaggcatgggcaaatacttcatgactaaaataccaaaaagcaatggcaacaaaagtcaaaattgacaaatgggatctaattaaactaaagagcttttgcacagcaaaagaaaccatcatcagggtgaacaggcaacctacagaatgggagaaaatttttgcaatctatccgtctgacaaatggctaatatccagaatgatctctattttattttttatgacatattaatcatgtttgttctcttgtgtcctctctttctttctctcgattttccagtggtccatggtggtctatttgtagggttcatatttacaaatgggagtcaaggtgactccactacagttatgtgaaaaagtttccctgccatgcctctccctacactgggcgagctgatctggttccgggtcagtggatggagcatttcctctcgcaggcacaccttcaggctggtgggagcaacttgggccatggactggaaccatgtcaatggagaagacttcctctgtgccaggtcctggtcagagctgccgtcttgatttatttgtatccctctttccgtctgtggtaaagatctggaggttcttaagctctctctggcctcaaaacccacagcaggaaatttcctcactcagatcacccacatttttagcaagcagagcttcagttttgagtggagggcaggagtattgggcagtagggaaggacacagttctctacgccgttctgaatgcagtgcattaataaactctcttcacagttgctccagggtgctttgcattggtgaacttctggcttccaggaagaacctggttacctctgatgtgttgggttgttgttccatctactctaaattctgtgccaatccatcccatctgtttcctaccattggtttatttttaaaaaatattttatatttatgtagatttatgaacttgattattataccatcattagagtttgggtccagagtcaaacttctataaacctgtaatcaaaaattggcctttattttcatgtagaaggaagtagcagaccaaaatggagttctatattccatttttctaaatgagccattgagatgtagagcaagcaagtgcccttttgagggaatgtgtgtgtgtgtgtgcacacatgcaagggcattttcccatgtctcccatcctttaattattccagtagacagtgggccagcagcaggtggtggcataacttctccatttgcagtgctgtggctgtggtgggatctgaacaggaggcaaccttggcaacagtaggaatagaatgtggagtcagcaggaagcgcttttccctcccacttacctgtcttcttgtagcagacagcagtgcgggcagcttcggctgacttgcttagcctgtttccattgtgagcataaacaccttagacgttttttcatttcaggacactggagcttgatgaaattaaactacactcattgtctcaggcaaatctcctaatcctattctgtgcttttgttgttgttgttgttgttgttagtggtgtgtttctctctccacttcgctttccttttaaaacacaacaaatttttttttttaattttaaatgaacttattcattgcctccctatgtgtcccctcctttctagtgatattgccgctgttcattcccagctgttcttgattcttgtacaagactctttgctgggcttctgccttctagacgcttcaccttcccgttatttcttccctctgcccccggaaaggcccttaccatggctctgatgatgatgacagctgacccttttccaaggtggaatccacgtttgattctctgatcttgtactggcttagcacagtgctcggcattcagtaaataaggttaaggaaggccagtgatatacagtagtagaaaacagcagttaatgaaggcttgctttctgtcacaggttcctctcctccaggactgcagcatctctgtctttctgtcgtagcatacaagatagcatctctgtctttctattgcaacttccaggtgagaagccctcccacaagcatatacaaattttatggaaacagacaaaaatttgtagggaagcaaataccttcaaggttgagtctttctggtcttctagaaggtaagcttggtgatggggcagtcacagccctagtgcttatggaacttggccctttggggacagatctcagttaactaaagaaatgctatggcacagagtaccttgaatctcctctaatttatgctgtacagggaattattcacactttattgttaataacacattacatgggggaacaccagacagctgaccaggactcctgtgcttgaaagcttctgctcttcagcagggcagccagcctcttctcggtttagcacagagcttttattctcctcgctctctctaaactcctgttcaagacagtttccaattctgttgaattcactcatttacctcatctgtgcctttccccacctcattctctccccttcagagtgcccatttctgtgtttcaaatcccacaaggccaagcttagatgctattatgtctatgacattctccacctctatcccaataaaaacctttgatttcatcttgctgtttgtatctttactctgttatatttcacccataccagagttgtttgtggacatgcctgatttccttcaggctgtaggcatatttgattcatttttgtactccatgagtgcctaacatagcatcttatacaccatagataattaatagatgcctcttggctgcatttgtattaaatttttaccatgtacttgtcctagctagcagagacttggggggaaataatgatgactgatttttacttatttatttattttttattcccataggtttttgaggaacaggtggtgtttggttacatgaataagttctttagtggtgatttctgagattttggtgcatccatcacacgagcggtgtacactgtatctagtttgtaatttttttatccctcactcctttccctccctttctcccgagtccccaaagtccattgtatcattcttatgcctttacatacccatagcttagctcccacttatgagtgagaatatatgatgtatggtttttcattcccaagttacttcactttgaatagtggtctccaattccatccagaaccctcaaaaccatgcaaaaccgtggaaacaaaacagcctgctcctgaatgatcattaagtcaacaatgaaatcaagagagaaatttaaaaattctttgagctgaatgataatagcgatacaacttaccaaaacctctgggatacagcaaaagcagtgtcaagaggaaagttcatagcattaaatacctacatcaaaaagtctgaaagagcacaaatagacaatctaaggtcacacctcagagaactagggaaacaagaacaaatcaaacccaaacccagcagaaggaaagaaataacgaagatcagagcagaactaaatgaaattgaaacaaacaacaacaataaaaaagataaatgaaacaaaaggctgtttttttgaaaagataaataaaatggatataacactagtgagattaaccaggaagagagaggatccaaataagctcaattagaaacgaaacaggagctattataatcaataccacagaaatacaaaagatattggaagctactatgaacatctttacacacataaactagaaaacttaaaggagatggataaattcctggaaatatacaaccctcctaggttaagccagaaagaattagaaactctaaacagaccaatagcaagcagcgagattgaaatgataataaaaaaaattgccaacaaaaaaagtccaggaccacacagattcacagctaaattgtatcagacattcaaagaaaaattgataccaatcctactgaaactattccacaagacagagaaagagggaatcctccctaaatcattttatgaagccagtatcaccctaataccaaaaccaggaaaggacataacaaaaaagaaaactacagcccaatatccctgataaatatagatgcaaaaatccttaacaaaatactagctaagtgaatccaacagcatatcaaaaagataatcaactatgatcaggtgggtttcataccagggatgcagggatggtttaacattcacaagtcaataaatgtgatacaccacatgaatagaattaaaaacaaaaatcacatgagcatctcaatagatgcagaaaaagcatttgacaaaacctagcatccaattatgacaatttttaaatatggggaatggtcttcatggaaaagtagatgttaatggcacctgtattagggttctctagagggacagaactaataggatagatgtatatataaaggggagtttattaagaagtattgactcacacgatcacaaggttgggttccacaataggccgtctgcaagctgaagagcaaggaagccagtccaagtcccaaaacctcaaaagcagggaagccaaaagtgcagccttcagtctgtggttgaaggtataagagtcccaaagctgaagaacttcacgtcagaaattcgagggcaggaagcatccagcatgggagaaagatgtaggccagaagactaaaccagtctagtctttccatgttcttctgcctgcttttattctggccatgctggcagctgattagatggtgcccacccagattgagggcgggtctgcctttcccagctcactgactcaaatgttaatctcctttggcaacatcctcacagatacacccaggagcaatactttgcatccttcaatccaatcaagttgacattacatattaatcatcacagcaaccaaaagattatctcatttaatccttacaatagctctgtgtagtgggtatatattttccttttgctgaagaggaagtaggcttagaggggttgagtaatttgcccagaatacctaggtagtagaagatagtagagccattatattctgtctgcattcaagagtgtgctgctttatttgttcctgaattgcacacaagctaaagaatacaactggatgttcagtctactcctattttgataacttggctaactttactgcagagtctgcagaggtgaccaattttactctgggagataccagggaatccgccatgtaattcctcaggctgagtgttttggaaacacaaagctgtcactgctattaagtgatgttttttcctgagagtctactatgctcccagtaccagcctccgcaggccctctgtctaccccttttctgtcctgatgtgttctagcaggcactgagaaagtcattgtagaagttaccatgactttccaaatgcttccagaagcagaacacaatttcacaggagggccaataagtatgaatgccaccttgatagaaagtgaagttttgcgtcctgttgaacactcagtaaatgcttcctgaatagatgcaggattggcaaaacatagctccccagctttcataattcagactcagaggcccttcgtgctcctgttattcttgttacttcatgtcaggtacctaaaagggttgtttttcagttttcgtcattgatttaaagcagaggttagtaaactttttctgtaaaggccaggtagttagtattttagcctttgtgagtatttggtctcacaaaagcagccatagatgatatgtaaatgaatgtgcatggctgtgttctgataaaactttatttaaaaatgaggggtcatctgggctgtggtttttcaacccctgatttaaaacaaaaacaaaatgtgctatgcctgttagatgctactacatttgattctgtgttttccatatttttctaaaatgtactgaacaggaaatgaacaaactgatgacacaatgatctaatttaatcattgagataagagtggcgccaactcttattgagtatttgttatgtgtcaggcacttggctaagcactttacatgttttctatgatttataaagcaaatattgttattatcttcatttttttgctgagggaaggaataaagtcacagccagcttacagaggctgccggaggtcacacatcaccagtacactgaaacacgtggtctgattacaggatccatgatctcctgtacagatcatagtgatattgacctgagaggaaagagcctaggacttacaatcagaaatctgggttcacatttcaactccgttccatgccaaattacattaaaactgggcctcacctttcccacctgtgaaagaggaataatactaggacttgccctcccaaccttagagattgctgtgaggataaaagcctatatgaatgtgctttataaactataaacaccatacaaatgtttgttataagtctgccatttgaatacatcttagtctttttttcctatgtgaaataaaacattttaagacaagcaatgaaattcttgaaactataacaggtttttaagggtgttgatccccaaagccgtcttcactattttgctccctctctgactcgctctgtctctgcctagcagcgctagtcttttctacgtgtttgatctgttgttcctgtgtttaggcccatccctactacacagcggaagtcagctattttttctctttcctttgctctgctgagcaagattaaactcttttcacctggacttttcctagattactcaggctgggtggaaatggggtagctgtgaggctgggatgttactgtacaattcaaatttatgatctgaacttaactagatcttgctgaagattgacctggctagcacagttttgaggcacctatctttcagtcccttctgtcctcttggcctggccactggccacatgttagtagcttacttctaaggatggaatgccatgcatctcctacaaggttgtctctatgcttcacacaaagtaaaagaatggaggcaactttgaatgctgctcattttcactcaggcaatccctttacaatattgtgcttagtaaactccccccactctttttttcccttagcttgttttttttttctaataaaagtctatatcaatttgatgtattagttagggttctctggagaaacagaaccagtaggatcaattgattggtcaatcaatcaatcaagacaaaaagagattcatctggaaggagttgattcatgccattgcggtcattggctagtctgaaatctgtaaggcaggctggctgactggaagctcaggcgggatttctctgctgcagtctcaaggcagaattccgtcctcttggggaaacctcagtctttgctcttaaagctttcaattgattggatgaggcctacacacattatggagaataatctgttttacttaaagtctactgattgtaaacattaattatatttaaaaagtactttcacagcaacatttagactagtgtttgaccaacaactgggcaccacggtcaagccaagttggcatatagaattagccagcaaacttggtattcacaatctgtcattatagtcttatctataaacctaaggtttagagaaacgctggtcattctgaacaattccctgtgaatgcagagatcaaggagcctccccttaactgggtaggcagtgtgaaatacctgcagtgtgcttgaccttactgttcacccactggcagctgttcctacagcttggcttcagatatataatattacattggctaacttcaaagagcattgttttccaaggatagagatggtgatggtgtatattacttttaccagccccagacctgtaagaggttctcatctcttttgtttaagattttgttgtttttttttaatgctcaataaaagaagctttattctttcattaaaaaacaaatctcagaagaacagggaagaagagggtagcctatgaaagtgtgattgttatttgataccatcgtgacttagcttgttttcacctaagactctgagattctattctgtttatgtgagatttgggctgagttcaactactatccatattaactgaatcataaaacaattaatccatcatctggttacattttggtggggagggagcatttaacacaacactaagccacatatttcactattttttttttttgcagcaaattgacttaactgcttgctttcacaccatgcctataaaacctttttggttttagaggttctatgtgtctggaaagtacagtgaagtatctcatcagaatagtattaatatttcttatgacatttcatatgtcctgatatgggttaatggagaaatatcataagagtagtaattctcttgctgttattatttgtcctatttagacaaacagaacatagaattaataagaattcaaaaactttaatcactgatagagattaaatgatgtttatattagtcatcatcacctaatatcttaaatatttaaccttttatgcagtgtttgcctctctacttgggtatgcccttaacagtaaaaagtgttgataatgctctcccttttggcactcacagaattgctatacatatatatgtataaaatatatgtaaatataaaaatacatagttaaaaaaataaatctaccactaaatatagtaagggagttttaaactgaggtttttgaagtctttaagaatttatttagagacttcttttgttggaagtatggtggctagatgccatgaaaaacccactgaaaacaagtgtaagtgctaggtaatatgttgaaacatatcttttgaaatgtattactgagctggcaagaaagtatgccattgtagagagtgaaaataagtgaaggcagaatcctgggaggtaagccagcctgaagatattgatgacactggatggccttaagtttccattttgactggcatgtaatccagccaaagattcccacagaaatccgaggttccaaatggtaaatccgtggtgacattggggtgaccgagaaatgaactctgtgcagaaaggaatggtaacaacacttgtctcgtacaactttggctctgggtaggggaaaggaaaacagcttcctagagaaatgttaaccacaagctagccctcatgagagatttcagctaggatggatgctatctgtgtagtgcaaaaaaaaaaaaaaaaaatccatagccagattttgtgctttaatgtggacctaggtcaatagtgactgcaaagccagaagcagtggctcacccctgtaatcccagcactttgggaggccgaaggaggtggatcgcttgaggtcaggagttcgagaccagcctggccaacatggtgaaaccctatatctactaaaaatacaaaaatgagcctagagtggtggtgggtgcctgtattcccagctacttgggaggctgaggcacaagaattgcttgaacccaggaggcggaggttgcagtgagccaaaatcgcaccactgcattctagcctgggcaacagagtgagacaccatctcaaaaataataataataaaaaaaagtgactgcaggggactgggaagaggaaacacaaatctttactggggaatggaatttcaagtgtatgcaccaacccttagaaatcacaaaacatctgacccttctgaaaataaccaccatgagtgagacagcaggaaaaaaaaaaagaaaaaaaaaaaaaaacaaggaaagagagggacaatagaatcagactcatacctacaaaacttaaaaattaaataaaatgaatcagactcagaggcttcagagtttgatttaaatacattatacaaaagttctgtgtgaaatatgtttaagatgtagaagggtgcttgaaatgcacaaagtcaacagctgaaaaattgaccaagcagatatgaaaataaaatccaatagagggcatctggaaataaaaaagtataataattatagtgaaaaaagttattagatgggttaattagtagaatggatatagcagaagaaagatttagtcaactgaaaaatatatccaaagaataggtccagaattaagcttagggagataaagagatggtcaatacgaacattaggagacatggagaacagtgtacgaaggtgtaataaattctaactggagttaaagaggagatagtaaagaggaagaaaaaacacaaaactcaaaaaatgtagtggctgagaatcttccagaagtattgaaagacaccaatccacagattcagaaacctacaatttgcaagaaaaagtaaaaagaatttcacaccaagatccatcttcatggactggcagagcataagagatgaagagcttatcttgaaaatgcagccagagagaaaaggtctatcgcagttaaaggaagaggcaagcagatgactgagttctcaatgccaactgaaaatgagaagccagtggcacaccttcaatatgttgggagaatataattttcaacttaaaatagtgtacattgtaaaattacatttcaaaaaaagagggtagtataatgacattatcaaataaaaaccatcccttataacaaatatcactaaagaaactgttggaggatgtagtttaggtttctagaaaggatgtctgatatgcaagaaagaatggtaagtcaaatattgagaaatatgtgaggaaatagaaacaagaataactaatgaatcaatgatactgtctaatttgaaggttaaatgattaggtagaactaaaatatgaaacaataatagtatgtaagtcgggaggaggaggatgaagcttgaagtgctctatgcatcttgcatctctggtgtctttcttgtgtccaaactttttcttctttcaaggacaccagttagactagattagggtccacctaatgacctcattttaacttatttgcctctttaaaggttctatctccaaatacggtcccattttgaggcactaggggttagggtttcaacgtataaattttggggggacacattccagccgatagcaattataaatacaacttttatagtaaaagcccatcttctagaacaggtagagaacaaggttacttattttttttaagaacaaaattggtttaaattatcctaaaatgattttaggagaaaatggacattaaatatacaacatttcctcctttattattttattgatgacttgatatgttttttaaaactcagtaaaataaatgattagtctcataatcataagagagttatgcccttattttaatgccataaaactgtgacttctgaagaaatacaatcatataaaatcatattttaatttacttttgagaatgtacagtaactcaggaaggcagagtgtggaacctgctttaatgaatagataagaatgactagcaattaaaaattaattatctataattcttctgaagttcttgaaaataatctcttctaacctgggtaaatattcctccttttcagaaatgtttgcaatgttgcttttttttaaattaatctctttttcttagataatggaacataaatcttaggcacatttgctttgtaaataccaaattgcacacagattaaaatttaatgagcttttactgctgtaatctcaacaagcagagtctttgctgttggtttttcaataagaaatactttattttgttatacagtggtcattaagaaccttaaagataatcaggacagattttccaaattgcataatgctattgcctagctatttgcatgtattttttttaaatgacaagacatttcgttaaatatttacttgcctgacgttgaaagatttagacaaacaatgtacttctagttgtcactttttcaaaaagattcttagggaaaagttagccgttttgttggttggtaagtgatgggttttcttggaacgtgttgcttgctaattttaccagagaagaaaataaattcaaatggtaagctacattccaatttgtattcttcttctaaagtcctccctgtttgcattctcggattttgacactcctacacaccagttaaagcacttgttagagtgtccaaaaaattgttgcaattaatttcccagtctcttctctctttgatgtgtcactataatgctttgagtaattttcagtgtctggcatctgttcaaggacaatttctggattttaggagggggagaagcaataaaggaaacaacatatgttttttcctaaataggaggcattttttgtttgtttgtttgaacaaaaatcgaaaactttcttttctatataggtgacaaaaagatacacgactcattggttgttaactaccattgcattcttttctctttggagtagcccttaaggaccagattagaccagccatctgcatcatgtagcatgtctgggttacctttcccaaaagaagttcagatagatgaactttgcaaaccagagccatctgaagtttgttttttctttttgagacagagtctcattctgttgcccaggctggagtgctgtggtgcaatctcagctcaatgcaacctccgcctcccgggttcaagcgattctcctgcctcaacctcccaagcagctgggactacaggcacgtgccaccacgtccagctaatttttgtatttttagtagagacagggtttcagcatattggccaggctggtctcaaactcctgaccttgtggtccacccgttttggcctctcaaagtgctgggattataggcataagccaccacgcccagtccatctgaagttttaaaatggctgcaggtatcttagtaggagactaattttattttccaatgattagaaaaaaatgaccagaccaagaactctagggttatgtttcatctcatatcctgtgcaggatgttctgagaagtttctatttgtatctgtggagtggttctagtcttgttcatcttgcattttaaggtttggaggtattttatcttgccttgcttctttaccaccttgctttaatttccccctatattgccatttctaaagtaatgactcattttcaagggtgggtctgaaaggaaagaaataataaaaccagagatctggagaagtttctcgttcatggtcttattcactttttaataagagcatctagaacagtgagtggtgccccagcagatatctggaaatttttgtggaattgaattgaatttgttcttagagtaaatgacaataaagaaaatagtattatggaaactttcgacccaagggaaatatcaaggctaaagttgctatattctttttcttctgatggatgctgagtttttctccttaaaaaacaaatccacatttaaacataaggcattgtttgatggcctatcacattcagtagaatggatttgagaaatacgtgtaggatgcctattaaaaactctgttttgaaattaaacctaagactataagattgtctgtttaaaaaaattattgctgctgtaatttgagcaaatctgaactatattgaactttagaaattcaaatgtatgcaatcttgtaatataacttactccatcggtagacatagttctttgtcccacctggcttccagcagtttgtctgtctgtcattaggctaaactcttcatgttcctaaacatgttttcctcaaaaggggacatatttcttgggtcagatgtaaacatcaagctaaggagttctgctgtgcgtctagacaaataaggttcattttcatcctctacatagtgttaaacttgaatttaagatcacacagattcctttacacgttaccaatgtaatgatatagacaatctcactttattcattcactctgtttaattcattcaataaaaacgtatacattggctgcctactgtgtgccagttggtgaagatataaagatgattaaggcaagggtctgtgctgacatgcctaatgggcaggctgacacacctaaacgccagggaaaaagagggatgagacctgggcctctgaagccctggccacctggctcgaagctcactttaatgtgcttctgggtgtattccatgactttttaaaggcgcttatgtttcctttctggtaaagcatgtttaacatgcaaaatgcttatttcattgagtagcttttaaaaagtgttcatagaatgtctagaacagtgcttgtctaatagaagtataattcaggtcacgtaggtaatattaaattttctagtagccacattaaaaagtaaaaagcaacaggcaaagttaatatttttttttttcctgagatggagtcttgctttgtcacccaggctggaatgcagtggtgtgatctcggctcactgcaagctccgcctcccgggttcaagccagtctcctgcctcagcctcctgagtagctgggactataggcgcccgccaccacacctggctaattttttgtatttttagtagagacggggtttcaccgtgttatccaggatggtcgttaattttaataatatattcattaattttaataatatattcatttagtcctatataaaaaaattagcatttcaacatgtaatcaatagaatatattattagtcaactattttgcattctttgttttgtaccatctttgaatttcaatttgtattttatacttacagtgcatctcaattttaatgctaaatgtcatcggagatattcgatctctgtttagctttaatatatttttgggttgaaaaagtaaattcacataaccaagttcttccaaatatacttgaaagtgtttctgataactgagttatcaacttaaaaatgtaagttaatgacaataaatgaaagaaaaattctgttccttagctgcactgaccacattttagtgttcaatagtcgcaggtggccagtggctatcatattggatagtacagctttagaatgacagttcagtgcaacaagtgctataatagactcatgaactggaagctccgggaagttaagaatgggatcaatgaagtgggtcttgaaaaaccaataaaaattcaccacgtagagaggaggagggcgactactccaattcaatcttttgaaagcatgtgaaggagcaacagtagacttctttaattatttaatagtaatttattgaacatgaattatgggaggtgcatggtgtgggtgctggtgagacatagttcctgagctcaagtagcttggtgtctaaatattcatgggcccatttttcagaaaggatggatatgtgtgtgatcctgggtgtgccaaatgctgtggcttcctgaagcttagatttccagcttgtcaccttcaaggttaccttgtgaataggacttttttgagctgtaagtaaatttactttgcctatttatttccaatggaaaaaaagcttttttaaaaaataaatctcatcttattgcctatgattggccaagacaacatggcccatacagaaggtttttgatggcttctgaggtctgttatcatttgcttattggcatttcagctgtcaaccagggttctgtcaaattccattcctgcctttagctcttttacttgaatacctggggcaatggcagaagtggttgctatttgtcacctttccaggatgttagtcgtgtccttgagacaaatagaaaatttaaagtcagatgacttgattcctctgccagttaagacccttagagagtcctcagcatgttgcttatttttaaatttcaagtccctggtaaggatcaagtaaactccccaatttgcagatttctatccagttgactatggattttgcctgttgctttgtttccaccaactctccctgaagatgaggcgcacagacagacaactcacaggcaagaacagcctggtccatcttgaaagattctcaagactattctccacaagataattgtctacttttaaaaatattcagtaaagggaatttttgctgttatccttggttgtgtttttagtatctcatcatccttctagttgtaggaggcttttcctaacatctaacccatatgtctgttgtctcatcaggtgtttctattaaggctacttccccatcaatcttaattttttttttaatcttctgagatgtataggttaagttgaaatcagagactttcataaaatggtaagatggccatttaaacgcaactatgaggaaataatgtaagcaggattccattggagaaccaaacactagcaacaactaacttggtaatcaatgttgggacttgaagttaggctaaaatcaatagtaatggcactcgtatgtacaaatgcagaactttttacacacaatgatttttccctctgttattatacactagctgtgtctgagtagacagtccagctccactacctgcagtccaccctgggctgtgtaatctgagcactgatgggctgttatttgtacgtattacttctatgacactgttttttcatctgtgttagaaatgtctttctttcttgaataagctgcttcaatttcttatagacagattctgcttttatgacccttgtttctacaaagtaatctctactcatgctgaaatctcagacaattttaacaaatatttagagtacttaatttttctttgaattctaaatattatccttctttagttcaccatagttggatattttgagataactgtggaggaaacagcactgatcctggggccatgaaacctgatttcaagatctagtcccttctttaattttgcacaactaatttaatcacattcatccttaatttcatcatcattaaaatagcagagaataattcccgtttcatggagttgatatgcaatgaaatagcatatcaatgtatgtatgaatgtccccccacatagagtactacacaaatgaaacgtgtcactcagcataacgttatgtgctccttcctgcaactggattgcactccagtgggatttcatgctggtgagatggctgtgctgctggacttcatgggacaccaatctttgaaaataagcctgatctggctgggcgtggtggcttatgcctgtaatcccagcactgtgggaggctgagacgggcggatcacctgaagtcaggagtttgagaccagcctggccaacatggtgaaatcctatctctactaaaaatacaaaaaaattagctgggcatggtggcatgtgcctgtaatcccagctacttgggaggctgaggcaggagaatcacttgaacccaggagatgaagactgtagtgagccgagattgcgccactgcactctagctggggcaacagagtgagactctgtctcaaaaaaaaaaaaaaaaaaaaaaaaaacacaaacaaaaaaaaaaaagaaaaagaaaataaacctgatctatagatgaggccagtggatcttgtgaagagttgaaaggtcaggtatcagtcttataccatgtcggatggggcaatcgtcataactttttaaaaaattatttatttattttgagacagtgtctcacgctgtcccccaggctggagtgcagtggcatgttttcggctcactgcaacctccgcctcctgcgttcaagcgattctcatgcctcggcctccctagtaactggattacaggtgtgtgccaccatccctggctaattttttgtatttttagtatagacagggtttcaccacgttggcccaggctggtctcgaactcctgacctcaggtgatccacctgcctcagcctcccaaagtgctgggattacaggtgtgagccaccgtgcctgccccaattgttacagctttttaagtggattatatgcctgcttcaggcattagacataataagttaatctgttgataagtttcttcatttcttaattttcagttgtgttttgatgtgtgtggtctgggtgagcggctcagtgctgctgctgtggagaaggcgtgatatggaagggatgtgactgtccttcttcatcttcataacggggccaggactggggtgaggtgtgtgagatgaatgaagcactggttttgatacaaaatttaagaaaaatcaaattcaagaggtaatattttaatacgatatttgtaaaaaatcaaaattagtgcaaaaatttgtgatgagcaaaatgttagataaaggcattgttgcttttctttttctgtgtattgtaacacaccatcacttagtggagaaacagctctcactttcctcctccccagatacaaccatttatgttgaattaaacttctagttctcctatacctgtgagcatcccccaggccccttggtatggagaaagcagtttatttgtcttagtaagattataaaagtggcaataaaatgtgaatgtaatgaacaaaatgcacattttgtggaccaacttgttgttttagatctatttttgaaaactcattaggtatgtgcatgaggcaaaataattcaagtgcagttggatattaaatgaaaaagtgtcaggtccccttttctgccatattctcttctgtgtcttcattagtggaaaccattttgaccagttcttataattctaatgatttgctgatggctctaattcttggtttatcaacttcaagcagaatgtcttgacatcttggtatgaaagttaaagaatatgaatcatttgttctctcccttctcctttcctctttctctgcctctcagtttttgttgtatgctcacggagtatgtgtgtgagcatgtgtgtgtgtgtgtgtgcacgcgagcacgtgtgtgtgtgtgcgcgcccatgggtccatttttgcatggcaggctttgttttagaaagattggttacaacagctgccccaccaatctcctctacagggaaggattcctactctgagaccttggtcttttccaggcagatcacttacatttcctcacagattatttctcatcctgcagcctgggtccaaatgggctttgctgtgaacagtgactctcaggcttctggtctctgctgtgcttgagtgtcgttgagatgctccatctcctcctactgcacccacccagcaatcatctctctttcaggaattcaccaaagtcttttttaaaattattcttttgttttgagacagagtcttgctctgttgcccaggctggagtacagtggcgcaatctccgctcgctgcaacctctgcctcctgggttcaagtgattctcctgcctcagcctcctgactggcagggactacaggcatgtgtcaccacacccagctaatttttgtatttttagtagagatggtgtttcaccatattggccaggctggtctcaaactcctgacctcaggtgatctgccggggtccattttacgtggcagactttattttagaaagataggttacgacagttgctccacccatcccccctgcagggaaggagtcctactctgagaccttggtcttttccaggcagatcacttacctttcctcacagattatttctcatcctgcagcctgggtccaaagtgctgggattacaagcgtaagccaccacatccggctcaccaaagtctttgggtggttgatgtcatatgcctccagttgatagcacttttaagaatttttcctttttgtatgctgttattatttttagaaggcttttggattattattgttaaagagtatgccatgtctatcttttaacttttaagcatctattgctttgttacttgtactttatatatatgtatatccttcccccaataagacaaagagtgcaaataatcacctcccttgcctgttgtttgggtttaattcaggagtcagtggaattaaaagcctaaactcagtatagttttaaagcagcagtccccaacccttttggcaccagggactggctttgtggaagacagtttttccatggaccagtgtgggggctggaaggtgattccaggatgattcaggtacattacattaattgtgcactttatttctattattattacattgcaatacataaggaagtaattatacaacttaccataacatagaatcaatgggagccttgagcttcttttcctgcaactagacggtcccatctgggggtgatgggagacagtgacagattatcaggcattagattatcataaggagtgcacaacctagatcccttgtgtgcacagttcacagtaggattcgtgctcctatgagaatctaatgctgccactgatctgacaggaggtggagctcaggcagtaatgcgagcaatgggagtggctgtaaatacagatgaagcttcacttgcacgttcactgctcacctcctgttgggcggcccagttcctaaccagggttggggacccctgctttaaagaatatgtttgtggattcatagagggaaacaacacacactggggcctttcggagggtggagggtgggaggaggcagatgatcagaaaaaatattaataactaatgtgtactaggcttaatatctgggtgttgaaataatctatacaacaaacccccatgacacaagtttacctatgtgagaaacctgcacgtgtactccagagcttaaaataaatgttaaaaaattccctccaaaaaggatatatttgcatcggagttatatttgtatatgagtatatatttgtatatataaatatacttgtatatgaaaaaaatatcttttttctttcattttattttccaaacattaaagtcgggcacattggttaggaatttcaccaatactttttacaaaactgaggacttggatgataaaggcactttttaaaagattacacactggcatggggaataatacctttataaagatgatctatgtgttcctgaatatcccgatgcatctcctagctggatcttccgctccacaaaaattcataagatgagattcttgaattagaatgcatgccttaatgtattaagtctatgtagagagagttatttagtccatgtaaattaagtgggaatatttttatttgattactgttttatctggatcttgcccacttaaggccttcaaaaatgaaatttaaggcctgttaagcagacccaacatcaacagcatattctctctctcttgtaagtattgtctagttgataaaaaatttcaaaaacatgtcttaatcaaaaacaagatgatccagcacaggtttaataaatgttttgtgaatatggcacattcgtgtctcattactacagttttcctatgctgtctttctcaataattccccccaaaattgtagtgtttacattatggcatttatagttacctctgaacctaaaaaattaacttcaaaagtatttaaaaaaatcattatatttaaaaccatttcatgtttaaatggtttgtacagggcaatgaaaggaaatgtagtaataaacacagaatcagatttggtcactaatatttttctgcagttgaaatatatgtagactggcttagggtctaaatagcattgaatcctgttaccttccatctataatcaattaatgtattatgacattgttgtcctcagatcactgggatctcatggtaagtaagtaaagggattattctgtgcattttcccaatatctatattagttttaatatacctttatgttaatgtatgacactgacacttagtaattggattaacttcctatcagaatttgtttttcactcatactttgtatacatgtcttaagggtagggtagatgtacatttttttctgtgttagcctatctgtttctgtgacactacatgctttctgtcctccaatttgtgtttctttccgtgtacaaatatgcatcatctaccatctacatctacaaaacatgtaggcttccaatgttttcatgtaaatacatttcatgagtcctcagtagagtgttagatgagtggttaattagtaatgttaataaatgtaaattacaataaaaacatttataatgttaataaatataagtttattgaacttaaataatttaaacatcttctgaaatgtagtagaaattatgattagccataactagtacagtattttttgcttgtttaatttttttggtgatattccatttgtggaatgagtgtgtgtgtgtgtgtgcagtacagacagaaaggagagaaacatatctgcatgttatgttagaaagagtagtgttagctaccctaccaaatttacatactggctgaacacagtatgtaaaaaattatttttttagtccattgctggtgttccttgttgttgggtgactctattccacatggtgatgcagggaaccaatctccttccttctgtggctgtgtaatcccttgcaaccttgaagtcctctgcatctaactttaggatgaggaaagtgaaggtggaggatatagccctcttgactgccttgacctggacctggaacatctcttttgctcccattccatggggaagaactagtgacatggtggcccatagctgcagaggggaggctgagaaatgcagcctctggataagaagcctactcccagtggttactgtacattgtgggagggaagcttgaattctgatggacagtgagaaccattctccacacaataacgaaatgacgtcttctcaaccttggcaatgtagcatcctgtgacttaagtatgtaaataattatcagtacaggtcagtgaaaaattaggtcacctttcccttccacttttaattctatagtttaatttgcctatctgctacatattatatatatgggaatagataagattatctataaacatgtataaatttgtttcctacactaaaaagaaaaatgacaaagaagaattaagttagttgcccaaatccacacaataccaccaggagaaagtctaggaaccataccttctaaatccaggtctacacttctttagtgcactaaattttttcctaatatagctctgaggagactggtgtttaagaggagaatgttaagccaaaagcccatttcacttggctctgtacagacagtaagttaatttccaggatgtataactcctgattttctgtgatgacagagaaaatactgacctgatttgggtaactctgaggtttggagatcttgaatagcctcatgttcctgaacttctttaccatacttgaattacttcttaggaagaaacatttattctgtagaatttggtttcgcattttatttttattttcttagacactggtagttggaaattcaggaagaatttgactacaaaaaacatttattaaaaagagtttctaatctcacctgctaagtgctacaaggaaaaaaaaaaatacattttgagccctcaaggggctccaaatacggttgaaggaaaattagacccagaatagtatatgattaggaacaaaacgatggcagagaaatgagagtttagagaaaggagagataatcctgagttaccttaggaagagaaaatttcacagagaaaacggcccccacactgatttggggaagatgattcagacttgtctcaatggcatgaggagcaggggccagatgggaaaggacatcgtggtggaaatgacacgatgagcagaagcttagaagtacttctgcttcacgtctgtgattctgcctctccccttgtttctgcagtgctaagttgagtgtagttccccacacaaaccctgagctttcttcccctccaggctgctccatcagtcagacaggagtgccttctcaggggatcctcttcctcatcttatcgggccactcatctcgtcgcagacattcccatactcctggttgacttgctcttccctctttttaactgacatgagcaggcatcacctcttccaggaaacttccctgacaccaggctgagtctctctggtgtcggggaaggcttctgtattactgcatctgccattttgatttaaggttttctgctcattccaactcaacagtgagctctttgagggcagaaattgtgtcttattcatttttcttgttatgccctaaaaatgtattgtgataatatataagtaacgtacaatttaccattttcacctcttgaagtgtatagctcagtggcgttaagtgcattcacactgttgtgcaaccattatcaccattcatctccagaactttctcatcatcccaggcaaactctgtatccattacacaatagctctccatttcctcctgccctcagcctcaggaaacctcccatctactttctctttctacgcgtttaactactcatatagatggaatcatccaacatttttccttttgtgcctggcttatttcacttgacataatgttttcaaggttcttttatgttttcttatgcgtttttatatctctctatctttgatagcacccaatacatagaagacaatgaatgtttttgtgagtgaaaacataagaccagaaagaaataggatgtcatattctagggacactcaagacactttcttgaggacagaggcactgtagcttggaatttggaagatgaggttggcaaggtgggtggggaaaggatggaaaagtgatacgtttcttgaagcatgtggatttgcttccataagcagtggtggaccagtgggcacccttatctattaaaagaatgattttttttgtgactcgtgtagagcactgtcttagttacctaccccagtggtagataagagaagcggattaaaaagagatctgaacctgaggaaatggagactaccaagttttttgtaaatatgtctgttataacatatattatctagtacttgcgatgcctgtgccaaagcatgctttttggtttagttaagcctacttagctcgctaatttcagtaattttggcttgaattgcaaaaagttgatgggggagatgggggagtctctgacatccttcccccactcacaggtttgaaaaataaaattatgaagagcaaaaggatctttttctgtggtaaattgtacttcatgacaataaacgagttgtggttttagtggttaatttataaattaggccatctggttcttctgtaatctaaagatttttatatatatgtaaaatacaaagttgtcctgggcaactgccaatctataaaggagaaaacatcttgaactctgtggagataataaaaccatattcagctgccaaagtgctgctgacatactgtccaatgagacacccaacgcctttgcattacagccagcaaggtgtggagctagatgtattgatctatttaataatattagcttctcttctctgggtcggacttggcccagagcaagtgaacaggacctatctatctccttctcaaaagtcacagctttcttaccaaattgtacaactcaagccacaaagaaaacaagtcaaggaaaggaccagaggagcacgagggcacatgccttgttcccagaccctgggaccagctccagctctggctccttgcagatcccgctcttctcaagttctctggctttgatcctagttttctgccctactattcctgacatgtacagcacttagcaattcataacttgctttattaaccaatatctcaacagaacttttaaacaacctgggaggaagcagagtgggtgttactgtcctcattgcacagataatgaaactgaggttcagaaaggttgagtgtcttgcccaaggccacacggcttcttagtggagaagccaggatctgcaccaatgtcttccattggacacactgccacttaatatggtacttagtttttctttctagatgaagcagtatgaggaattctaccatggatatctctctctatttttttaaactgcaaaataatgataatgataataatgaatacttctagaatacagtctctatgccaggcactatatgctttatatgtactaacttgcttaattctcctaacaaccctagaaggtagttactaatattatcactatttttaaatggggaaactgagttacagagatggtaaataagttgcccaaggtcacagaggcagccagattagtgacaaaagtttgagagtactcagtttgaattttacatgttccgtggatatggtttatgccaaataccttctcctttctagacctcagtttcctcatgtatcaaacaagtggactgcactatacaactctgaggtcccttctagcctgaagattagagtcttttatgcccacatgatatggaaaacattaatgctggctctttaagactggaaccttgtcatttaaaaaaataagctctactaaatttgcagtaaactgtccaaatacgatctctggtctctgatttgtatctctcacagagcatgatacaatgctagacacatatatactcattaaaaacttgctgaattaaattgtaaaacattcctccagatagaccgtaagggtgagctgatgccctaatatgctcctcagctgctgacttaggacccgtgggtgacaaaccctgtccttgttgttccatctgtgacagtgggcagtgtccaaaatgagtctcttcatcaaaagtgagtccaggaaactggatcagagtaagtaaggagtcttccttgcttctttttctctaaaatacaatacagtgcattctagcaaactaccagcatgcctataaatctcattttaaaaatatcaggaaatagatgctcattgataaagagggtaagaatgagcaagggagagagtcaagcctgtacatttgtgcttagggtattttcatttgagaaattatcattggaaagatcaatttccaaggcaggcgttttgtcttgacttaataaactaatctttatcaataataattaaataatgtcattttcccagatacaaaggggaaaccataatgcctttcatatgccttctcatatcttcagtgtttctcaaacccagctgtggggtctttttagggaagatacaaggagggtgagaccatgtggagcacacactcagcagccactgtgaagtcatgggtcccttgctacctttggaagctgacaatctgcatgaaaagcagcccctaggaacatgggtagtggcccgggatccaaaactcctgaatccataaaagggcttttgacttcttgttccaggacaagtgacatctgacatgcttgcctgcttgtttgcctttcttccttctcctatccgtctttccatccatctgtccatcagtctatctgtccatccagtcatccatccatccttccatccattcgtctattcatccatccgtccttccatccatccatccaagatttattgagcacttacatgacaggaagtatgagacacaaaagaaaattctacacaattctcctagggacatgaactaatggttagcaaaaatatatgggaagtcctgcttcaagtaaaattatgacttaagatatacatcagatatttgaaaaagatatttttaagttcaacattgaaattctaactacattgtgtccttaatttctattttctagttagacttttttgaagatacaaatcatttgaattatcattattattgttacttgattttatttattccacatgaatggtaagaattttaaaggaaggtgggtgccctaaaaatacatttatgccaactggattgaatcaccttgaatcacaatgagtacaacaactgctaatgagctaacacttaatgagtaatgaccaggcaccagacactgttctagcactttatacttactgatttctttactcttcatgataaccctatgaggaaagtgcttttttgttaagctccattttcagctgaagaagctgaggcctggagaagttacatagctttctcatggtgtctccactatgaagtagctgagctgagatctcacccaaggccctgctgggttcaggccacactcttaagtactcacagctgcatcacactgaatatcatctccctgcactgccatttcatttgagcagggctttgcctgtcaagaacattcatatcttttgataaacagtgcattttttccctgatagtctgtatgggacagcctccttgtttgcatctgaaggacagggacttcaggacctcctgctgtggtcaccaaggaatcacattcaaacttctcagcaaggtgttatggtccttctcagtttgcctacgatccattgaggcaaaggtttccttctctcaatacaccctctgctttagccagggggacctcccactgtcctctctatgtgttctatttgttcctgactgttagtacccgcttgtgtggtttccatgatccttcttctgcctggaatgaggctcctcttgagtcctgagagcttcatttctgtctgtcttttgggctgtgccaaagcccctctgccttcgtggactccccactgattcattaccaattttcctctcctctgggctcttcttagattgcaaatggtgcctctggattgggtaccaagacttgcagtgccttattttgataccactaatatgagaccatgttatatgcctcttgagatatcattccctttctagcaatagacagtgataagcatgcgtatagagggtaaacgtaggactttgaggttcatccatctcaatagacaaaagtaaaagtatgctaatttcaatccttcacacagtaaattgaatgtaataggtcttcagtaactatttgaggaatgaaattgttattgatatattgatttaactgagcaaatccataagtgccacgcttggagtaaagtacagggaatctcattttttgggtaatttcaaacaagtaggagaccatccactatctattaaggacaaaggagatttgagtgacaaacatgttccagaccatccaatggtgttattctactacttcatcccagctagtaaaatggggcaataagaaccaaaaagcaggtactgtccctatgtaagtagacttcctagtcctggccaaaacaaaaacaaaaaaaaaacaaagcaacacaaaacaaaaacaatgtgtgaagagcatcttaccgttcattgctttggatgatttgtgcaaatctagttaatgggggtggatctgatcagtctttgtaggaagtcagtattggcatatgtctggcttctgaattttctaaaaatataattatttatttttaaatccattcaatcaacactgaatttactaatcaactactaaataagtaaaagatcctatagtagatccttcaagaaatggaaattgagacattaggtcactataaaccccaacccttgtaatctttttgtggcaaccttaggaaacttggaatgctttttacactctgataaaggtttaattgtaatcatagccccagtgttgcaaaatgagtcagaagatacaaagtatctcataggataatattatagctgtaggtacttcaaatggacaagtataacacattatgactgctaatatggatgcattgggaggaaaataagccctaagaagcaatatgcagaaaagctatgattgctggagacagatagatccaagaacctaggtaatttttcagcaaactgtggttccactttcgcctctttcttgacattgactgtgtttttaacagggaaaaagttatctgaaatttttgatagagttcaaactttaaatcgtgttcactttgctaaaactccactggatggagtggcagaagagaaaaaacacagaaataaaagaaaagcagtaatggagaatggaaaatctttaaagatgctaccatcctgaaaagattcgaaagcaagcccaggaaagccacggggagggaaagagcgcttagaggtgtccccaaagctttcagaagtgatgagggaaaccccagctcttcttgttacttcttggcattttgttcctctatacgttagcttttggttaatctttcatgttacttattatctctgttttaaaatttcacattaactcattggtttcatatcccacttaacaaattagatattttccttgggcttattaagaaaattatttgctctcatatgttatggctttagattttctgtgtagctaggactgttcttaaatttttatctttacctttgttatttctctgaagcatccccattggggtggcagtggggggtattaaatggttatgtaaaatttacatgtaattgtgcaatttacacatagcctcaaatataatgaggcctagtctagctgcccataccaagaggatattatagttgccaataaaatcagtattatttcttttttttttctgttcttttttagcttcttgcaaacattcactcagaatcctttttgaatatcagttttgtgaaaagcaccgtgctgggttctttgggaaaagccaagatgagggcaaatgcatcctccttcctagtgagtctagcacacagatgactcaggaagtcatgcactggaggaggagtatcttctagaactggggaaaggttaaggaagggatcagaaacctttttcactcaaccaattacattttcctgaaagcatgttattaatcgtacatgatcttgcagaccccagatagagactatatcactatatcaattgttttcttgaacaactggagttaattctcatatgtttggttacccttcaagtatttatgtttaggatctgttttcttcctcttaacttacattccaaagtttaggtatccttcccctccatttgctgtccaaaacagcatcctttcatgtagctacatgccattggaatgatttggtttttgccatggattcctagtcctaaatttggacttttattggtatctaagatgtcatggacagaacccacagatgttgtacaaaaagggctgagtggacagtccaacagagttacatcatctgttccaaacacccttgtaatggttgtatcagcgtcaatgtctgagttgctgtcctggttctcctggccagtcctcagctggccatgcctgttcaggcaccagagaaagcttcatacctcaggcaaatctttacaagggatttgaaaggcaagaaacatgtattttggaggttttacctgtttatttcatgtatagcttcatattaacagattttgctatcacttaaaagtaaataaaatgattttgatttctcaaaatcatcttataatttattaatctattttaaggcttgcatttacatttaatcttcaaatcttgatgcattttcacagagtttctttagttagttaaggatattaatgacttcctttaatagttgatgaagtgagtcatcatcgacagtgagtcactaaggccaactcttgtacctgctcttaaatagcagttgttttactagatttgtactgaaacctttttaaaaatctgtttgtcttatatataacaagcatttccagtagttaataatactttcttagctcttcaatcattttatgagagcattacaagaaaagcaggagatggggaaagagatatcttgtttgccatgtaggatgcatgaaattcttacttagtctgttgtgttttggattcgagagaaaatatgtaatgaatcaaaatgtttcctacagtcctctgaaaagatgtaatgagacagtcttccagcagcctttgatcatctgggaagtcattgactttgatccttatcctatcaggggctcttaccctggggtccataaatacccaggcatttttaagaagtggatttcagtataacttgtttcattttgtgatttttaaaaatattttgttttatgcacttaaaaccttaatctgagaagtcatctgtagactataccagatttccaaatggaataaaaatatttaagaactctcttatgtgtgtgtttcaacctataaattttatatgtgtagctcatggttaggtggtaagtagagaatttgctatctgtgtaatatttggtactttttataatgaaaaaggaagtaatacaatgataggtaccatttatttgttgaccacccatattttccagggaatgtgatagatactttttatatattctttctagttttcaccataacatgctgcagggatagtgttaccattctcattttgcagatgaagaaattgaaacccagaacaattcgttcattcattcaaaaaatatccatagagcatacactaagagaaggcactctgctaggcaccagaaattgaataattgaccccaaatcacctaactcataagtggcaaagctggacctaacaaagcccattatcccttctatcacacattccatcctcataatatcatattctacatagaaaaacttaacagtcctgttgagacacttggaactctaagaaggtagtcaacagatacttttctctttatataaatatgatatctaattagcttttcctggaaaggagtgattctgcctttttttaattctagcattccctgagcaaattagagcccaggtaatgatttcctgagataagtcaattctcttctaggacaatctctagtcttgtcatcatgagatggaataacaacggtctatgtcatttcagtgacggcacctgcatgtccttgtatctaagaaaagacacctccttctctgccttgctaaatatttgtaaactttgctttaattggtatatgtgccactgttttgtatgtgggaggggtttatggttttgttttgttttttggtcttttttagtaaccccaatccaaactattctcatttgtaacctaaaatacttagaacaagaggctttgcaatcttgaagaccgaatacatttttactactaaatgtaaggcagatttgagccacccattttgtagtgcttgattatggcaacccgaggaaactaatacggttactctttatctttattaggaaatactgctgtagttcctgttgtaatccttagggagccaacattgttgatgagacctagtaccaagccagaggccatgttgaactagcaagatatgggatagtttttactttcaaagtaattagcatctagagtctagagagtttctcttacagggtggcctggtgtcttagtctattttctgttcctataatagaatacctgagactgggtaatgtacaaattataaagatttgtttgactcacaatcctagaggctgggaggttcaagatcagacagccacatctggccatcctttaatgagggcctcatgctgtgtcataacacagcagagaattggaaggagaaatgggcacatgcaaagagaaagaaaggggacgaaaggggctaactcactttgtaactatgagactaatccattccctggagaactaatttattctcatgagaaagacatgaatacatcttaacatcctaatcacttcttaaaggcctcaactctgtacactgctacattgtaacaggcaattaaatttcagcatgagttttggtggggacaaactacatcccaactgtagtacctagctacccactttatttttagagtggctatttaatgacctggcaagatctactgtgcttgtaaaagaatccaccatgggttaaagaaaaatagtttctggcttccagtctccttttggcctctctctagaatggcatatacaagttcagtggttactgacttcaaaggtggggtggaagacactgaaatgaatttttctcctttctttggttggttgctctctctctttgttgctgaaatttgtgtaggataatggaatgaatatgggagatagggaactatagaaagactggagggaagggagaagtcttttctgaattaaccccccatgtgcttgtgagacccttggaccccaaagggctcctgactggctgggcccactccttctgtatatggagccatagggcttttctctggcttcccagttgaagcattgtcatatgctttgatgctcagcatttctggcaattttaccttgtaaaactcccgtttcgacattctgaacttaagtagaaaatgggaatataagcctcttgttttttgctcttaatccattccagaactataagtccctgggttcttggcaacaacaggtgttcctctagattttaaatcaagtgtgtgtgtgtgtgtgtgtgtgtgtgtgtgtgtgtggaatatctcactaaaacgacagtgttgtcatcaattttggcttcatggagggtcttgagctgggtggagatgggaggaagctatccttgtccatgcggtttggagacttgctctaaaaaagagaccgtctacttccctcgtagtttttgttttgaagacatttgtagtgtttaccaggagcatacagttatctggaaaatgcagactgatgacaatagtatttgaaatgctcgtagatctgcttctaggttgatggaaagaatgtatgttccaaggtacaagtgcttgttgacttttcggatgcagccagtctgtgctctttgtcaggtaactcggaatcactccacagtagctgtccttcctgtccatttgacaagcacttaaaagggcagtcttaagtactttacttcatagtttattaattttttcccttctttagtttgcaatctactctcagaaactgaaaaataatttcttttacctttttcccctttctcatttaagctgaaattgatttctttctgagcgtgtaaggaaaaaaataaaaagaagctgtggttaatacaattgcctttgctgaacaaaaataaaagactagtttaccttcaagctgtgctgtatcagagtaaggatctgttctgtcactcccaggagattttgataagagagagtacaaaatttcataatatctacatagcataattgtagcaaatataagaagtattataattgtttatttggggatgagggtggggatgggtttttttgtgtgtgtttggaaaattgggaagctagaagatactcttaaatccatcagcttcttcagaactcttctcaaatgcttattgtcatgacaaccatctcttcataaaccaaggctctgagtgtaatacagatggggctggtaacaaggtaggattgccatctgctttgttttctctaagggacattatttttttgtgatccccaagtctcatcctcaaatctgaaagtcttgacttatttttctttctggagtcagatagagctgtgagattaattcttttctcctgacaaactacttcctcacctgtcatcaaacaacttacttgttaaatggagggaaaaaagggtaattatgtgtgtgtgtgtgtgtgtgtgtgtgtgtgtgaaaacaaatatacatattttaatgatttatttatctgtctactttgcaaagtctcctatgaggtacctagtaattcaataatacagtcaagtgtgagatccagaaacaagtaggagtgaggcaatcattttcccatgaaacaagtaaaattattactgcttttgaacattttaacacctgtgcttcctgatggtggggctgcatgaagtttgtaagtagtgtcatcattctcttattaggtaacaaataggagcataattatttaggagaggaaaaccttttcttgttaccaaatttggtgagaaatttgccaaagaaatgaatgcttacaggagggatacagcttaatatcttcatactcccctttgtcaaagatacaaatgacattttctcatatcaacttcctacaaaaagtgaggccatacatttttaaaaagaatatacccagtattttaaaagtttgtatatatcgtgatcagaattaagatatatccagcttttgaaaaaatatacatatttagccattaaaaggtatgtggtaaactaaactgatgaataaaggttatgggaaatatttcataaaatttatatttaaagtaaagaacaatttctctctttgtattatagttattttacataagctacaatctataattctaaaccttaatttcttgaagggctttataagcctcatttttctttctaaatagagaagttcatacactgcttttatgtcctatatgttgatgtgtaaaaataatcaaatactagtgggtgagtagaatgtaactacaatatggtacacacacagacacacaggatgactaaactgtgcacatgagctgatgtccagagcagggaaaagctgctaaagaatgtttgaagtagagtcagaatgcagttttgtggttaagaccaataatttttcaaaggagcattataaggagtgtggttacttgggttggagttgaaaaccaagcaacagttgggcagactggaaaccagttttgtctttaggtttcttttcttaatgattggtctacaatgagttagccactcatcgtatttaaggtcttggtaaaggagagactttctttgccatgtagtttatacctcatgtatgcattacagtagagagctccaggaaatactgcaggccttctactggtttttatcctctatttagataaaaatgaggaagaagtagaattatcataaacaatcctgttggcttttagttgagatatactacagaaacatcacctttgaatctgtatatgtaaaaaaaaaaaatctcagagtaagatataagttctgttgcattgttctgaaggaatgggtaatgtcagaaatgtcttcattacattacataaagtaatacacagtgctgttatcagattgcatagtcaaagttggcaagtttgcatatttacatagatatcatgaccttcatcattcatacttctttcaagaaatggtcatcttaatatggggtatttatttgaggcatacaccatttattttaagaagcagtacctttgtttattgtaaaacttctggactaaattcttcaattttttctcaaatgaattcagttttttgttttttttcttaccactggtttttactgcatagcgtttgcctgaagaacaccactttgtttcccaaggcaagtagtcactacaaggcgagttttgttctgtctatcccaaggcaaatagacagcagcaaacatagtgtggagggctgctgggttcagtagaaaaccatcaactatttctaattgggggtgtatgaagacagctgcattctggacatgctaaacatcttgaaatgcttggagtgtaataaaaccccaaacgtgctttcttttctcatttctttgcacatgtattttaggcaaaatataatccacatgctgttgttccctctccttttaaatcatgaaaaatgttgtttttatagggctatttgaggtccaggatgcctttttatcctttttattaggttatttttatatataaatgaaaagaaaaacataaacagaaaatacaacatgacatcatgaatgagggcaagcacaaactgcccaatttaagtttgaagttataaacctaaaatattttaaaacaaaacatttctcttggtgttttgcaaaagcaatgctttcttctattgggcagaaattgcagcctgttgggatgaaggagagaatagaactaatatttattgagtagctaccatggctttctgggacatctgctaaccccttaatttttacagtaaccctaagtggtaggccagtccatctgcattttacagacaggaaatgctttcagagatattaattagatggctgtagaccacagaagaattgaaagtcaggtcttcttgacttttcagctcatgacttcattacttctgccctcctcattctgttgggagatgggtgggagtgtgccctccagataatcagaaagtcccatgttgggatgtgatttggaaatagctagtcctcaggcctgtggacgaaggctattgtagcctcaagaaagaaagagtcagcttgatattggcaaggtggttatttagtgtggcagctgcataagagcattggataggtggtatgatatgggatgggggtcagggtgagagctgctcacacctccttattatggcagggcaaaaccagaatagtcacagtgatggtgatgtagggtaggttcaagagaaagctcatgttcttctagcattgagactcacaatatttcaaaacaagtgattatttattccattactatttattttggtgatggatgttgcatttattttattttctaacagtagtacatatttggtaagagttgtttgtgacattctttatttaaatggattaaacccattttcttaatttttttaagtgtttgtcctgttatcgaagatatcttaaagtgttacagaatgggaatcatagctttaatgagtctgcatataagagagtccaaacattttttttttggagagaaggaaggtcatttcaactgtactataggaacgatagggcccatgatccatggtatggcaataagttactattttttggagaataaatcgcaaaatatgggacgtgaagactgcttggtatttacacaggagtctagttcttctgatactatatattctataagctttctcccagaaatccaaagttttatttagcttgtagccatcattgtgccacaatcttccttccatgatttatttttttcccatactgtactcttgcactgagtctttggcattgaaagggaaagagatgaattattcaactcttcttctattgagtgaaaagccaatacagaaaaaaaaatgcaacaggcaatttcatgactgacattttggagaacattggggtcatcatatgactgagaaaatgattatctcttttgaaggtcaggaaaccaatatttttttttccagtgaatctactgagggaaccaaccacctagctttttgtaaatagcactcctcagggaaatgttgcttttttcttttgcagtgtttctgctttgaatcttcatagactgtatcccatggaagcaggaatataattactgtagtgcttactttttttcatgtctctactgaagagccaccctgatttatcttttactccaaggtagtgtggaactttacaaggatttagattatattagtcattttgcttggagatctctgcacacttttcaacatcatttctaagagccttgccacactcagtaaaagagggtgaggcttcaagaatctctgtgtaccaacgcaaattaggcaatttgtaagaagtccctagtagagcagagtggagagagggctcaggatctcgtgaggcctggggcagggaggtggacatgctatgagctcctttcacagtcaacacaaagttaacacatcttggaggaaaaaccgttactgtatagtggaaggcagaaggcagggatgtctgtgcttggtgatgaagctataagtagtgagctgatttatgatggaggggtgaattgtgccatgaaagagactcccctcaattttattagccagattactgcccatacgcggggtgaggagtgagcattttaaggcatttctctctgttttcaatatatcatctctggattcactattactgggacttgtgaatatagactagggattaaaacctgagtttgcttttaaaaaactttattttattaaatgagatttctgagcaactgatttcacttagtcttatcaaactattcttactactttttcgatatgcattctgtccctcctgtgtgaaggccacaggcccatggcccccatgtcattgagatggaggtcctcaagtgatggcgggatgaatcacctctcacttgccacctgcgagaatgtctatcactgatacctctccttatgtcccgtagcagctgctaagctcccacgttattattggtgacactttctagtgttcaggagagaacaggatttactttttgaatgcctctaaattattatagcaggttcatttggaattgcatatcagaacattcttcctgtttatcaggaaaataaaccaaggtcttgaaacttgatgtctatccatagttggcccaatataattttgcatgtggtttattacattatttttctccattggctatgaactgaaggcatctcatggatatttattccacgctgaaaaggtagttagatgctgtgtggtaaagtcgagaccagtatattggaagaaaagagacactccatctaataatctttcatagtcttcacattcattgagaaggttacttgataacctttcctgcacactctctcccaaccctgacccaggaacttgcagagcacactgtgcaacagatctaataacccttgtctgcaggcaatatgcacagctgggaaagataattaaatagactctttttgagaggtctacaacatttcaacggaaggatcgagcaatccggctggcctccgactgaaaactattaccaacagacatacttcagacagattccatgatcaccatccttatgtggcacaagtgcttatggggagcttctttggcttccaaaaggccactaaaactgtcagacctaaataatactggaactgtaaagtgggaattaaaaattataattccatttaacatgtaacgttctcatcagaaaggggcctttggttttccatattgatcggttacatggtcagctgcaattgtaactcatgagacacacccagatatcatcctgcgtgattctttttgaggtttatttagggtgttagataatccgaggtaggtttcatcatgggtggcaatattacgtatagcaaatgtcatgagaagagagacaaagcctcccttttgaatgttaacatttatgcaataagtttaatgtaccgtgtaagtttacattactattatgagacttaacctaaaaaattggggtgaaatcttaaagaattatgaaattaagaaatgaaaccagagggctttcgttttaagtactgatcacttaaaccaaaaccagtttggcttatcctatgagatcgtgggtattgagaaagaggaacatttgctgctgcatccggagatgtttccttgagagcaagactagttccttttgacccagtacatcctacaggtaaatcactgcatgctgtagagatacctgttccctcccttcccccaccccctggggatctgaaaccaaatcattgctttttcatcttttacttatccttataaacaaagccacccactttctcatttttcctgatgccaagtccttctttacatgagtggaatccactcttttcaatggaaagacacctgctctgagacaggctacactgtcatgagccttggcatggctgagtgatgtagtggaaggtgcaataaatttaaactttaaaaatgcaaaatttgatggaatcatgcatcttgtgcctacagtgagtatatggtctagcaggatttacagatacatgcatgattaatttgaatacagtatagcaaaatgatctgttaaaaaacacatgaaaagatgtgcaaccttattagtcattaggaaaatgcacataaaaccaccgttcctgtgtgatacctctgtacgtctattagaatgtataaaatttaaaaagactgaacatagcaagcactggtgaggttgtagaccaactggtgctttcatgttttgctggtgagaatgtaaacattacaactactttgaaaacagtttgacagtttcttaaaaagctaaaacatccacctggcatgctatatacagatatcctactcttacgtatttaaccaagagaaataaaagcatatatccattcaaaaacttgtaaataaattgctcctagcagctttatttgtaatagccaaaaactagaaacaacccaaatgtccaatgaaaggatacatcgtatttatttataggacatatccatgcaatggaataccacttaggaatagaaagaatcaactgttcatcatacatacaaccacatggctaagtcttaaaaataattatgcttagttaagaagtcagacaaaaaggtaagagactgttaggagctgaattagcgggttaacagtggcaatgaaaaaggagaaaattatagctacctcaagatagaattgatgagctttgattatgaaatgatggtaagagagagggccatagactctgaggtctgtctctagctttggtttccctatgtggatcattatctatttggatataagaattatctgaaagatgatacttaagcatgtaagaaatgataagctacctgtttaatgatgagcttttgttacctccaagaaccccaagaagaaacatcctgtaagcagaccattcatacttgattgttaaaggaaaacaaaattccattttgtctttttcatcaacacaagtatagctggctaataaaagtgtaatattcatgagagaaaaagaaaagaacacgcacacacatacactcaacaggattcctagagtcattcccatggataagagggaaggaaaggttgagggcaaagagagaagggaaggaaacagactatgatgggatatcttagggcaaaagaatagggggctgatttggaaggcagcaaacttcatggatacttgatttatttaatgtccctgtcactctggcgtatcttaatgtgtgtggtgtgtgatttatttagtcacttgatccaaattctctaattaagtggagctcagaagatatagtgtccattgtggtcaagggcacaggttttggcttcaacagacaaataagctctctgagcatctgtcttctcatctgtacaatgggaatatcagttcctacctcttcaggttgttgtattcataaataaattgtgtacaagaaacattaggattgcttcttacccgtagtaagggctcaacaaaccttctcctccttctcctcctccttctccttcttcttcttcctcctcctcctcttcttcttccttttgcttttctccttccttcttccttcctttcttcctacctccttctcattattgttattaggtaaccacaatactatcagtaatgattggagaaagctttaatctcctagttcaccattagaaaacaagaacacattttggtggttattacccgaagtaatcataatgtcacctttttttccatctgactcattatcccaagtgatttatttatatatggagttttctgagtctttcttttacatattacaaaaaaagagtgtgatttagggacgaagcaaagaaataaaaatttagtgactttcattctgcctgtgccccaattcctattgggcataaggcaagtaatttaaatttcttagcaccttagcatcttctactcaaacagaaatgaggaacagtcacaggttactattatagctgtctaagtagaaggcacacaagttttcacactgagtataacactttatagaaagctaagtgtgttgctcaagttggtacatttctgtagatgtgacactatggcactaagaaacttaatgccacattgaaattcattgagatagctagactttaaaaataattacttgacttcactataaagtatgttcgtattgcatttactccatctagtagaaaatagaccttgtcagttcaaatccctgttgcattaatttcaccagtaatgagtctttttcatttgagtcagcagggtttttcttgcttgttttcaggctttgtggatttgaccctccatgatcaggtccaccttctagaatgtgcctggctagagatcctgatgattggtctcgtctggcgctccatggagcacccagggaagctactgtttgctcctaacttgctcttggacaggtaagtgacctggctgtagcttaggagtagcatgttctttacgatcatagttcattcatgaaactattttattcatctctcggtgaagcttcagagaactttattaggtatgtttacttaacaaaagagtgcattgggggtgatgaagcctagtcaaattcacagaaagctaagaataactttctgctagacattacctcagaagaattctattatttctaatacacacacacacacacacacacacacacactcacactctctctctctctctctctgtcattatgaatggtaattttctaactccatcttcaacttgtatcatataaaaattataataacctctctttaattaaaatctgttgttgcttcttgtacatccataccacaatagcctattcattttcttctccaattttcccatccgtaaaatgaagaaatttgaccagagttctgaaggtcacattcaggtcgacaaattcattttcatgttcaaatatgttaccttctttaacataccattctggggttgccttggaatgtgggtcccattgttttttttttttcagtcattgcttagagtcatagaatttagatattactcaatagcagctgccactgatagagtctccaccctgcaccagctgtgatgctaaacactttacatatattatctcatttaatcatcaccggactcctaggaggcaggaatgtcatcatccatgttttaccagaaaggaaactaaatctcagagacatcctgctacttgcaaaaagaggaaagctcactaaatggtggagccagagttcaaattcaagatctttctggctccggtatgctctgttacctcctgtgctgggcacatggtcttcccactctcatgttcagtgatgcctcctttggtctgctgccatagcattctgttttccaggtaaatcttgtctttgtgggctacataacattttggatgagaaagaaccattttgttgtttcttgcaatcctattttgcctccgtgccaagcagtctaaggctgccaggctgcccacagtgcatctctgcatggtactttacttcagagcatttcactatctttctacacctgccaagtgcctggagcagagttgcagcaaaatttatttaagtactggagaattgtacaaggtgttggttattgttttgtcattttgtgttaacacagcttttgaaaaacagtggtgatacagtttaagaagcatattttgctgtctgtggaatatattttgatatcacagtttcacaaaattatcaagaatggccactagtcttgttccttagaactgtactcacaatgtattctgtcagccttatagaggatgtctttaccgtgttctttcctttccattccttgtttcctttccattttttcctatctcatttctcctctcttttcctttgctttcctctttctttctttctcctgtcctcttaatttttttgtcttatagcagtgtggttttgtaaccaagtgatatcaagtttgcaaatgaaaatcttagaccacacgtaacatttccctgcctactgcctggagtgtctaccatgtttaggtttttggacattcataactcatttgctccttgatttccatcctcatctgtatctatcttcttttttaaaatttaattcaatttttataatgttgacacaattatgcagattcatagggtacacagtgatgttttgatacatataatgtgtggtgatcttatctatcttcttgagtacacacttgcttgaggacagtcatcaaataattgcattttgaatatgtgaaggtttttgacattactgcacccaaaaaactcatattgccagtgaggtgatatggcctaggattttatcagctacagccttctctttcctttctgtacactccagtggtggctaattttctttcctctctcacagaagtatgaatgactaaaagttctcatctctattcattcctactttctaaaacttcagatcggaaatttgaattacctctagaccaggatttgtcagtctctttactattgacattttgggtcagatcattctttcattctttcttggttgaggggttgatattgtttggtgtgtcctcatccaaatctcaaattatagctcccatagttcccatgtgtcatgggagggacccggtgggaggtaactgaaacataagcaaaggtctttcccttgctcctctcatgacagtgaatttctcatgatatctaatggttttataaaggggagttcccctgcacacgctctctctcttccccgttgccatgaaagatgtgactttgctccttcttccccatgattgtgaggcttccccagtcacaaggaactgtgagtccattaaacctttttctttgtaaattacccagtctcaggtaggtctttattagcagcttgagaacagactaatacaaggggctgtcttgtgcattttaggatgtttaacagcatccctggactccaccagctagctgccagtagcaacctccacttcctccagttacgataactaacaatgtctccggacatttctacctatcttctgttgtgtcagggggtgggggaggtaaaattgcctctggttgagaatcaccactctatgctttcccaactcaatgttctataagctcctcagacacactgtactctaaactgcacactcactttatcttctgcaacaagtctattccttttcttttctgtcttggtgacatcaacactcacctagacactaaagctagaagctttaagttacccatggattctaccttctccctcaccaaattatccagttaactatcaagtcatctatgaactgcttctgaatccagacctcccctctatccccattcctctgcatggcacaggtcctggttgtctctgctgcagattccttgcttctgcaccactgactcactttcttggtcctgctactctttctttcagtccatctcccatactgctgctggagaaggctttctaaggcacagctgtgatcatgatgcttcctgactcacctttcagtggctctctcaattcttaacatggagaaaccccatctctactaaaaatacaaagttagccgggcatggtggctcatgcctgtaatcccagctacccgagaggctgaggcaggagaatcgcttgaacatgggaggcagacgttgcagtgagccaaaattgtgccattgcactccagcctggatgaaattccgtctcaaaaaaagaaaagaaaatactgtgtagacttcttatcttaataatcatgaatcactattacaagtgtctcaaacgcaaatttctgaagagtcacaggtgacccagtgagcccttgtccaggctaaaaacacctggtggctgaattctgaacttcacacattcgaatttctcttccattgcttctgagagaccctccaccattacggttccttatcagagtcatatctacctataaggctcatttcaggtgccgtctttttataaaatcttccttcaaactttctcctcttcagcctttatatatacaaaaggcttttctttcttttccttttctaagtttccattgtagttggtttgcttttctctttattattctcattccaccatattagttatgattggatgtcttcttaccttccctactagctcataaacttcttgtggtcaaaaaccagatcttgttcgtcttgtgtgatctccagtttacgaagtcttccatgatacccaacaaatatttgttaattgcactggccaaggtcacccaggtggcttgtggccaaatcagaagaatctacatcttctgatagtcatggcagctgttattcccatccaactcacttcctgtgcattgctactcatcaattccccacttattcttttaaaaacattgcataaatacatatctatgtgttttggaaagattttcttaatctataagcgcatttggcgtgtgcttatatgtctgcttatatgccaaatttgaaattccaaatttcgccatttggaatttcaaatggggaaaagcaaagactcttatctttcccataatcaaaccccttatgaagtaaaatccttaaggtctctctacaggttaaaaataattaggtgatatgatttggctgtgttcccacccaaatttcacctttaattgtaataatccccaggtgtcaagggtggggccaggtggagataattgaatcatgtgggttgttttccccatactgttagtgtggtagtgaataagtttcatgagatctgatgattttataaatgggagtccccctgcacaagctctcttgcctgctgccatgtaagatgtgactttgctcctccttgccttccgccatgattatgaggcctcctcagccatgtggaactctgagtcaattaaacctctttcttttatatattacccagtctcaagtatgtctttattagcagcatgagaacaaactaatacattaggtatatgttaatgatgaggaatgtgtataaatacatatacatttatatttaaatattaatatttacaaataacatgatattaaaaatatggtctataattttttaaattatctacctttctaatcattaacatgcactaaatattattaaatttcaatattatttaattaccatcttggtgtttgaggataactgcttttgatggcattgatagatgcattaacagtgaaacattgtgaccaacagcccatctgagattttatacttgtagaagatggcttctgagtgacagctgagaagactgtttatgtctttgccctacaggttcctaacccctttaataaaatagagctctctgatgcagatgacacatgggccttctttttgctcttgtcccatcacattgtacatagtaaacatttttagcaacaaatagtagatacttataactttaaaagctaagtggttgacagctgagaggcagatgatggtaatttcatcatttttctcatatctcaggcattgtgacactacctctgcaaggtcaactgtctccataggctgttttcatttgcgtagaaataggggggaaagatagcttgaagtcatcaggagccctgcaacccatggattaccaatgttgctaactggagcctggatttcatcttcaattgattgtaatgatgtcttgttctctcaaatctttgcaaatctaggcatttataagactatcctgtaggtcccttacaagaccatgaggatgctagaacttaccctagtcttttcttgtaattgcttaaatgttagtattggcaaatggggtttggtgattataagagtaaaaaaacctgctgccatcccacatttgtgagcagaggatacatttcctatcttgtgtccatttaaaaagaatgattgcttgattggcttcctgatgacaacccatgatatactgattctgttagtttataactttcctagtagtcatatgcttataggccaattttatccttgccatgcttagcctagtcacaatttccagttcttctctgtatcctgcagcagtgagttccaaacacttaatgctgtcatctcttcctgtgaaaaccaagaaataaaggttattataaggtataaataaagaacccagtgatttctcttggggtgtgtgtgtccatgtgtgtgtatattttacaagaggaaagttaaagatactaagaatgcctgtgaaagtaatcaggaaatggagaaaacttgttttccattctagcacctaatcctttggtgtgttttggcactagaaaacacaaaatatgtcctctgtgtctactaggaatgcctctcttcatttagtcctgcttgagtgctcatgatggaaaaatatagactgaaaacaggagcaaaagtgttcatcctactcattccttgtggggtctctttgctttcaaagagatgttagagatgttagtaaatggtgttagaagaaacaatgtaaattgcctgtttagtaagatgatccagtttctaaggaactgttttactggcgccttccatgctaacaaattctgagaaatatttgcggatttctcagtgaagccaaagcactctcttttgactcctatttactctcagagaaaaaaactattcatccatttgaaaagcagggaccaattcaacaagcagaatattccctctactaagcctttggccagagagttgttgctctagttctttccatcactcctgcatcaggaggctctgcctgcaggaaatagtattggacaacagaaagttcttttacttgtaggcataaaataggtataaattctcctccttaagagaaaaacaggttgctgcaccagaaagaacatttgcctcttctactaaatagcagactgttttccaatgataaactcattttaaatagaaaaaaaaaagtcattctctacaaacaagaacattttcattttaggttgtttattgtaaatatttcagaaaaaaaatatgcaaaaaaaaaaatgcccaaaaatcaatgcttccagtaacatatttattagctatctttttccccatgtaaaacttcaggtaaattctttgcagattttttacttggaagaatgataaaaaaaaaaaaaaaagttctgaaatgagttgaattcatccacgtgtgtttttgattcacatgaagagtaggacctccctttatattccctcttcaaattctcccctctgaaaaatgggtggtacactcaaaggaggaccgcacacattgtagtagctggggtgttgggggtggaaggagcaggttttgggggtgggaggagcggtgagtgatcctttcagcaaagtcagtcctgggcaggagacggcttcaggaatactgtcagctttactggattccaccatcgctttccaggactgtttaggccctgggcccttgaagggtttgcgtgcctcttgtctccattcatacctcaagaactttgttcatgttaattttttttcactctatcatatggaattgagtaaaaaaagaaaaaaaaaaggaagccaacacttacttaactgctttaatgtataggactctgttctgggttgtcttctaaagtacatttcattcaatgtgtgagaatacagataggaaagagttttgctagtttctattttgactgtggatccattgattctttctggttctcagcccttaattgctcagctgcagataccacttgactgactcttaaaagtctttggtttattgcccaattctgggaatatgaaactgtaagctgtttaggagaaaaactgagaccaaaagaaaggagaagtgagccaaactgccattatgactgccacttcttattgaagataaatcaaaatatccatttgactagaaatcaattgaattatgcactttaaatgggccaattcaatgatacctgaactatatctcaaaaaaggtgttaaacacaggcacacacgtacacacacatattggaattccaggaaaagtcactttgatcaacaagattatcagtcgtcaaagtgcttggaagggttctattggaataaagctaaaaaaaatcaaagtaaaatttctccttaaaaacaaaagcaattaagcagcactgtattataaaatatgctaagctgcaagtcaaaattcttaagagacttaagcctgtaagcagtaaggatccactcaatgtaaagttactccagagggaaaggcgtgagcccaaccaaagtattaatgctgtgtaggaggttaatttgactcttcttaacatttttacacaccacattatgttttattcaccatttattattaactgaatttattaaagtataatcaaaataatatttttgagagtttaaaaatattctcataatatttaagttacatatactatgcagggaccgtcaagtaattccactctgacatctgtatttattaccgccacctgtccatgatggtattagaaagatcctcatttgttttaatggatgcctctaaaatccagttttaagagggggttggccactttcaagtttgtgttagttaggattcagtttaacccagctcaacaggtatttactaagtaccagcatatccatagggcgctgtatgatactggaggacacacagaaaagagatgtgtaagaggcactcctgccctcaaggagtttactattgagtggtagtgtaatatgaataaacaaatgaatctgctcaaaagcagggcattctaagcaggccctcaccagcctctcatcattcgcatctagtgtatcttcctccatcactttctaaacgctatggattctgagtgaaaaccaatcgctggtttatgcatgtatgcatatatgaattcattcttgacattgccatgcagagtatttagtataactagacttattatccatttatcctgcctagaagcatactgtaatatatataactctaaaagcaagatcattccttatgttggttcttttgagctggcagggggaaagcagagtatgttggcaggggtctatcaaggtagatgagcccagtttgtacatctttgaaatattaccaatgccaatgtgttagtactgcttggatctcttctatgacaacagttcttattttttccttttttctgtttgtttgttttttgagacaggatcttgctctgtcacctagacaggagcgcagtggtgtgatctcggctcacttcaatttccgcctcctgggttcaagcaattcttgtgcctcagcctacagagtagttgggattacacgcatgcgccatcatgcctggctaatttttgcatttttagtagagatggggttttgccacgttggccaggctggtctggaactcctggcctcaagtgatctacccgccttggcctcccaaattgctgggattacaggtgtgagccaccacacctggcccatcagttcttaatttgatgaatggatagaggtttggcttcaaataaatggagttagtctgtcaatatctgtttcttttaaaatttgcaattgtttttatttttagtgtcatgctatgtgcccttaatgatctagaattaagttctaatctctaccctggtataattgatttctccctgtggactcctaatataagaagaaagatgaagtttttcttttaatgcttttagagatcttcattaagtcatttaatattcttatttgctatttcccagtgtgatggttaagactgagtgtcaacttgattggattgaaggatacaaagtattaatcctgggtgtgtctgtgagggtgttaccaaaggagattaatatttgagtcagtgggctgtggaaggcacacccacccttaatctggtgggcacgatctagtcagctgccagcgaatataaggcaggcagaaaaacgtgaaaggggaaactggcctagcctcccagcctacatctttctaccatgctgaatgcttcctgcccttgagcattggactccaaaatattcagttttgggactcggactggctctccttgctgctcagcttgcagacagtctattgtgggaccttccgatcatgtaagttaatgcttaataaactcccctttatatatatcctattagttctgtccctctagagaaccctgactaatacacccagtgtgttcttttatcaaatagaaaggagatatagaaaacacactgtccatgtctttgattgttacaccacagcagagaatcaatttcttaacctgcttacttatttaccattctccaatggtgccaattctgagatccatcatgactttatcattagaaaaggggatgtaacaaacatgatgacatgttacgggaatactgcttactgcatgatatggtttggctgtgtcctcacccaaatctcatcctgaattttagcctcccatacttcccacgtgttgtgggagggacccggtgggaggtaattgactcatgggggtggtttctcccatactcttctcctggtagtgaataagtctcacaagatctgatggttttataaggggttttccctttcacttggctctcattctctcttgcctgctgccatgcaagacatccctttgctcctccttcatcttctgccatgattgtgaggcctccccagccatgtggaactgtaagtcctttaaacctcttttctttataaattgcccagtctcatgtatgtctttatcagcagcatgaaaacggactaatacactgcatgctcagtatactcaggcactctggaaactaggtttctacttcggacccctgagagaaaagggttatgtatctccaagtgtggtcatgacaagcatcactactgtgtgcagttgggcctgtggattgagccaccttagcctctgaggaaagcagaacctgagagcatgcttaattcagagtgtgtgtgacttggagtgtggaaaggaagatttccagatttgcggtattggcgactgaaaggatggcaatgctattgatggagattaggaagacaggagagaggtagatgttgagcaactccgaggagtttttcctcatacatgttgggtttaaagtgcagggaagatatcctgaaggttattccaggcagaaatttggagctcagaagagacatcagagctgaagataaaaaatttgagagccatctccgtagctaaaagtgtggaacgaatgtgatgactagacaagataatagagaaaaggtatccaaaggcctgaggtcaagacctcttaaaaggctgacttttcagggttttaggtagaaaaagagtcccagcctggggttaaggcagttttttgagaagtagaggtacaaagttccttgttccaaaggaagggtgtctttcaaaagaaaaaggatgggccgggtgcagtggcttacgcatgtaatctcagcactttgggaggccgaggctggcagatcacctgaggttgggagttcgagaccaacctgaccaacatggagaaaccctgtctctactaaaaataaaaattaaaaattagccgggcttggtggtgcatgcctgtaatcccagctactcaggaggctgaggcaggagaatcacttgaacctgggaggcagaggttgcagtgagccaagttctcaccattgcactccagcctgggcaacaagagtgaaactctgtctcaaaaaaaaaaaaaagagagaaaaagaaaaaggatggtgaattgggccaaataccagagagatggacaggagtaagaagaaaaagactaaagatttgttcatcaggagctcattgtttctaaagggagcatttttagtaaagaggaaggaggaataaaatgcagtataatatgttaaatctaagtataatttataaaagagaaaatgggggtggaatattacaaaaaaggaactataaaccagctctttgaggtatttgtcagtgaggaaaacagtggggctctagttcttgatagcaacagcatcaaagggaactttttaaactaaaatattatgaatttttcaaactgaaataatgagagaataatacaaagaaatctcatctgcccataatccaaattcagtagttattaaaattttgccccattgcttaatccattaatctcatttcattttgtcctttttctttgtttatttttggctaaaacattttaaagacaaatcctaaatatcatacatcagtaggcatttacaaaaaaatttcttgataatcacaatgccattctcataccaaataaacttataataattctgtgatatcatctaaaaaacagttcttttctacatcaaaaatgtctgtttatagttgatttattcaatttagagtccaaacaagttccatatattagacattaggtcattaatgtctgtctatttgaatttataacaatttccacttaatttattttctccagcttctgtggagactaggtaagttgttttgtagctgtctggatatatctgattgcttccttgcagtgtcatttaacttgttcctctatcctcagtgtttctgcacatggaagttagcctcatagcaggggttggcatactttagcctgcttaccaaatacgactcccttacatttttgtaaataaaatgttactggaacactgtcacatatgttggggtcatagaaagagtttccgtgtccccaagttataattgcattcacttatattttcttctagtaatttttacccttacatattaggggtcaatttggaatttctcttcatatacagtatgcaataaagaatggcttttatatttttccaaatgtatattcagttgtctcaacaccatttattaaaaagtcagtatttctcaagtgatttgagatctacccttaattacacagtaaatttctctgtagtcttgtctttttctaatatgttaattctgtaccaagatttgttcatctgttaatggatcaatatcacatagctttgtttatagaaggtgcacattgttttaattctggccatgctatcccaccaaatattgccctttgatttttcagagttttactgtggattcttccttgtttctttttctatgtgacctttagaattaacttgtttaattctataagtaaatttattgataattttattgaaattatgtaaaatataaattggcttaggaagtactgatatctccatgacattaagtcttcatatctaagaccaaggggtgccttttcatttgttaaatattctttgtgtctttcagaagtgttttcaagtatccttatgtgtattttgcacaaatttttatatttgtgcctattggatgccacgtgcagggttaaaaaatattatacctattttatatagatatatatgtatataaaaatatatattatatatagttataatacataaatatattttaatatattatataatatatacatgtattgtatttatatatgtatttatatgtgtatctataaatatacatatgtatgtatctataaatatacatatatgtgtacatatacacatatatacacattatatgtatgtttatacacatataaatacatatataaatatactagaaagtccatggggtttcctagtatacaatcatattgtctgcaaatagagattgttataccttttcctttctattccaaagtgtctaaaagattttttcttagctagtggcattggatgacacctataatgtcttctaaaaatagtagcagtcataggcaccatttccttattcttgaatattcattcatgttacaaagtttataggaatttctgaattattaagtacttttaataggaatgaaggttattgtcattattgcatcaaaattcataagaaagtttggtgtcaaatttgtgctttgtgtgtagtcttcatcacgcttttttttttttttttaaccagtgttaaacatccattacaaaaatagtttggaagtttttctttttttttttcctatgtcctggaaggtgtaagtagaattggaattatttgatctttaagatgtaaaatattggtagaattctacctttgaaagcacctggacatggtgacttcttaataggtgagctctctggaaactttatttcttctgtagtaattggtctccttagactttctattccttctggagtcagatattgtatatcaaatcttctgttaaagttatccatttcttcttggtattccaatttttcacattgagttggacaaatgatttctgatgatgtttaaaaaatttctctggtttgatggttactttgaccgtataatttattttgtgtatttatgcttcttttagaaacttaggtcagctagtggttcctctattttgttgatttttttcctcaaagaactagcttaagtttattttattagttctactagttttctgctttctaactcattaagttatgcctttagctttattaaatccttcattctgctatcagttaatgttttagttcattttctagctttttgagttgatacttaatttattttcatttcatgatataggtaactgatgctcagaattttctcaaagcatcagttttcgctgggccccatagattctaatatatcttactttcattattattatttcctaaaaattcagcaatttcatgttttattttgtctctcattcaagagttgtttaatagacagtttaatttccaggttggatgggcattttgttttgttttttgttttactgtttataaatacttttggccttgggatcagagaatactgcttgtattacaattattactgaatatttttgtggtctaatataatttcagctttcaaaaatgttccatgtatacttgaaatgaaggtttatttacccttataaagatagaaggtaaaatattagctatgcccatgtctatttatcttcttataatttttgcttaatgaaaactaatgatccattatctgctgcataagtatttatgtttgctttctctttattatgccttatggcttttgtgttaaaaagctattgatttatttaatattttggaaggattgaattttaccctatctaatatcaagatcatgactcttgattcctttttgttttcacttgtttaatatatctttcttctatctttattttaaacacaagaagagctttgctttcagtttctattttacatagtctacaatcggattttacttattagtcaatctgagaatacttttaatagatgagttacacaaatacatatttattgataccaacacagtttaattcaagatctgttctattattttatatttattatatattaaattgtcttctttatttactatttattgatttattgaatttattttgctttcaggtattttgtatttttgttctggttgttagatttatgcatacttagtcaactcttcctttataaagcattcattttctactatgagcagtagtaaaattagctagtaacttaattcctgagcactctccagtcctagtcactagtaataacgcagtgttaaactttgtaatattaattatacttaagcctctattacttggtttgtcaaaatcaaatgatatcaatttacttccagcacatacctatgaggtaattgtaagctaataataacttccatggctattcttttctctttttttttttttgaggtggagtttcgctcttgttgcccaggttggagtgcaatggcacgatctcggctcactgcaacttctgcctcccgggttccagcgattctcctgcctcagcctcccaagtacctgggattacaggcatcagccaccccacctggctaattttgtatttttagtagagacagggtttccccatgttggccaggctggtcacgaattcctgacctcaagtgatccaccccatcagtctcccacagtgctgggattacaggtgtaagccaccgcacccagcctctcatcttatttttattacttatatttttctacattattagaagttataatacttatatgcacatttctttagccccaaccccattttttgatattagctctattattaagatatttaatgtccaccttcagattatatgctgatgattctctaatcgtttttggttgtctggagcttttttactgtttattttcaggaagagctcatgataactcttttttctttggtttaaaaatgtttataattatttttctctggactttatgctgagaaatttggctgcatacaaaatctctggcttacattttttctcaagtatttttaagtgattgcttcattattttgtagtataaaatgttgctcacaagaagctggatgccagtctgattttctttccctcattagtgatttggactttttgtctgaatgttgaatttttaaatataaacataaattgcaatacttttattaagatatgtctctgcattgaacattttaggtccgttttcctaggtacatagaatgtcttttgaatatgtagactcaaatcagacttcttgattctcttgatttatagttttaaatatttgtttgggggcgggtgcggtggctcatgcctgtaatcccagcactttgggaggccgaggcgggtagatcataaggttagcagattgagaccatcctggataacatggtgaaaccccgtctctactaaaaatacaaaaaatatagccaggtgtggtggcaggcacctgtagtcccagctactcgggaggctgaggcaggagaatggcctgaatccgggaggcagagcttgcagtgagccaagatcacgccattgcactccagccttggcgacagagtgagactttgtctcaaaaaaaaataaatagggggcggttccaagatggcagaataggaacagctccagtctgcagctcccagcatgagtgatgcagaagacaaatgatttttgcatttccaaatgaggtaccaggttcatctcactggggactattggacagtgggtgcaggacagtgggtgcagcgcaccaagcatgagccgaagcagagcgaggcatcgcctcacctgggaagtgcaaggggtcagggaattccctttcctagccaaggaaaggggtgacagacggcacctggaaaatcgggtcactcccaccctaatactgggcttttccgatggtcttagcaaacggcacaccaggagattatatcctgtgcctggctcagagggtcctacacccacagagcctcgctcattgctagcacagcagtctgagatcaaactgcaaggtggaagcgaggctaggggacgggcgcctgccattgctgaggcttgagtaggtaaacaaagtggctgggaagctggaactgggtggagcccaccgcagctcaaggaggcctgcctgtctctgtagactccacctctgggggcagggcatagccaaacagaaggcagcagaaacctctgcagactgaaatgtccctgtctgacagctttgaagacagtagtggttctcccagcatgcagcttgagatctgagaacgggcagactgcctcctcaagtgggtccctgacccccgagtagcctaactgggcacaccccagtaggggcagactgacacctcacatggccgggtactcctctgagacaaaacctccagaggaacgatcaggcagcaacatttgctgttcaccaatatccgctgttctgcagcctccgctgctgatacccaggcaaacagggtctggagtggacctccagcaaactctgacagacctgcagctgagggtcctgactgttagaaggaaaactaacaaacagaaaggacatccacaccaaaatcccatctgtacgtcaccatcatcaaagaccaaaggtagataaatccacaaagatggggaaaaaacagagtagaaaaacagaaagttctaaaaatcagagcacctctcctcctccaaaggaacgcagctcctcaccagcaacggaacaaagctggatggagaatgactttgactaattgagaaaagaaggcttcagacgatgaaaattttctgaactaaaggaggaagttcgaacccacggcaaagaagttaaaaaccttgaaaaaagattagacgaatggctacctagaataaccaatgcacagaagtccttaaaggacctgatggagctgacaaccaaggcacaagaactatgtgacgaatgcacaagcttcagtagctgattcaatcaactggaagaaaggttatcagtgatggaagatcaaatgaatgaaatgaagtgagaagagaagtttagagaaagaagaataaaaagaaatgaacaaagcctccaagaaatatgggactatgtgaaaagaccaaatctacgtctgattggtgtacctgaaagtgatggggagaatggaaccaagttggaaaacactctgcaggatattatccaggagaacttccccaatctagcaaggcaggccaacattcacattcaggaaatacagagaacaccacaaagatactccttgagaagagcaactccaagacacataattgacagattcaccaaagttgaaatgaaggaaaaaatgttaagggcagccagagagaaagattgggttacccacaaagggaagcccatcagactaacagcggatctcttggcagaaactctacaagccagaagagagtgggggccgatattacacattcttaaagaaaagaattttcaacccagaatctcatatccagccaaactaagcttcataagtgaaggagaaataaaatactttacagacaagcaaatgctgagagattttgtcaccaccaggcctgccctacaagagctcctgaaggaagcactaaacacggaaaggaacaactagtaccagccactgcaaaaacatgcaaattggaaagaccatcgaggctaggaagaaactgcaactaacaagcaaaataagcagctaacatcataatgacaggatcaaattcacacataacaatattaaccttaaatgtaaatgggctaaatgcttcaattaaaagacacagactggcaaattggataaagagtcaagacccatcagcgtgctgtattcaggaaacccatctcacgtgcagagacacacataggctcaaaataaagggatggaggaaaatctaccaagcaaatggaaaacaaaaaaaggcaggggttgcaatcctagtctctgttaaaacagactttaaaccaacaaagatcaaaagagacaaagaaggccattacataatagtaaagggatcaattcaacaagaagagctaactatcctaaatatatatgcacccaatacaggagcacccagattcataaagcaagtccttagtgacctacaaagagacttagactcccacacaataataatgggagactttaacatcccactgtcaacattagacagatcaacgagacagaaaattaacaaggatatccaggaactgaactcagctctgcaccaagcagacctaatagacatctacagaactctccaccccaaatcaacagattatacattcttctcagcaccacgccggacttaatccaaaattgaccacatagttggaagtaaaacactcctcagcaaatgtaaaagaacagaaattataacaaactatctctcagaccacagtgcaatcaaactagaactcaggattaagaaactcactcaaaaccgctcaactacatggaaactgaacaacctgctcctgaatgactactgggtacataacgaaatgaaggcagaaataaagatgttctttgaaaccaatgagaacaaagacacaacataccagaatctctgggacacattcaaagcagtgtgtagagggaactttatagcactaaatgcccgcaagagaaagcaggaaagatctaaaattgacaccctaacatcacaattaaaagaactagagaagcaagagcaaacacgttcaaaagctagcagaagacaagaaataactaagatcagagcagaactgaaggagatagagacacaaaaaacccttcaaaaaatcaatgaatctaggagctggttttttgaaaagatcaataaaactgatagactgctagcatgactaataaagaagaaaagagagaagaatcaaatagatgcaataaaaaatgataaaggggatatcaccactgatcccacagaaatacaaactaccatcagagaatactataaacacctctacacaaataaactagaacatctagaagaaatggataaattcctcgacacatacaccctcccaagactaaaccaggaagaagctgaatctctgaatagaccaataataggctctgaagttgaggcaataattaatagcttaccaatcaaaaaaaagtccaggaccagacggattcacagctgaattctaccagaggtacaaggaggagctggtaccattccttcggaaactattccaatcaatagaaaaagagggaatcctccctaactcattttatgaggccagcatcatcctgataccaaagcctggcagagacacaacaaaaaaagagaattttagaccaatatccctgatgaacattgatgcaaaaatcctgagtaaaatactggcaaaccgaatccagcagcacatcaaaaagcttatccaccatggtcaagtgggcttcatccctgggatgcaaggctggttcaacatatgcaagtcaataaacataatccagcatataaacagaaccaatgacaaaaaccacatgattatctcaatagatgcagaaaaggcctttgacaaaattcaacaacccttcatgctaaaaactctcaataaattaggtattgatgggacctatctcaaaataataagagctatctatgacaaacccacagccaatatcatactgaatggacaaaacctgggagcattccctttgaaaactggcacaagacagggatgccctctctcaccactcctattcaacatagtgttggaagttctggttagggcaatcaggcaggagaaggaaataaagggtattcaattaggaaaagaggaagtcaaattgtccctgtttgcagatgacatgattgtatatctagaaaactccatcgtctcagcgcaaaatctccttaagctgataagcagcttcagcaaagtctcaggatacaaaatcaatgtgcaaaaatcacaggcattcttatacaccaataacagacaaacggagagccaaatcatgagtgaacttccattcacaattgcttcaaaggaataaaatacctaagaatccaacttacaagggatgtgaaggacctcttcaaggagaactacaaaccactgctcaacaaaataaaagaagatacaaacaaatgcaagaacattccatgcttatgggtaggaagaatcaatatcatgaaaatggccatactgcccaaggtaatttatagattcaatgctatccccatcaagctaccaatgactttcttcacagaattggaaaaaactactttaaagttcatatggaaccaaaaaagagcccgcattgccaagtcaatcataagccaaaagaacaaagctggaggcatcatgctacctgacttcaaactatactacaaggccacagtaacgaaaacagcatggtactggtaccaaaacagagatatagaccaatggaacagaacagagccctcagaaataatgccatgtatctacaactgtctgatctttgacaaacctgagaaaaacaagaaatggggaaaggattccctatttaataaatggtgctgggaaaactggctagccatatgtagaaagctgaaactggatcccttccttacaccttatacaaaaattaattcaagatggattaaagacttaaatgttagatcgaaaaccataaaaaccctagaagaaaacctaggcaataccattcaggacataggcatgggcaaggacttcatgtctaaaacaccaaaagcaatggcaacaaaagccaaaattgacaaatgggatctaattaaactaaagagcttctgcacagcaaaagagaaactaccatcagagtgaacaggcaacctacagaatgggagaaaatctttgcaatctactcatttgacaaagggctaatatccagaatctacaatgaactcaaacaaatttacaagaaaaaaacaaacaacaccatcaacaaatgggcgaaggatatgaacagacacttctcaaaagaagacatttatgcagccaacagacacatgaaaaaatgctcatcatcactggccatcagagaaatgcaaatcaaaaccacaatgagataccatctcacaccagttagaatggtgattattaagaagtcagggaaaaacaggtgctggagaggatgtggagaaataggaagacttttacactgttggtgggactgtaaactagttcaaccattgtggaattcagtgtggcgattcctcagggatctagaactagaaataccatttgacccagccatcccattactgggtatatacccaaaggattataaatcatgctgctataaagacacatgcacacgtatgtttattgcagcactattcacaatagcaaagacttggaaccaacccaaatgtccaacaatgatctggattaagaaaatgtggcacatatataccatggaatactatgcagccataaaaaaggatgagttcatgtcctttgtaaggacatggatgaaactggaaaccatcattgtgagcgaactatcacaaggacaaaaaaccaaacaccacatgttctcactcataggtgggagttgaacaatgagaacacgtggacacaggaaggggaacatcacacaccggggccttttgtgtggttggggaggggggagggatgcattaggagatacacctaatgtaaatgacgagttaatgggtgcagcacaccaacatggcacatgtatgcatatgtaacaaacctgcccattgtgcacatgtaccctaaaacttaaagtacaataaaaataaataaataaataaataaatactagtttggctgcattgctttgattttcttctttaggggcctgttcatacatacaaaggataccatttacctgtcttctatatgactttctcttaaatcctttcattcttttgttttaatttttatcttcacatcctttatttctgtcactgtgctgtccatagagtttgtctgctgtgtgtccttataattaagtctatgttctgaatgtttttccttttttagaaattcagttctaaagtgtttaatttctcgtatttttttttctgttgcctcaccatatcatttctgagttttctgtttctgaaatgtgcaactaactctttcaaagcattgaccagattcttcagtctttttaattcattctgaaataactgggctacagtttcatctgctttgtggacagaagtgccacaaagagccgaattgtcagtgcagacccacatgaatcatagatcttaacgaagtttttactaacgactagcaaaggatacaagctaaaaatgggtacaagcaaacacagcatcattcatcactgtaaagactctgaactatcacatggaacttcaaaaggattcttcttctttgctgcaatgtgttttgatttttggagtgatagatgtttgctaactacgcacgtgacaaaaatttgcttagaggaagccatgttagttttgatgctactcaactttgtattttgttagtcatgagatagaaagcctgtgagattacatgcccttcttttagcagctgcatcccataaaattaaaaattccagttttttttaaaccatgaacaatttagtcagacttaatatatcctatttaaaacattcttagataagaacttcctttgttattttgctaatatacaatcccaccaaatgtctacaagaagggctagttaatcaatataccaaagatcaaatctatttatatgaaccacaaatacaaaacataattatacatatataattttatataatttaatttataattatatacattttatagcagcaatcaaaactatcatgtattttgggatgaatttaataaagaaatagcaggagctctgtagaaacaagtatgaacttctattggaagacagtaatatcataaaacattaaaaagaaagctataccatgtttatggttaggaagattcactattgaaaatacatcaattcttgacaaatcggtctataaattcagtgcgtgtccaatcaatatatttagctcatttaaaatgtatatggaaaaggctaagtaccaaagataatcaaatgctcttggaagatgaaaattaaagttgagagatggggtaaaaaactataattcagttctaaagtcataaagctataataattaatacagtatggcattggcatagaaataagcacattgactaaataaatagaaaatacagttcagaaaccaaactctacatttatgaaaaactgacctatatcagaacgagcattgagactacaggagaacagaggaactagtaagttaatggtcctgacacaattgatatctacatagaaaaaaaaacttaatccttctttactctatgtaaaaacaataattccagatgaatgtaggacttaatggagagccaaaactaaaacttttataggaaaacatagaaaaatacctatctcagggtcgggaattaggtcttcaacatggcaccaaaagtactaaccataaaagaaacattaataaagtcaacctttttaaaatcaacaactttaattaaaaaaccagggccaggcacggtggctcacgcctgtaatcccaggaggccaaggcaggcagatcacgaggtcaggagatcgagaccagcctggccaacatggcaaaacctcgtctctactaaaaatataaaaattagctgggcgtggtggcgggtgcctgtagtcccagctacttgggaggctgaggcaggagaatggtgtgaacctgggaggcggagcttgcagtgagctgaaatcgtgccactgcactccagcctgggcaacagtgcgagactccatctcaaaaaacaaaaacaaaaacaaaatcaaaacaaaaaacaaaacacaggttgctggaaaaatggttacttatttttattatgctttataaaatatacagttatattatcaaacttcttttgtaagaatcaaatattatgctgagaatatggcaagaaaaaagaaaacaacctccaccactcataatggcattccctttacccaccatcaactaagtcaggaacctgcgtcactttcaagttttctgaaatgtggactgaaaatacttgtggagggccctcacagatgcatttagaaatggtatgttctggaaaatggaactgaaatgttttagcgagagtcatgggcccaaaccttgaaatagaggttggtggagttttctatagtatgtaattacaacacaataagactcaaaagcatttcaataaagtgtggatggaagacaagatactgcttcaagggcttcattagctttctgcagactggagctctccaaggcatggggaggaaccctgtttacctttggttcagaatcagttttaaccatcattgagggctaggtcagagtgcagcattaagtccttgggaatacactgggtggggaaagaaaagagagcaatgtttttctaaaagcccagaaatgggcttactgtgtttaccagttgtttccaggataatgtattgcagtgccaattgctgatgagatggtaggattatacttcagtccctgctttacatttatttcttaaagaagcttctggtaaattagagcaatagcatcggcttagtttagtgttgttctgttggactaaggatatcagttctatccgtatggtcgggcctaaagcctgggaaatatttaatgaagggagagagggggagagagtgagcatgcaaaagagagagagaaaaacaaataacaaaacaaaaaccaagacatttccctttatagtaagaatgatgaggaaaacatgtttagccatacaagatatcaagataatctcttatttctttcttgaaaatgcaagtacaaatgcctgcaaagataaaatatcctctggatggagtggaaaggttcaccaggcctctgaaatcacgtgaatgatgttgcgctttgctgttaatgaagctcggtgcatttttcatttcagtttctactaagcatttatgagctattacccttcccttccctaaactgcgttgttttttaaaaagccttagaggcattccttctagaaaataaaggtaagtgttaagtggtgataatttggtaataggtgtcatgcttgtggttcataatgtgttaccctacacattttctcaattatccctagaacagctttttgaggatatgaagttagaccttacaaagcacatctttctgctggaaaaatgaggtttatagtggttaagtttagttgcttatgatcacaaggctagagagtggccggaatcaagactcttcaccctgatttcagtgctttttcactccaccattaatatttattgttgataaataatatcaacactttcctaggtgtattagggtcatctagagggacaggactaataggatagatgtatatatgaaaaggagtttattaaggagtattgactcacaccatcacaaggtgacgtcccacaataggccatctgcaagctgaggggcaaggaagccagtctgagtcccaaaacctcaaaaatagggaagctgacagtgcagccttcagtctgtggccaaaggcccaagagcccctggcaaaccactagtgtaggtccaagagtccaaaagctaaaggattggagtccaatgtttgagggcaggaagcatccgtcatgggagaaagatggaagccagaagacagccagtctagtccttccacgttcctctgcctgcttttatcctagccacgctggcatgatgatgacatggtgcccgcccagattgaggatgggtctccatcttccagttcactgacacaaatgttaatcttctttggtaataccctcacagacacacccaaggacagcactttgcatccttcaatacaatcaagttggcactcagtaataaccatcacaagtccacaccttgtcaacttgatcccacatacatctccttaaatcatacataatctccaaatacagacaataatgtcataattacactgaacataatacaactatcgttcatacaaccagaaatgcaccaattcccaaaccaaatgttattacataaagttaacaacacttaaatgctgatatgaagtcaataaatactttttttttttaaaagatggagtcttgctttgttgcccaggctggaatgcagtggtgcgatattggctcactgcaacctccgcctcctgggttcaagcaattctctgcctcagcctcccgagtagctgggattacaggcacccaccgccacacctggctaatttttgtatttttagtaaagacggggttttgccatcctggccaggctggtcttgaactcctgacctcgtgatccacccacctcggcctcccaaagtggtggatcccaaagtgatccacccaccttgacctcccaggttgtaagccactaaatcttatgtcacatgatacaggaaaaagaaaggaagtaaaatgaagatattgtcttagtacaagtgtatacaggcagaaagatgttcttaacaaaataaggaggaaatactcatgacaattacagtaacctggttgctgcaactcatcacatggtcgtagctgttattgatgactaccttcttctacaacccattctgttttccctttgcctctagcaagtacctcagcaggtcatggttctttacctggtggagtgtcccaaaccttcattcctgaagggtctgggccatttgtagtcctgcctggatcgagttgttgtcattttttattgaccttaatcacagggcttggtaatactaagagacaccctaaggaatttcctgtattccacacatgttcttccttaccttcattatggagtagtagactgagttcatcttgataggctaagtcagtcaccccagccaacactaactcctttcttagcctgttgacttagaggtaggaggagcccgagattgcaatcttaatttccagtttaatgaaatcattattgtgtctcctggtggcaacattcatcgccctggaactgagacttctaggccagcagaacgtaatgctgtggaacaagaagcacaaattttactagcgggtctctaggggtgatggtgagtggtgccacttccatttccaccccttgattcctggacccatgaatcctggctatgggagaaacagtaccaaatactggacactgatccggagcatacacagccttctggaaaactttgccccagccctgcaaagtattgtcgcctagttggcattgtaattgtgacttcaaaaggccattccaccgttctatcaatccggctgcttcaggatgatggggaacagggtaagaccagtgaattccatgagcatgagcccactgctgcacttctttagccataaagtgagtgccttgttcagaggcaatgctgtgtgtaatgccatgacagtgggtaaagcattccataagtccatggatggtagtcttggcagaagcattgcctgcaggataggcaaacccatatctagagtaagtgcccattccagtgaagacaaaccactgttctttctgtgatggaagaggttcagtataatcaacctgccaccaagtagctggctgatcaccccgaggaatggtgccatatcgcggcctcagtgtttgtctctgctgctggcaaattgggcactcagttgtggctgtagccaggtcagccttggtacgtggaagtccatgttgctgagcccgtgcgtaacctccatccctgccaccacagccactttgttcatgggcctattgggcgatgacaatggtggctggggaaagaggctgagtggtatccacagaacgagtcatccaatccacttgattattaaaatcctcctctgctgaggtcatcttttggtgagcactcacatgagatacaaatatcttcacagtttttgaccactcagagaggtccatccatccacatacctcttccccaaatttcattgtcatcagttttccaatcatgcttctttcaagtccctgaccatccagccaaaccattggctacctcccatgaatcagtatataatcacacatcttgccatttctccttctaagcaaagtgcacagccaggggcactgctcaaagttctgtgcattgggaagatttcccttcactgctgcccttcagggatgtcctagaaaggggctgtagtgctgcagctgtccacttttgggtggtgactgcatcatgcagagccatctgtaaaccaggcccttgtcttctcttcctctgtcagcttatcatagggaactccccatgaggccatcagtgcaggctgggggagagaaggcagggtggcaggagtggggaccatgggcatttgagctacttcctcatgtaaagtacttgttccctcaggacttgcttgagcctgatcatgtatataccacttccatttgatgatggaatgctgctgtgcacaacccactttatggctagatgggtcaaaaagcatctagttcatgataggcaatttaggtagcttggtgatttgatgacctgtagtcaaacatacagtttctaccaaagcacagtaacaggccaagagttgtctctcacaaggagagtagttatctgcaggagatgcagggccttgctccaaattcctagaggcctcccctgtgattgacctataggggcctgccaagggctccaaacaacatccctatctgccattgacacttcaagcaccattggatctgccaggtcatatggcccaagtggcagagcagcttgccaagcattctggacctgttgcagagccttctcttctggatcccactcaaaactggaagcctttcaggtcacttgataaatgggctggagtaacacacccaaatgaggaatgtgttgcctccaaaatccaaataggcctgctaggcattgtgcctctttcttagttgtaggaggggccaaaggcagcaacttatccttcatcttagaaggaatatcttgacagaccccacaccactggacccctagaagttttactgaggtagaagttccctaaattttagtcaattttatttcccaacctctggcacacaagtgtctcaccaataaatccagtatgtttgctacttcttgctcattggatccaatcagcataatgtcatgaatataatggaccagtgtgatatcttgtggaagagaaaaactatcaagatctctccaacaagattatgacacaaagctggagaatcgatatacccctgaggtaggacagtaaaggtatattgctggccttgccagctgaaggcaaattgcttctgctgggccttatggacaggaatggagaaaaagccatttgccaaatcaatggttgcataccaggtaccaggagatgtgttaatttgctcaagtaatgaacccatatctggtccagcagctgcaattggagtcaccgcttagttaagcttacaataatccactgtcattttacaagatccatctgtcttctgcacaggccaaacaggaaagttgaacggggatgtggtgggaatcgccacccctgcatctttgaagtccttgatggtggcactaacttcctccagggatgcaatgttgtgtttgatttactatttttctaggtagaggcagctgtaatggcttccatttggcctttcccaccataatagccctcaccctaccagtcagggagccaatgtgggggttctgccagctgctaaatatgtctatgccaattatgcattctggcactagggaaatgaccacaggatgagtctgggacccaccagccccactgtaagttggacctgagctaaaattccattaattaactgatctccaaaagcccctactttaactggaggaccacgtgatgttttgggtcccctggaatcaacgtcagctcagagccagtgtccagttgtccctgaaatgtctgattatttccctttccccagtgcacagttaccctggtaaaaggccagaggtctcctgggggaaggatgggagaaagagtcactgcataaattgtcagcaatgtagtggggtccttcctcaaggggacccagcctccccttcattcaaggggttctgggtctataaactggttcaagtctgcaaattgattgaggggccgtgattctttgtataatttttaatttaaattagtcttttgtctacttgacctggaagttttctgcttatataaattaagcaagaatgcagtaggcttcttgtcaatttcactttttaggaacactgagattaagtagccaatgccagagctctacacaagtcagactattctgattgttgccttgcctccgctgacctttacggtaattgcacccaccttgccttgatgcttgagtgccaccacttggcccatgccacctcaggatccaattattaccattgtatttaaattttgtagttgaatgactgtggttcccactataatatctagcatgcagagaagagcaatcacagagctcttcaaggatgcaggtgctgccctcacaaatctatttcacaatgtgctggtcaaaggtatatcttctgtactctcccagctgggatgagtaggactaaagtgacgaattcactccaccatcccagtctccataagcctttggatcccttcctctacattaaaccaagggagatcaggcatttccagctcactcacagtgggccaccttttgatctatatttcagctaaccaagcaaataaactattagaaccttttttaactctccaagctgcaacattaaatgcagaattcctgcttagtgggcccaaatcaatcaattcagcctgatccaactttatgttccttctaccattagcccacacccttaatatccattcccatgcctgttctccagatttctgcttatataaattagaaaactcaagcagttcttttggagtgtagcgcacctccttgtgggtcacattctgaacctcatctctaaggggcctgccgggactttagtctagttctataactataagcaaacaggggtattgagggtgggtccttaggagaatcaacatcgtctttcctggcaactgcctcaagggaggtcatcgctgatgccttaggcagtgcagggttaaactcctcagacaaaggtgaaaagcctgatggcagcgcaggtggaggaggggatgttgcctcccctctgttgcctgtttcctctggtaaaaaagattcatcagaatttagaagctcagtgcccccagccttatcagggtcctcccgcatggccccattccaagttgcagggtaccattctttttcaatcaatgctgtcactttaacagtaaacacctggcaaggctgtgcacgtacctttcgttgcaggtcagccactcacatgataagagcttgtgtctgattttccgcaatttcagctctttctctacaggagataagactcgaacccagggcaatcttagaagatttgaggctcagaatgtggttctggagctgggagatagaatccctgagttcatcatttttttgttttcatcactttgattagtgaacttaggagcaaccaactagcttcattatattccttggttctccacatatggttaaaggtattaggtataaagtcactaaactccttgcctctcatgagcagtgaatcaggagtatcagatgcatttattttgcataactctctacacagttcacagcaaggactatcagtgttctccacactattagaagtagagtccctagcattttggcgtctaatcatatttagcagccaactccagaaaccccaaaaccatctaaagaaatccatccgtaaaattctgttcctctagaaccactcctggtaccaaaatctgtattagtcaggattcgctagagggacaggactcacaggtgagatgtatatataaaaggcagtttattaaggagaattgactcacacaatcacaaggtgaagtcccacaatagtctgcaagctgaggagcaaggaagccagtccaagtcccaaaacctcaaaactagggaagccgacagtgcggccttcagtctggctgacagcctgagggcccctggcaaaccactggtgtaggtctaagagttcaaaagctgaagaacttgtagtccaatgttcgaggccaggaagcatccagcacaggagaaagatggaagccggaagacttagccagtctagtccttccgtgttcctctgcctgtttttgtcctagccatgctggcagctgattagatggtgcccacccagattgaggatgggtctccatcttccagtccactgactcaaatgttaatctcctttgacaacaccctcacagactcactcaggaacaatactttgcatccttcaattcaatcacattgacactcagtattaaccatcaccctaggctttagggatatagggaaaaacatgactcattgctgttatctgagagtacataatctattggaagaaaggaaaacagttacatgtaaggcttatatcagtataaattagataactgccaagtgagagaggtagaggtagcaagtgctgtctgtgggtgcatgttaactcagtcttaatcttggaagaagtggcagtgtggaatggtacatggagaagcagaagggacaattactgtgagcagatgaatggctcactacaggggcatgggaagaagatgcaagagcagtggaatctttaattgacgaacctggtaccaagctgccaagtcttagtctcaggactggcaccgtgcacttggccattgaaaagactttggaacctgtggagtgaagagttgtaggaattttcaaagcctcagtgtaggaacaatgtgagaatcaaccagggcatggtactccacactgtgttcagatccactggtgttaggggagtcccagagaggcctcttagagggttgaggaggatgggatcaggcatagcagagactagggacacgaggctctgcggccagactgcaggtctgctaccaactacagtgtgattttgcctagtcacataatctctgtgggcctcagttttttgttttttgtttttttctattacaacagtacctttctcgtggagttgtagtgattagatatctagtaccaagactatgcttgttagcactgagtaagaactcaatgaaggttagctttcattggtactatattactattgttagtgttggtggtggagctgaatcgcctaacctatgaggttggtgctgaaatgaagaaaagaataacagtgttttaagaagtttggtcactagaagtggagcttagtaattaaagaaaaagagtgaacacttttaccttcttgtggaagttagtaagtctacaaaatgttaattctgcatttgaatgatcatttgggagactcttattgtcctatttgcactgaaaaagtcactgaatcattattttagaactggaataacacctgagatctaggccagcactttgcaagttgtgctctatgggacttttcatggaagtggctgaggagttgccttgaaggaaggcagagggagtgggtcttgggacacccttccagttataaaacaggacgttgattctgttttgtagttgcagcatcacatataatttcatttattaagaggatcccacttctaaaaataagttgaaaaccagtgatttaatccagcctctctgtttgcatatgaggaaatggaattccggaaaggttaggtgatttgtccaaggttgcagactagactatttattaatagagtagggtcaggaacaaaagcctgctccttgctggtccagcgcctgttactagttacataatgaatgctacctattgctgcacagtgccaaatcattgcacttttcagattttactctaatcaaaagaaaaaaattaaagtgcacttccaaatcagtacttatatgcaagagcttcaagaaacaaactagtatttaacttggtggttacatattgactgtattttcattgagtgaggttagaagagattgagaagcgtgaaatgaagttacaaagtagaaactatatggtgaactcaaggcaaagattgtccatagtaaaagaagacaaaataagaatgaaagagacaaaagaattgccaatgagttgtaatcttaaaagaaagatatatttaataaaataggattgattgttttgaatgtgggctgagaagtcctgccatcttccattgactctgctcacaggccttgtttgtgaactggcttccatggatagcattactctcctgacagctgcagctccaaattcagcatgaaaaggctggcaattctaagaggaagggagggtttaggccacttttaattctactttgtcattgcaagtttcttgcattgtttggcatttgttggtcttccttactggatttcaaaactagaacactttttcctagccttggaaccaaccacgaaaataaccacctcttaccctcatgaagaacactttaagtttttctcttttaaaaatgaagtctggaatatctccaaacatcttgtcactcacgccttcatttaaatgtcaccctctcaaccacaaggaaactaaaattgccccctacttgctactccctgttttattttctagtagaacatactacagttggagatcatctcatccatgtcttttattcttgtctcttatttgcctctgcttgactgtaagctcatggaaagtaagggaccttcaccaactagcaaagtgcttaggacctagtaagaacctggtcaattctaactgagtgaatgactgaattcctgtgagaagtcaacatgaaaattcctaggtcattagtttagttattggaactccaacactgtattggaaaagtgtcatggaaaggatagttagtggattaaggttttttataagaggaagagggaaagaaaggcattgtctttacttcaggcatttcaatggccatgatggagcctaaatattgtatgttgcattttgttttggttttgtgtgcacaagagctttgccagtggaatgaacgggttaagaaatgtgagttttcttttcgtcctgctatagagacttaaggaattgccccgtgtgagttccttgagggcagagaaaaatacaaatccatgaatacctgaaagccctgatttggcccctaagcaatctatgcatgtaacaacattgcatttgtaccctgtacatttataaacattttaagaaaagtataagagaaacacaaattttggttactcctctctgaaaactgctctgatgtcgcttggccgggggaattaagacctcttcctgtggcctgtggccactatgtgctcccggctctccaggctcatccagggccactgtgcctggggtcacagggttccaggatgtcaaccttctttcagcttctctgactcctcaagcatttttttttttttttttttttttttggcttccaagacccaaacgcatgtctctcttcttggcacactcttcccaacttttttcctggctaattgctagttatttagtttgagattaaatgtcactccctcggcctggcgcggtggctcacgcctgtaatcccagcactttcggacgccgaggcaggtggatcacgaggtcaagagatcgagaccatcctggccaacatggtgaaaccccgtctctattaaaaatacaaaaaaatttagccaggcgtggtggcatgtgcctgaagtcccagttactcgggaggctgaggcaggggaattgcttgaggaggatattgcagtgagctggatcgcacctctgcactccagcctggagacaaagtgtgacaccatctcaaaaaaaaaaaaaaaaaaaaaagtcactcactcacagagggcttctcagatactcccctgccccctcatttaagttgcaccgcttgttgtattctcttataagccccattctttttcttcttggcattgatcaaattaacagctttattttattttagcattgtgagtgtatatgtgtgtttaatgtctgcttcctgactaaactgtaccctgcaggaaggcaaaactgtgtctgtgttgctcattgttaaaccttcagcactgaactcagtgcctcgaacataggagattccaactcaatatttactgcgtgaaggaatgaatgaatctttatgtccctcgtgcctaacataaagtctgccatatacaatggactaaaaaatagtattcagctaaaactgagttacggagaagatgaagtattaattgtattttttacagagaaacaatggtcagtgtatcaaaaatagagaccctgctctcagatatataacatagaactctcttcattcatttgccttcattttagttaacagaatctgttcatctaagtagagcagagaaaaacttcataattgctgtgtctgtgttattccaaaacatttaaacaaaaggtgaataactgaggtattcttccctgtggtacatacttgatgtgggcattttaaaagattgatcaaatctcctttcagctggatatttgagtaggcacaaccattacagaattttcctctagggacttactttagctcttaaactatgtaaactgaacaagcaaactcaagtggatcattatctatagaagtatagaattccatctccctttggcaaaccattcaaacccagaagtgtgttttacacattctgacagaagcatctgtaataaccaactctaacctcctttcttaccactttagcacccaaaagtataagaaaagaggacatgttaaggcttgttctatttattagaaaatatataaagagttcttggcttaagaactcttctggctatcagctccctgatgtgaaaaaagtaaatagcaaggggtagcatggagtcttactcccgtgtgacagacagcttaagaaagacaattggacatcatgtgactacatgattcaagctaaagtccagacacatcttttccataggccaattgaacattttctctgtaatttccacaataaccatttgcaccagcatgaatggagagggtctgagttcttctgggtgagtaaagggtgtgtcagttatctgtcctctgtcaccaggatttagaggcaggctcatagtgactcttgtaaagttgaggttcgcctgtggaggctgcaaaaaagagggaggaagagagagtgaggttcctcttggctctgtgccagggatgtgattagaggaccctgggagggccttcatcctacgaggggttggaagtggaaatggatgtgtgtggatgacctggtaacgtgtcacagccccttccaccccatagtagtcagggatttaatgcctcaacaaggcaggtctctgaaggagactgacttttctctctctctctgaatgatactgcctgagagaaatactcacttcctgctttgttttcaacaagtatggacttccttacacaaaaagaatcttttttgcttttgtccccccatttcactggaaatctatccactgggcaccactgttggtcggcttcctttcatagattcctttatgtttcaaattttaaaaagacaataatagcaacaaagtgaaatatggatttaagctaggaaaagcagagaactgaaacttttttcctgcaatcatacttcccagcttcttcagcaagatctgcttggctgggaacatgccttctgagaactttacatttctaaactgctgctaaattgctccatgcatttattcctcaaactctcagggaagatagcactggctttcagtctcataccaaccattcttaaggtaatggaccaaaagtcatttccacttgaaatataatccttctaaatgaatcatgcaacatggtttttacctccattttttcagaataactctaagatgatgatcctctggccatattttaaaaatttctcttatttgttttaattttcttccattttttctttaattttgtatccagacactgccttctctaagaggaatgacatttttgcgggttatcatgatatatttttagcccatttgccttgacccatagcttacaacagttaaagaacactaacatataaacatagagttttgcccaaggccattagctttgcatgttaacaagtgggcagaaggaaggctgggcatgagagagacatgctgtccttctggtgagatcatcaatcccattcttgtaaccttcagatcattgcatttgttcagaatcgtctgcagaggaaaacatctcaaagttgggaggttgttgaagagtcagaaacaaatgggtcctgggtaatttttcaaaacaggctttttgtcaattgtcagtcagctgtttaatattgtcaattgtcactcagctgtttaatattgtgctttgttataaggataggcactgtggtctcagcgttcttaagcttttacatttccgttatttggttttacttctgcattagtagagtagatgtagagtagatgccacctctaggaactctaccagcagcagcatcttagactagaagctccctctctaggactataatctctgtagcctccacttctcccaccccttatttcttctgagcctacttggtctttgatacttactataatactttctattctcttatcataaacagttttctgatttcattttcctctggtttcatactaagccccataatcagtcactgcaagattaccttctagaatttctgtgccctcaagttttctccatatctagagagtcagtcatctgccttgagccacatccactgtctactttcttcacttccatccccaggctgcccagcactgatgaaaacaaaacaaaaacaaacaagcaaacaaaaacaaaaacaaaaaactgactaggatctcaatctggtttgcaaatccatgcttctctttcttgacttctttagacatcaacagaattgacgcctcctcttgacctgggacacccctcctccttggtgctttcttctacctccccctgcttctctgtatgtcttttgcaggctcatctttctcttaggctgtcttcccccatctctcctctccctctgtgcactcaggcagtctcccttgtcaacccccaaaactgcttctccagaccccagtgtttctctgagctccaggtccacaattctctaaggtccatgtggatgtccctcaccatttcaaacttctcttccacagggagtccctggttttcactaccatagcatattaaaataccatgcatttcccttcataccactaattacaactttgtttcttttttttaaattttatgttttaaaaattatcttctgcccacatatattgtaagctccttttgagaaagacacattgctgtcctggtcattactatattcttatcaactagcaggggccgtggtcggggcttgtgttagtccattttgtgctgctataaaggaatacctgatgccaggtaatttataaagaaaataggttttatttggctgagggttttgcaaactgtacaagaagcatggcgccagcatctacttctggtgaggcctgaagcagcttttactcatggtggaaggcaaagagagagcaggcgtttcacacagcaaaggagagagcaagagagatgccaggctccttaaacgacctgctctcccataaactgaaagagcaagaactcactcattacggtaggatggcaccaaaacagttgtgagggatccaccccgaacacctcccaccatgccccacctccaacactgggatcaaatttcaatgtgagatttggagggaacacacatctaccctttatcagtgctcaataagctcgctgaatgtagaacagtgatataaggcaggggtgggccaagtataggcgacaggacaaatttggcctgctactgcttttgtaaataaagttttatttatttacaaaataaataaataaatacagtcataatcattggttacattttgttcaaagctgcttttgcattaaaacatcagagttgagtagctgccacagagactgtaatggccccacaaagcctaaaatagttaccccgtggtcttttacagaaaaagtctgatataaaggacagtctcacagcacagaggaaaagcatataacccaaaggaggaaagagtagagcatagtggactgcagagaagtttccctggacccaatctgtgccttgaaagatgagaaggacacctccaaaggcaggatgggggtgaggtggggtgggcggtggtgatccaagcagacagcacgggcaagtgttctggaaaacttgcctttgttcacaagtatcctgcagtataaattgcaaggtgggcagtaagaaatggacttgaagagattgaacaagggccagaaacccaaggacattgctaaggagtttgtgccttagcccatccagggccctagcagccttgactgatgcttctgaggtcctggaggctccaggctcaggctaccttcccatattctctgaaaataatatcacatttgtttagtaaaaaaattgtttactaaaaaattaacctctcagaatttctgcattcacatttatttcttctcatatcctcgagttagaaaaaggtatttctctcctgtgatgatattgattctgcactcatctattttcattactgtctccttccctccctccctcagtccctcccttagtctatctcactctaccatcttttcctttggaccttctgacattcaacatcttggtcgctcctatccagccacacctctgaccattcaaccatttgtcctcttgattggttccaccttgtcctatcacgctggatatgctgttgctcccaaattgcctccctctgccagtttcttgccccttcctccttctgtctctccctctctctttcaatctttctctccctcagtctctctttctctttccctctctctcaatctttctcttcctcagtctctctcccattctctttctctttctctcaatctctctcttcctctctctcttatcctctctttctctcaatccctctctccctctttctctctctcaatctgtttctctgttaatctctctttctctctccttctttctgtctctgtctctgtctgcctctctctctctctctctcttccctagtgagctcacttgctttcccagtttcagtgatttctattcagatatctccaaaatttgtatttccggatattttatgctttcatggaggccgtgtaaattggtataacctttttggaaggcgttttggcaatacttagtaaaaggttaaatgtttacaccccttgattctgctattgtatgtgtaaggattttttcctgcatacttttgtaagtgtagaaaatatatgtataggaataattgcacattgtttgttgtagctgaaaattacaaataatataaatgcctataatcagagcagttaaatacatatgaacacagtgaaataccaggcactcatttaaaagatgaggtatattttaacaagcctatttgaaaagatacccaatcttagcaagtgaaaaaaaaactcatcaaattgatatatttagcgctgtccctctctcaagtttcagacccacattttcaattttctgttgtcatcttgacttagtctcgtgaaattttaaactaatcatttttaagggaagatattttcttcccttaaaaatgaaattcagacaaacctctgaatttccctctttctgctaatttcttgctttcttttatcatctttccatccatcctaacatacagttccagaggagtctttaaatccttccttattgcctaacaccgaggatcatttgctgaaatcttgttgatttttccctcagatcaacaaaggattttcagaatagccctgatttctctttatcaccacggtgctgtctcacgtcttctctccccctcctcctacctgccgtctcttccagactcgtctctctcccccaatctcctttgcgcactgatgccaaattagtcacaacaaaagtgtttacgtgatcgtgtcacccactggtaagctcttaatggtcttcccttacacattatctcccatttcatctcaggagccttttattaaccactcttcacagtctgactcagccctctttgccagtttctctctttacaaatagcaaagtctatgagctagattactcaatattccctgaataggtcttctcttctcccacctcttggcctttccagtaccattcaatcttcctggaaattcctgaaatttctttcctcctcactcagtcaatgttttgagacccacatcaaatgctacatactatttgttcctttactgatcatgccagttggaaatgattcgaatctgtaaagcagggtgctatggaatgacatttcttatagccctttggtcatttgggagcaatgtctaacataatatcctccaggtccatccatgttgttgcaagcgacaggatttccttcttgttaaagggtgagtagcattccattgtacatatattccatattttatttttttttgctcatctgttgatggtcacccaggttgattccatatcttggctattgtgaataatgctacagtgaacttgggagtgcagatatctcttcaacatattgatttcatctcctttggatatatacccagtagtgggattattggatcaaatggtaattatatttctaattttgggcagggtcctctgtagtagctccataatggttgtagtaatttacatatccaaccaagcacgccagggttcacttttcctcatgtcctcgccgacaagcctgatattcttatttgcctcttagcgcttcagcctttccctcgtgacttaacggtgactcccttgagactacttgaaataataagtttggatggcaaggaaatacccttctgctgtcaccctttgccataagactgagttactttgtaaacaaagaagatttacttggtcttccatgcccaagacccttttacttttcatcgcttaatatttcatggccaaaaactgttggttcttccaatcttgtaaggccatttatctttgatcttgctccattcccttccatttttgcttgagaatcattcagttcttgcctgatctcacgtctttctcgcaacaccttactaatgactgccagagtgtccactacacactatcggtctcatttgaccacttccccaggcatgtagcctacctgccaagttctttcacagcagatattttgcagtgttgtaagagggctccctagcttgctatgttttcttactacctggcattaggaagtaaacatttttcatggcagtattcacttctagtaccaatttcttttttaatctacatgggctaactgctgtatcaaacagccatcaaatcccaatgttaattgcaacttacagtacgttgtgatgtttctgtctgtatactcattcagacacacagagtttaagtaatttgttcaagatcacaaagttagtaaatggtggcatcaagatttgaacccaggcagctggactcaagagtctaaacaactttcattttaaaattttcatctttcaagatatatcacttacaatttccatcttcatcactttcttccatacttcagagctgcatatgtaaacctcttgatcatataaatatttatggagtctcagcattttgagcacatgctgagagattttgtagcattgaagataaagaagctctttcaatacatctaatcttgccactattgattttgaacagcatcttaatttgttacctttttaaaaccatattgtacttttcttcaggacagctaaattaaatgtcttatgttgatcccctgggttttctcagtttccatttatcagtttccttttatataaagagatgctaatgggtaaccttacattttgtaaggcatatttttgaagatatacaagtgaaggtttgatctgtacaccctcgttagagctctttattttacatgtggaggaagagatgccttagggcttctgaaaaacaggcttttatttttatagaggagaaacttccagaacatgccatgagcaaatgctctgtcaagtctggttctttcccccattacttaagtgcaaatggaccacatttgaagaagataagtagcagaacaaggctccccacaaggggattttgaggtgctctgaaaaccagactgacataatccatggaggagttcatcactgcaggctgtcacgtctcacagtgggagtcataggctggtctgcttgataaactactcctgatctatgactggagctgtgtgcttcctttaaaaataaatcttgtttttccatgccccacgtgcttctcagcctcaggagcacctcatggatttagactaatcttgtcttttacagtcatgttacttccagattcctaggaatcaccccatttctgatgccgttgatccatccatacccactgaaattgagctaaatgctctagtctgatttgccccttgaagttagtatagaatattttggctagactttgaaaatgaagccctgaccacaatgcataatgacctcagtagacactgaagagttcctttgcatcaggcaagtgacaagtatctatctcatcttcaaagtccacatagatatgtgccagattgtaggttgacaaatcactttttcactagctcacgtggcaagccttttcaccttgtaataatgctagtgagagacccataggtaccacataattggccagtcattgagattcaagcaacatttggataatttagcaaaactatcatcagaatcatcaaagtacataatttttatttattatgcaaatagtggattcactaaagtgcttagaccaattaagttgctcccattgaaaaacagggtgattttattcttaagaatatatcaggataaacttcttgtagcctctaaacagtactgcttagaaaagtgcagcttcactgcattgcatatccccccagaagccctcaaagttcagatgtacaccacaaaaacatgaagcacatgtgtttgcatggaaggtaggctctggggtcttcctatcataatatgtctatgattaatagtcaacatatgccccctccacattccctaaaggaacatacacatgcatacacacacacacacacacacacacacacacacgtgagaactgaattgagagtttggggtatacaccatccctgagggcacagtctacagctcctaatgtgtgctgtagagcaagcattatattgttgacaggtaataattcctggttaggaataacaggataccagtgagaagaggctgagaaaaatacactcttgctggaagagtcaagaacgagctcttcgtgggaaactatgggagacgattgaaaaaggacaagaagaaaggagaattgttaagtctccactttctcagtttctgaactgaacttttgctcacagcaggtgaacacaggctccctcccacactgagacttcctcccctgccggtgtgcagtctgttaagtaaacagagacgttatactgagaaaggaacatttctctattttggctatgagttgttatttttaaagattcatcctccaaacattttcccctatccttgtttattttttcactagaaagaagatgaactgcttaaaaaaaaaattcaactccatgacaagaaaaacccacttctagtatgttctccccactcaatgccaatggagcctttggtgtgagcactctgccagccacacattgggcagcatacctcttgaaattcctgctgtgcttctatagagcttccatgcatccagattttcaaagtcaaagcaaaatgcgcatggcagtttttttctgactccttcaagttaaaaggccaacctctcccttgacatatccatgtatttatcagtatatctataggtaatacttaaaggtgatccttactgtgtgccacactccattctaagcactttacataaaaaacctcatttcactttatttgggaataggatgacaatttcttcaatattgagatgggttgaatctggggagactgatgttagatgcaaaaagctttctttctagaacttttcctgtgtcttgcacctggctttctccctgtcttgttcccattctagatctctttactgacagtgcccatggctttcttcttggtactctagtgttgagcataagaactagtatgtaataggctctcagtaaatcttgttgaatgaattaaagtagagcaagaattaaagacagagaagaagatcttcttgttggagttctttcttttggttgataagcaatgtgatttgacgtaacaatcttgagtcctaatcccctcatttggaaaatggaaataataatgctaatcttagaggtcacttctaagaagtatatgaatatatcagaagtaatcaacatttttaagtcaaagaaaagaacgtctgtgaaaaagaaaactaatgagctagttgaaaaaatattaattggatctttttctcataccttacgccaaaataaatccccaaaaatggttgcacaacattgtgaatatactgaaatccattgaatcacactctttaaatgggcaaatgttatgttatgtgattatctttcaataaaattgttataaaaatgaataaaccccagaagatcaaaaatttaaacataaaagcatggaagtatactagaaggaaatataagataattttatatgttatgttgtatatatttatatgtaaaatttttttatttatttttctttgcttttaaaagcaagacataatgttctagaggaataaatgaaacgttcgataaatttaattctctattaaatgttttgcagaagaaaataccaggaacaacatcagaagaaaaaacaaaaaaccataagaaaaacaattaaaaatacatatgacaaatggcttattactataatatttaaagaactcttaaaaatctatgtgaaaatgacaaataacagaaaaatacgtgcaaaggacaagagcaggcagtttagagaaagcctataccaatatattctcttatcaacagtctattgtacaagctatttgaaagcaatgtttgaactatcaaaatttaaaatacataagcccttttatctagcaattctacttccaagaatttattctatagctatctgtacacatatccaaagacataaacataaggatagtcattgaatgaaatgtttttaacaacaaaatacttgaaagcaaagaaatgtcacccaagaaagaagtgattgaagaaagtttagcattcagttcagtgaagacatattgagctgtcaaaaaaagttgatggagaactccaaggtctattaactaaaaacaaaacaaggtgctaaacaatatgtttagtgttcatattttaattgtttatatatttcacaaatatatatttgtgcatgcagaaaatattttaacttctttctaaccccgtcaaacacatcatgccaaaattcaacttgtgataaagaaaaaaataaatgaattcctttcgtgtgtagtatctcatttaaattcttcaacaacccaataaaaaagatacagacacatgtttttaagtactacatgttatgcacctttggtttgcttatttaatagttgcaactactaatgttaaattcttgatgccaaggttaaaagcctgaacttctaaaaatatcaagatctgacatttttctgttttcacagattaatctgccatctcctgacctccaacacactgctctatgttctttcatgctgctcctcctcccatgtttaggaccctcttccaaggaggcattcacatctctgcttgatgaaaccctacattatcttaaagcgtccactcgaatgccacctacttatataccatctcctgcaataccaatgggctcagcccaaccatagcccatagttattgtagttgttcttgtacttcaaaagcactacaaaacacaaccatcaggacttgttacattatttgaaggctatgagcatcttcagccgaggccctgtttttattcccagaactaccacattgtttagaatatagtagcagatcaatatacgtgtattagataaatcgtttacccagatcttgatcattttcaattacccataggttgaagaactccatatttaacatggcagacttgaggactgaactacctacctcttctaagaagttgaaatgagaatgttttattgatgggaaattatttttttgttttgccttctagaattcaaatgaatgttcatattccatgaagacaatggctgatagttttttgttaaagatttagaaccagtggatttttatgaatgtgaaccctttcatgtcttgtggaagattttctgttttttaatctttttatttatttatttatttttgctatgttttcataggaaccagggaaaatgtgtagagggcatggtggagatcttcgacatgctgctggctacatcatctcggttccgcatgatgaatctgcagggagaggagtttgtgtgcctcaaatctattattttgcttaattctggtgagttgataacacaagataactcaatgctggatgaaatgtttatttgtagttttcaaccagatacgatctacccactccaaaggcataatgtcataaatagaaagaaactactgacacacgttttaaaataacctaccaacattgcagattccttataaaggtagaaccatgctagccaaatagacacatgaaaaattgtaatttggcattgaatcaaatggcctttgagctaaaatttttgtatgctttcacagataggatgtttttattcaaatggtacatgtatatagacatatgttagttgatagttatattatgtctgaaaataagtagaccaagtaattctgttaagaaattgtgaccaattccaggctccagatagtaaagaaagagggttatttgagacagaccatgtttctggtcaaaactgactagctaaaaatatagttggcttagagatagaaaaacctgtttctaaaacagaagaatgtggaatgcaataaattgtccagctgaaagaacattttccatttgctctatgaagtctgattctactgccccttcgtatttatttgtttgagaaagcttagctaagagcaacatctgttttttgtttttgtttttgtttttgttttgtttttgttttcaatgtagtgaggctggctgttgtataaagagttactctatgtcaccaagatggaaactatggttcagcctgaattagtgccctgactcctcctagcctcttggtatttggatctaagctctagctctacagcctctgggacctaaagctcacattgggtatcagcggtacagcagctccccttaagctccacctttccccctggctctaaccccactttgtgcctcatccctcattctcacatagaaatcatagctatttcgaatctctgggcctgacttagtttcttatgccattagacatagtctcaaattcctcaatagctgaattgcagcttgtattgatcacatacatagagaatccgcacttccttctctttccacgtgtttttgtctctttctgatgagtgctgatcccttcccgcttcccctaacaattttttacttttcttccccaccactgctaggaacctgtgttgcttaatggaatcagcccttccttctcttttcttgtgtttttgtctctttctgatgaatgccaatcccttcccacctcccatgacaattttccacttctcttccccaccaccactagtaacctgtgttgcctaatggttatcacagtaatcattctcacttatcaactaataaatggaaatctgtactattacactaggcaaggactgaattacagaatgaagtcccatgataaatgatgtgatccacactaaggaagtgattaccactccattcaggtttctgtttccactcacgtgcattgtgcttttcatttcagtcgtttgtcctgtacattgtagggtccagatcccacaatggctctttattggatgagagttctgggagcagtgccactcagctacatggtgccaggtcctgaacctgtgccttctttggtggagggctggcacgtgctgacagctttcatgtgggcaatctgggaacttcagagaaggcaggcctattaagtgttaagactccccaccccgaacttttactgagaaaaagtaccccagacaggaagtaaaattagccagagttgtatgatccacacagtggatgctctgatctcagtaataaaaaatatttcctccagatccatatagacttttcctgcattattgttttgtttctgttcctatggcagagtgagtttttaaaactattatgcaagaaatatcaggatttttgccaccaaaaagttggattcatagacccagggtttttacaacccagggggaaaaaactttcagccctcacaagaaagtattttattaaagactggcacccaaacctcaagactatatttctcactgcaggatttggcccctgtctgcctccttctcagactagttaaactttcatactccatccttgttccttcgcttctttcttaggatcttctgtgcacttctttcttaggatcttcttggcacttctttgctcttgaagggcagaaacgctattgtagaaattcaaggcactgtatgctgacatagtttatagttgtctttttcatgagataacacagcggctggcagctcctcttttctatcaaggacagtactgctggctcaggagagcagtaagcaaacagaagctgtctctcaaccctgtacaaagcgaaaccactcttttccctacaaaagtgagctgtgccccagaaaagcggatctgctgctgagcagggctcctcatgtctcctattgttcctgaaaaacagcatcaaagagggcaagactgacacacaatgttgtagcattaggagcctttttcagaataaaaaagcaatcagtcatatgaagcatgtggtcataccacaatcaacaatttttctccacaactagagatatgggtttttctaaaagtccaaccgattcatggccctgatacggggcagctctacctctcatgagaccaatgaccaagtgactctgactccaggaatctctgacagaagccaagctggaaacggctcaggaaacctgagctagaagatgcctttctgacacctgggaaacaaaacctcagtgtatggaggaacccaaggttttgtgttgagccccagtcgccaaggtctgaggaggctgggtttatattggccccgattttgtggccgaggcacaaggggaattgaaaggttgttgtgaggacctgctcggaatgtctttctggaagtttggagagggtctctcaaatgccaaaatttccatgggaagccattttcacagctgcttgggagtgggagatattcgtcatcatttctgccccatttagaataatttattactttgcttgcaaaaacccggaatcatccataggacacacgttgtttgtttttccactccacaccaaaggacagaggcattcctggttaatccaagatgccaacttcaagacattctgagaactagctggacagagctgaagtgtagggcaaatcagaacagaagtgatgggcccagggcaaaagcccgtgaagcagcagctgcggaggaaggatgggagctggagctgcaaagggggccatggtggagactctgggcctgcccacagtatcccctctgcccaatgggaattcagttttcctgcatatcattcaattatttctcatttttctaggcctagctcaccttattcgggaagttttgcgactaccccagtccataatgaatttcctctctagactatttcaattcttacagtcactaccacacagtctaggatttggttagttggttgatttcattcatttattcaataattcaatgtttattgagttcctactatggactttgtgccaggtatacaaaactgaatgttactgttgtgtggggtttttttctttgcatttttaaagttaacctggatttttctctcactctttatgcatgtatttcctaatctccctataaactatttgtatttttttggattcctcacagtctatttagcctgtggactgtcaacagatgttacatcattcagtcatttaatagatgcttatttgctagacatggccaggaggacctggaaagtcctcatttttcccatctgttcttaccattctgaaatgtatcatgctcttcagtgctccacagatctagatgatatcaaattattaaatggaaaaagcaagacccatctccttgggttattgtggataagggggaaattgtgtaggaagtgtctattgcagttcatggaccattgtaggcccttagtcaacaacagctatcatcatcactgatgagaatctctggcttaaacggagtaggttcatgccttttttcagtgtaatgaagtgttttagtttaaaggcctttagcaaggcttacaataaaaaaaagtggggactccagggtaacaccaacaatagagacgaccatggctgttatcctgagactattaattatgccacgtaattagatttagagaaaacttagagcaacatttatcttgtggataataattgattgtgattgggacttaccgttgagagaccctgatgaaaactctatggtgaattgctgtggagtcacatgggttcatgcatcattcatcagtgggccctggttttagcctcataacccctgagaatccacctctatcagaaaaccaccctttcagtgaaagttcctcaaggctcagaaaaattcatatgtcaaagctttatatgtaaaaacctatactctctaataaatgtttggtttggccttcacattcaatttaataattatttctacctcttttctaaaccgctcttaaccacagttctatatatttaattctgaagagcctcatgcacctccctccctggtaactttatctacttctctccctggagaaccagccagaccatgattccagccctctgtcctctcttcaaccgtaggtcctctttttctctcctgactcctcaaaccttctccagttacccggatgccttctgtgtgctgctggcttctgcatcactgttcacagggccacttgttcccctggaaatgtcttatgctcttgaaatgctatagccttgttcacctgttcatccaaaactgatcctcagacaacatttctctttcaattggtggaataataaagaggaatatgggtcaaaattcatagacatttaaatacccaaggtgcaaagttaagagaaaacaagataggagaaagaattatggcaacatctctaaaatgtgtactttagtgtttagcaaaaaagggactatggaatgtcaaacaggaacatatatgttaaacataaacatgaagcagtgccagctgctgtctgccatatagtcatgctttgttaatgtggcacatcttgccatgatggtgccctcatgaaacgaaggatgctgaagcagatgccattctgtttgctttgatcagaagccactctctggtcaaggaagtatttgtttcatgcttaattataacaagttctcatcacaaagattattttctttctccagatctggattgtttgcactcactttatattattagacaattactcagattgtttatgtttttatgtttagaaataagacagtgattcagagagtccctgtatttagatgaaagaacattttttaaacatattgactgtaaacactgaaaatcattaattctcaacagttgaaggtttctgacaggaacggcccttggaaattgtaaatgggcacattgtcaggtatgcccattgttgtcacattggagaagattggattctgttctctctggagtcctttgtaatgccaagcttcctctccagggagctggcttattgtcattattttgagataaatggcacttcatagtattaagtggttcattgtctcttctctggctgactgtattctgtaggcagccactcaactttggagcctttctctgctaccaacttttggtgttgccttaagcaagcctcatggctcctgttagtttcctgacaacatggtatagcatggactttgtcatcagagaggactgaattcaggagaagcaactctgccacttccttggcggaagggggatgactgatgtcctttgataagctgcttccctgagcctaataaaaaaatagaaataatgatacttaaactcatggaattgttgtgacaattgaaagaatgaccagttagtaaagcatcttgcaccatgactagcacacagtagatgcacatgagtgttactaagctttagttatgccctccaaatacaaagccttagttttgtcactatgaaagaaattactctgttcttcttagcaggtaataaataaatccctgcctggaaattctgcaggagaatttcacccctgcgctttcaggttaaaagattgcattcccatgatgaagatgttctgtgaatagaatcatctcaagtcccaaatggtgtggatttgctcctgcatcttgttgcagagattctcttggagcttctgagaactggggaaaccaacaaaatgcctgtagcctggggaaaatgtagggagttttagcatgaatttgtgggaggtgagaaaaggcagcaggtgtcgaaagacgggaaatccttgcactgttctagatgttaggagccattttccattcacattcagcacctcaggaggagaagctgcctatcactttgtgtcctcaagagaaccaacaaaggagaatgccatctcccagatactcaatttgattaccattttatcctaccttctctagggtccagacattatgtaaattggcattaagtttgaataatgtatggacccagtttaaaaggaaaaaatgctttgggaggctgaggcaggtgcattgcctgaggtcaggagttccagaacagcctggccaacacagtgaaaccccatctctactaaaaatacaaaaagttagctgggcacggtggcgggcacctgtaatcccagctactcaggaggctaatgcaggagaatcacttgaacctgggaggcagaggttgcagtgagccaagatcgtgccattgcactccagcctgggtgatgagagcaaaactccatctcaaaaaatttttaaaacaaaaggaaaaaatgctcccctgattcccgcagtgctgacttaaaatgttcttagtatgccaatgttgcttaaatatgaatgactgtagcttctacttaaattggcaaccgcaccaaatataaactgcaaatgtttatagctcttatggaagtataaaagcaaaacaaattcttaaattaaatacaaactaagagggaaactgataataacaatgttttgtgtaattaagttgctgtttgcaacatgcctggggcagactcctggcctctttgcatctgacatgagaggctaccaaggatgtggccacaactgggctctcccagcacttgcttgcgctcagaactgtgccaaaacctttgctcgcccagtgttctgcaacgtccgtcatttggatttggcaggaacacatcatttatgcattttgtttgcttctgtatttagttgagatacttaaaatataactgctagattctaaggcattcataagcatctgtgaaaaatgtgttacttaggaaacagttcagggttccatggattatctagattggtgagtcttaagactgaccacacaattcatctgggggtgtggaggaggggagctttgagaaaaatctctgtatgagcacccacacccagagattcctatgcaattatcccagagtggtgccttaatatcaacatttgtttaaaccatcccccaagactaaaatttgtgaccgggatttagaaccattgacttaattgatgcagaacactctgatattaatgtcttcatgtcttttggaatgtcattaagacaaaagcataaaattttaaaattcttaaagacaatttaaagacctatgagaatccatctttaattctcaggagcgtgtggaacctagtttgaaaactactggcatcgacaattgaatttccactaaaataaaatagctctctagtatattacaaaactacccattctgcaaactgcaggggagctactgataatgcttggaactgtgccaggcactgcctgcataaaaatgagtaaggtccacttcctccatggactgggttgggtaggaggcaaagataattaaccaattattttaatattatgagttcagggttgtaatgaaagtaagtattgagtgctgcagagacccagcaaaggagtccttagctgagaactgatcctttgctgagtgacgaggacattattgaaccgccaggcttgatggcatgttgcatggtaacagaccagtacaccaaacagcaggagctgtagcagagaaagagtttaataattgtgtggcagccaaataaggagacagaaggaaaccttaaatccacctcttgaaaaagtctgggactaggctttttaagagaattctggcaagaaggaggctgaggagctgggggtaactgattggttaggacataggagaggagacaataaggatatagaaactccattcttgcactgggtcagttcctcggagggggtcctcactctggctggcagcagtgaacccattggaatgcaggatctgaaaaatatctcaaaatggcaaacttgaggggttttttttagcatcaaagatgttatctatagaagttaggacattgtgacaggggctacgtgactttgaagtgttaagtggctgtcagaaagtgagctattgcagcggtccccaacctttttggtaccagggaccagcttcatgaaagaaaatttttccacagatggggtggtgtagggtggggtgggggatagcttcgggatgaaactgatccacctcagatcatcaggcattagttagattctcatgaggggcacacagcccagatccctcacatgggcagttcacagtagggttcacagccctatgaggttctaatgccactgctgatctgacaggtggcagagctcaggcagtaatgcttccttgcccaccactcacctcttgctgtgtggctcagttcctgacagattacggactggtaccagtttgcaacccaggcagctggggacctctgggctgtagggtaggctggttaatgcttagctgtgtttctattcaaagcttatgcttttgtttaaaacctagtaatttggttttgttaattttatgaagatgatttcaaggatgagtaggattagctggagtcagaaggacacaagggaatttctggcaacaacattaaactaccagtgaatgtctcatcaagtcactggacctctaattctaagcagtactgtcaaccttataggttatgatgtataagatagtgttgtgatgtataagatagtgcaaaaacctaagttaatatcaccatttctgtagtactctctatttcaaaggaaaaaatcttcagcagtctaatatcctaccaaaattttgaagtcaagacctccctacactaatcaaagaactagaggtgcaatcaggccatatatttggaaaggccataggtgccctccctctgtccttgttcccagcatactaaactatagtctaaaagactttaaaacttgaactgaagaaaaccttaaggaaacaacaacaaaattccatttatttcctgagcccaaaagtagaataattgttttttaatgaatttttctttccctgtaagacatactatgaattgttcaatgggtattcaaagcatatgtaatagaatatgtatgctttcctgaaaaattgaaatggaacatcaaactgttctgtaaagttttgagtctagaccaaactcacagcacttagccagaatatgtacatctgcatctgccactcatggccccatcgctccctccaactgcttctcttgggctgaaggatggaaaagcaaactccctgcgttgagttccatcttgccctgcatggcctcccccatggggtcattgagctccccaccagcttccacctcttccagcactttccgccagagggcccgtggctgcttttgcagactgaaattgattgtggttgattcagctccatttcctctgagtttttactttagatgtgctttttaggttgcatttttcttctggcatataagaaagacagcaatattccatggaacagagtgatgtctgtggctttgtcaaccgttgtttgttagcttgatcaccatttattgagtgtttactactttccaggcattgtgctaagtggtagaaatacaaagttgcctttacttgattcatctgtaaaatagagagagtagtagttcctacagtgtggtttatgtgaggcatagggactgctccctgaaacctagggacaactccctagcagcgacccagtgctcatatcaatagtggtaacaattaggaaggcagctcctacctcaaagacctcatgatctgatggtaaagacagatataacaagaaaattattctttttaaatataaaattgtgatataaaaatagttttcactaaattggatttttatgaaatttacagaaacaaaataataaattaaggaaatataaaaccacctgacattagccaaccatgttgatgttctgattatgttactgcaaaggagtgtagggttaagaacgagggactttgattccaagatcaaatccctttctgctatttcttagctgtctgactttgggcaagttgcttaaaccctttgtgcttctgtgtgcttgcccatgagatggagattataatagcgtctacctcatagggctatttttaatacaagttagctcttagaacaatacctacttaaactaacaatttgtattaggtactgttttattctccatccgtactgtgtatgcatatattcatatttatatttacatattctaattaggattatatacatgtactttctttaaaaataagattttaaataactatataatcagtcatgatgatacaacatgatttattcaacaaatctgatgctgttaaacacgtaagtgatttctctttcaggattataaataacatttgttttgcatttttttcatacatcttttgctcacttttcattgttactttgtatatgttgctagaaattgatttgctggtgaaaagggtataaacatttttaaggctcttgctacatattgcctgctcttcatacatattgcctactgccccaggaaactatcaattacacttttaccaagagtgtatgaaagcattcacatgaatgtaaccttatcatgcaatgcgggccatgagacagaggagagttatggagggtagacggcttccccgctgctcagccactgccctctcctctaaaagagccacagtcaggaatttctacatagatcctattataaacatctccttttgaaacaaattatcttctctcagagcattttcttcattttagtatctatataggtccttgttatgttcattttaagttttgtgacctgcactgacacaatgctgatgaactgcttattccaggcagtctgagttctcaaagcatttgcattttatgtcttatcctctgttttgggctctttgccactgatttttttttaagtgatattttaagaaagaggagggttgatttgttgtgagtgtatctctctttaaaaacttttctagggaaggacaacctcttccaaagactttgtttgctttgtgtgattggcatgtccttccctggtcagtaatgagcttgaaggaagctactggacacgggactgaacatggggttttgctatcactctagctgtgcctttctctagtgatcaaggagatgttggttcagaaagtgccctgtctaatcccactaaggcccgaaggaccaagtgctgtctactctccagattctctgcaacagaaagcagatgcttaggcttcatggtccaggttggaacaggtagttagctctgaggacagttatgcatgaatgtcaggaggggactggcaggggaacatttatttattctttaaaattggaatcaacagttatggatgaaacccagaatgcaaaattcactttcatcttgacacgcaacacatctgtcctttctccttgaatagcaagtattaatcattgagttagacaatgtaaccttcacattcagtgaaagccaaacactcagcaccttctagaaaaatcttagtgccatgctttcttagcatattgcaagtcctctgaggatgatgtgttgttcagctttgaagctgatcttttgtacttgcttatgtagctcaggctagtgataacatgccagaggcatttccaactaagaaaattattcacagaagctttaattacaaatttgttagccccacttcctgctaaaatggccagccttgaagagtttcggaaatgtgagcagccttaaggatgatagaaatattatgaaatagtaataagtaatacccatacagcaaactcctttttctttggagtatccgttcatcagccagatttccctctcaacagtccaggtgttgacgaagatcatgaaataataggaatgaaagggacttcgattttgtatttttaatagcattttcctccaccaaattacgaaagtaatgcatgaccaaggcagagaacttggaaaatacagaaaagccaccaagcaaaataatctcccaagaaatcataatttcaccacacaaaagtaaccattgtcaacattttggtgaaaatccttaattaaagagactcttaaaagatgccagttcgctgccacttcttcctttctccacaccatcctgcaccctgttttgaaatgcagaattgtttctaaatcattccaggaaaattattagttttctcaaatatctctggaggcgagtctgttggcagtcatttctagtttctcacaaaccttgaagttaggaaattatttgtgtagcttttgagcactgggccagaagtgagggatgtttgggttctagttccagctctaccacttatttaccaactggccgacctcaggcaagtccaggctagcggccccgcctcaagcccctccagatgcagcatctgcaaccccacttccttcacttcctttcgcctcagtttcccaacaatttcctagtaattgtactgaatcattgtttttcattttttacattaaaatttatttattttattttatttttaaagactttattttttagaacagatttagatttgcagcaaaactgagtggcaagtacagaaagttcccatatattccctgcccccgcacatacacagtctccctcactatcagcatccccaaccagagaggtacattggttacagctgatgaatctacatcgacacgtcattatcacccaaagtgcatagtttgcattggcgttgggcattttagggcttttgacacatgtatgcactattgtaatatacagaataatttcactgccctaaaaatcctctgtgctcctcctattcattcctccctccaccccattcctggcaactactgatctttttactgtctccacagttttgccttctccagaatgtcatatacttggaatcataaggtttgtagccttttcagattggcttctttcactcagtgatatgcatttaaggttcttccgtgtctttttatggcttgatagctcatttctttttatcactgaatactactactccattgtctggattatacacactttatttatacattcacctactgaaggatgtgttggttgcatccaagttttggcaattatgaatgaagttgctgtaaacacccatgtgcaggtaattgtgttgatatgcatttttaatgcttttggataaacactcaggagcacaattgctggattgtatagtatgtttagttttgaaggaaactgccaaaccatcttcccaagtggctgtaccattttccatttccaccaacaatgagtgagagttcctgttgctccacatcctcatcagcatttggtgttgtcaatgttctggattttggccattctaacaggtgtattgtggtatctcattttgttttaattcgcattttttggataatatcacatggagcatcttttaataagcttatttgccatctgtgtgtcttctgtggtgaggtgtctgttaaactctttggtccatttttttaatcaggttgtttgcgttcttatcgttgagttttaaaagctctttgtatattttggataacagtcatttagcaggtatgtcttttgcaaatattttctcccagtctgtggcttgtcttctcattctctggagatcagtggtttttacactttcttctgctgaagccaagtattgtggaagaagccatggggtcaccagaggataggtgcacagggtagtgagggaaagttggagtgaatgggcttggtgcccccaccccgcaacatttctcttgctttaatcagagaagtttgacttcatccagattgcatatgaggactttacatgaggttcacctttttatttgttttaaaaggggtttttactctcaaaatgttttaaagaccactgaactagatgatcatcttaaggcccttttaagatttatgattctggaattctgtggctctatttttccaatgtaatataaccttcctctcgttaaggaaaaatgagataaacctgttataaacactcatgtgacattttttcaatacagttttcatccacgtagtgctcacttagaatgatagaaacaatacacctaaagaatatgcaccattcacttgcccactcatctctcaaagagaggaactttcaacactagttatctttttaaaaataatcagagagaattctcagccacttcaattctagcccaggaaaaagagggaaaatacatttgaaggtttctggctcatgtgatacatttgcaaaccagaaccaagatgatatgactctcatttattagtgactattgcaaagctttgcaggctattaagcaggctgttcaatttagggtgatatggacatgtgcatattggccaattatatatgctcagatcgtatgtcattttttttctgcattttagtctaagtgtcagataggtgtttcatgatgttttataaacacttctgttcacattaacattgttcattgatttggcaaggaatgaaggggtgtcattttcatgattttatttgtatattatgtattccacagaggatttgaaatgccttaccaaattttatgtaatgtaaaggggtaaaccaatatttgacacatcattataaattgaggataatctgaagaaaataataaatccaggagacagattatcacactgatatggtttggctctgtgtccccacccaaatttcatcttgaattttactcacataatttccatgtgttgtgggagggacccagtgggagatcatttgaatcataggagtggtttcctccatgctgttctcattgtagtgaataagtctcatgagatctgatggttttatcaggggtttccacttttatatcttcctcattttttctcttgccaccaccatgtaagaagtgcctttcgcctcccaccatgattctgaattctgaaccctccccagccatgtggaactgtaaatccaattaaacctctttttcttcccagtcttgggtatgtctttatcagcagcacgaaaatggactaatacagtaaattggtacaaggagtggggtgttgctgaaaagatagccgaaaatgtggaagcaatcttggaactggatatcagggagaggttggagcagtttggagggctcaaaaaagacaggaaaatgtgggaaagtttgaaacttcctagagacttgttgaatggccttgacaagaatactgatagtgatatgaacaataaagtccaggctgaggtggtctcagatggggatgaagaaactgttgggaagtggagcaaaggtgactcttgttatatcttagcaaagagactggtggcattttacccctgctgtagagatttgtggaatttgaacttgagagaaatgatttggggtacctggtaaaagaaatttctaagcagcaaaacattcaaaaggtgacttgggtgttgttaaaagcattctgttttaaaagagaaacagcataaaagttcagaaaatttgccacctgatgatgcagtaggaaagaaaaactcatttttttgaggagaaattcaagctggctgcagaaatttgcataagtaacaaggagccaaatgttaatccccaagacaatggggaaaatgtctccagagcatgtcataggtcttcatggcagcccctcccatcacagacctggaagcctaggaggaaaaaaacagttttgtgggccagtcccagggtccccatgctgtgtgcagcctaggaacttggtgccctgcatctcagctgctccagctattgctaaaaggggctgaggtacagctcggcccacggtttcagaggttgcaagccccaaaccttggcagctttcatgtggtgttgagcctgtgtgtacatagaagttaagaattgaggtttgggaacctccacttatatttcagaagatacgtggaaatgcctggatacccaggcaaacatttgctgcaggggtggggccctcatggagggcctctgctagggcaatgaggaagggaaatgtggggttggaacccccacacagagtccccactggggcactgcctagtggagctgtaagaggaggaccactgtcctccagaccgcagaatagtagatccactgacagcttgcactgtgtgcctggaaaagccacagacactcaacgccagcctgtgaaagcagtcagggttggaggtggtggtggctataccctataaagccacaggggcagagctgcccaagactatgggaacctacctcttgcatcagcatgacctggatgtgagacattcagtcaaaggagatattttgaagctttagaatttgactgccctggtggattttagacttgtgtgggccctgtaacccctttgttttggccaatttctcccatttggagctgctgtatttacccaatgcctaaacccgcattgtatctaagaagtaactagcttgattttgattttacaggctcataggcaaaagggacttgccttgtctcagatgagactttggactgtggacttttggttaattctgaaatgagttaagactttgggggactgttgggaaggcatgattgcttttgaaatgtgaggacatgagatttggagaggccaggggtggaatgttatggtttggctctgtgtccccacccaaatctcatcttgaattatactcccataattccaaagtgttgtgagagggacctggtgggaaacaatttgaatcatgaggccagtttcccctatactgttcttgtggtagtgagtaagtctcacgagatctcatggttttatcagggtttccgcttttgcatcttcctcattttctcttgctgctgccatgtaagaagtgcctttcacaagcataaggaagaagtatacttgctggagcagcaggctgtccttcttctgacgatatggactgcaagtgcctatgtttactttgaccaagacggcctttcttttcacagaaagccagggttcaccccttgaatttcataagacctctctttgcagtgggttagatactcttttatatttttatactctgtcaggaaaacatttttttttccatttaaaaatcaatcttttggttgcttccaagatggctgaataggaacagctctggtctgtagctcccagcgagatcgaagcagaaggcaggtgatttctgcatttccaactgaggcacctggttcatctcactgggactggttggacagtgggtgcagcccacggagggtgagccgaactggggcagggtgtcacctcacccacaaagtgcaaggggtcaagggatttccctttcctagccaagggaagccgtgacagactgtagctggagaaacagtacactcctgacaaaatactgcacttttccccacagtcttgacaactggaagaccaggagataccctcccttgcctggctcagtgggtcacacgcccatggagacttgctcactgctagcgcagcagtctgagatcaacctgcaatgctgctgcttgatgcggggaggggcgtctgccattgatgaagcttgagtagctcacagcgtaaacaaagcagcagggaagcttgaactgggcagagcccacctcagctcagcaaggcctactgcctctctagattccacctctgggggcagcacatagcagaacaaaaggcagcagacagcttccgcagacttaaacatccctgtctgacacctctgaagagggcagtggttctctcagcacagtgttcaagctccaagaaccaagagaccgccacctcaagcaggtccctgacccccatgtagcctgactgggagacacctcccagtaggggccgacagacacttcaaacaggcaggtgccctctgggacgaagcttccagaggaaggatcaggcagcaatatttgttgttctgcagcctccgctggtgatacccaggcaaacagggtctggggtggacctccagcaaactccaacaggcctgcagctgaggggcctgacggttagaaggaaaactaacaaacagaaaggaatagcatcaacatcaacaaaaaggacatccacaccaaaaccccatctgtaggtcatcaacatcaaagaccaaaggtagataaaaccacaaagatggggagaaaccagagcagaaaagtggaaaattccaaaaaccagagcgcctcttctgctccaaaggattgcagctcctcaccagcaagggaacaaaacaggatggagaatgagtttgatgagttgacagaagtaggcttcagaaggtcggtaataacaaacttctccaagctaaaggaacatgttctaacccatcgcaaggaggctaaaaaccttgaaaaaaggttagatgaatggctaactagaataaacagtgtagagaagaacttaaatgacctgatggagctgaaaaccacagcatgagaacttcgtgatgtatgcacaagcttcgatagctgatttgatcaagtggaagaaaggatatcagtgattgaagatcaaattaatgaaataaagtgagaagacaagatgagagaaaagaagagtgaaaagaaacgaacaaagcctccaagaaatatgggactatgtgaaacaaacaaatatatgtttcattggtgtactgggaagtgatggggagaatggaaccaagttagaaaacactcttcaggatattatccaggacaacttccccaacctagcaaggcaggccaacattcaaattcaggaaatacagagaacactacaaagatactcctcaagaagagcaaccccaagacacataattttcagatttaaaaagtatgaaatgaaggaaaaaatgttaagggcagccagagagaaaagtcgggttacccacaaagggaagcccatcagactaatgggatctctcagcagaaaccctacaagccagaagagagtgggggccaatattcaacattcttaaaaattcttaaaaaaagaagaattttcaacccagaatctcatatccagccaaactaagcttcataagtgaaggagaaataaaatcctttacagacaagcaaatgctgagagattttgtcaccaccaggcctgccttagaagagctcctgaaggaagcactaaacatggaaaggaacaaacagtaccagccactgcaaaaacattccaaattgtaaagaccatcgacgctatgaagaaactgcatcaattaacgggcaaaataaccagctaacatcagaatgacaggatcaaattcaaacataacaatattaaccttaaatgtaaatgggctaaatgctccaattaaaagacacagactggcaaattggataaagagtcaagactgtgctgtattcaggagacccatctcacgtgcaaaaatgcacataggctcaaaataaagggtcgaaggaaaatctactgagcaaatggaaagaaaaaaaaaagcaggggttgcaatcccagtctctgataaaacagaatttaaaccaacaaagatcaaaagagacaaagacagccacaacaagaagagctaactaccctaaatatatatgcacccagtacaggagcacccagattcataaagcaagtccttagagacctacgaagagacatagactcccacacaataataatgggagactgggagacaccccacagtcaatattaaacagatcaacaagacagaaggttaacaaggatatccaggacttgaactcagctctagaccaagtggacccaatagacatctacagaactctccacccctaatcaacagaatatacattcttctcagcaccacattgcacttattttaaaattgaccacataattggaagtaaaacactcctcagcaaatgtaaaagaacagaagtcacaacaaactgtctctcagaccacagtgcaatcaaattagaactcaggattaagaaactgactcaaatccacacagctacgtggaaactgaacaacctgctcctgaatgactactgggtaaataacaaaatgaaggcagaaataaagatgttctttgaaaccaatgagaacaaggacacaatgtaccagaatttctgggacacatttaaagcagtgtgtagagggaaatttatagcactaaatgcccacgagagaaagcaggaaagatctaaaatcgacaccctaacatcacaattgaaagaactagagaagcaagagcaaacaaattcaaaagcaagcagaaggcaagaaataactgagatcagagcagaactgaaggagacagagacacaaaaagccgttcaaaaaatcaatgaatccaggagctggttttttgaaaagatcaacaaaattgatagaccactagcaagactaataaagaagaaaagagagaagaatcaaatagatgcaataaaaaatgataaagggatatcaccaccgatcccacagaaatacaaactaccatcagagaatactataaactcctctacgcaaataaactggaaaatctagaagaaatggataaattcctggacacatacaccctcccaagactcaaccaggaagaagttgaatctctgaagacaccaataacaggtactgaaccaaggtttggaccaaccaaaaatgtccaggaccagatggattcacagttgaattctaccagaggtacaaagaggagctggtaccattccttcagaaactattccaatcaatagaaaaagagggactcctccctaactcattttatgaggccagcatcatcctggtaccaaaacctggcagagacacaacaaaaaaagagaattttaggctaatatccctgatgaacatcgatgtgaaaatcctcaataaaatactggcaaaccaaatccagcagcacatcaaaaagcctatccaccaaaaccaagtcagcttcattcctgggatgcaagactggttcaacatacgcaaataaataaatgtaatccatcacataaacagaaccaatgacaaaaaccacatgattatctcaatagatgcagaaaaggcctttgacaaaattcaacagcctttcttgctaaaaactctaaataaattaggtattgatggaacgtacctcaaaataataagagctatttatgacaaacccacagccaatatcatactgaatgggcaaaacctggaagcattccttttgaaaaccagcacaagataagaatgccctctctcaccactcctattcaacatagtgttggaagttctggctagggcaatcaggcgagagaaagaaataaagggtattcagttaggaaaagaggaagtcaaattgtctctgtttgcagatgacacgattgtatatttagaaaaccccattgtctcagcccaaaatctccttaagctgataagcaacttcagcaaagtctcaggatacaaaatcaatgtgcaaaaatcacaggcattcctgtacaccaataatagacaaacagagagccaaatcatgagtgaactcccattcagaattactacaaagagaataaaatacctaggaatccaacttacaagggatgtgaaggacctcttcaaggagaactacaaaccactgctcaacgaaataaaagaggacacaaacaaatggaagaacattccatgctcgtggataggaataatcaatatcacgaaaatggtcatactgcccaaggtaatttatagattcagtgctatccccatcaagctaccattgactttcttcacagacttggaaaaaactactttaaagctcacatggaaccaaaaaagagcctgcatagccaagacaatcctaagcaaaaagaacaaagctggaggcatcacgctacctgacttcaaaccatactacaaggctacagtaactaaaacagcatggtactggtaccaaaatagatatatagactaatggaacagaacagaggcctcagaaatgacaccacacatctgcaaccatctgatctttgacaaacctgacaaaaacaagaaatggggaaaggattccctatttaataaatggtgctaggaaaactggctagccatatgtagaaagctgaaactggatcccttccttacactgtatacaaaaattcgctcaagaaggattaaagacttaaatgtaagacctaacacctagaagaaaacctacacaataccattcaggacataggcatgggcaaagactttatgactaaaacaccaaaagcaatggcatcaaaagccaaaatagacaaattggatctaattaaactaaagagcttctgcacagcaaaggaaactatcatcagagtgaacaggcaacctacagagtgggagaaaatttttgcaatccacccatctgacaaagggctaatatctttgtagaatctgcaaagaacttaaacaaatttacaagaaaaaaacaaacccatcaaaaaagttggcaaaggatatgaacacctttacactgttggtgggagtgtaaattagttcaaccattgtggaagacagtgtggtgattcctcaaggatctagaactagaaataccatttgacccagtgatctcattagtgggtatatacccaaaggattataaatcatgctactataaagacacatgcacacatatgtttattgcagcactattcacaataccaaagacttggaaccaacccaaatgtccatcaacgatagactggataaagaaaatgtggcacatatacaccatggaatactatgcagccataaaaaaggatgagttcctgtcctttgcagggacgtggatgaagctggaaaccatcattctaagcaaactatcatgaggacataaaaccaaacactgcatattctcactcataggtgggagttgaacaatgagaacacatggacacagcacaaggaacatcacacaccggggcctgtcaggggttggggggctgggggagggatagcattaggagaaatacctaatgtaaatgatgagttgatgggtgcagcaaaccaacatggcacatgtatacctatgtaacaaacctgcacgttgtgcacctgtaccctagaacttaaagtataataaaaaaaaaagaaagaaaagaaaagaaaaaaagaagtggcttttacctcccaccacgattctaaggcctctcagccatgtggaactgtaagtccagttaaacctctttttcttcccagtctcgagtatgtctttatcagcagcgtgaaaatgaactcatacacacacacagaagtatatctttacagttcccaggatggactgcaagtttggctctaaatttcctttgcctggccaaaacaaaaagaacacattttattataaggttcacaggcttttaattgaaaaaaaaaaaaaaacagttattcaacatgaaaactctttttcagacaaagttctacaaagtctatttctcacaagtaggactttggcaaggattgtgcaactgacaattcaaagtcatttattccgtggtgagaaaccggagtacagatctttaccagttaggggatgatccatgtgttttgataatcaccttggtggtgatcagactaaaggtctcctatgaaaaccattaacttcacactatagctgataggatgcactgaagcccttaccgctgactgcatggatgagagctaggccagagcattggcaggcagagtttataacatggggcaggaagcattgaaattctattccacctcttggtgtatcaggtcaggagtcaaatctcctatcttcctcttctggatcgctttcctcctgaagtgtctggcatagatgtctaggtatagcttggcatggtggtgtgtgcctatagacccagctacttgagaggctgaggtgggaggattgcttgagcgcaggagtttgaggctgcagtgagccatgaccacaccactgtactccaccctgggtgacagagcaagaccctgtctctctttctaaaaaaacaaaacaaaacaaaacaaaacaaaaagaaaaaaagatgtccaagtgtgttctggttactgctgctgactgctaaatttaacagctagaaaaaaaaagtttggactctatggatcataaatttggataagacacagagggaatggcttgtctcatgttcacaatgtctaaagtcttaaatggggagagtcgtcaaccaggggtaatttgagagttatgggctggaaccaccttgaggcatctttattcataggctagcaattgatgttggctgttggctgggacgtcagctggagctgtcaactgggagacctgtctgatatcccagcataggacactagacctctcacaaagtggcgagggctccagaagcaagtgtcccagctgacaaaaaaaaaaagtttcatagccttctacgacatgcacttagaagtggtaatgtgtcacttccagccctttctgttgattacaagtgagtcatgagtccactcagtttcaagggagagggcccagatcccatatctccatgggaagagtgccaagaacaccttgtagaaaagcttgtggataggagatattggtgtggtcatccttggaaaacacaatcttccacagtgtgcaagagaggcttcctgctctgcattgtggcttaattattgttgaaataccaggcaagaaaaggtaggatccagggaaacaaatgtatccaggatgttttggtctgccttttctaggaaaaaaggaaaccctcaaagcctctgagactaggtcaccccagtgggactagaagttccacgtggaaccttctgcaaactcctctgcaatagatggactgtgcattttccaaatgtgtctttacatcatctcctttctgaccttgggaagatagtaactgactgtggagtaggaaatccagaaccctgattgttttaaaatatattacagatacaagtaatgaaaagaaggctcctaaggaaaatatagatccgtaatggctttgtcccaaaagctattaggctataatattttattacaaaggctatatttattacaaaatgtatttaaataaatacttaatatttatttaaataaataatatttattttattattaataattaatatttaaataaatataatatttcttacaaaaattaaaaactgggactttatatttaaaggtgagacattaaattctttttaaaaagtgcacatgtaagatttttttctcaagtcaactgaaccagttcatcagtttcactatgaatgtgttgatgcaccaagtatttactttctagaacatctagtagacgtcactaaaaaattataccaagttgaaaaatgtcactgaatcagaggcatgtggttggttatgtagtcatctgtgccagctgggaatatagcaataccaaatgaacagcactgccatgttcccttgctgggttccagcaaaaacactcatcttcactgtcgtctctctttgagacctcttagagaggactttgatgagtgtatggtcttatacacactagtctaacaatacacatttgctcaaggattgggttacgagcaggctcttcacctttcaggtgaacaattacacatcaggagaaggatggaagtttcctatctatgaacaaatatttcccaaagcaataatctctttattcaactcacgtaatgagaagtcagttcctctgtgccataaagcaatctctttgaagtcttcagtaatgttgagggttttaatgttgagggctttatcaaactaaacattcaagtgtcttaggctttccccttagttctttgagcaaattggttgctatgaagtatgttagtgttccgaatgaatggatagcatgatgggggatgtctaggtggttccagaatttagattgtggtttccataacaaagtgtggcagtattggcattagggaagagaaatgacttctaaataacttctcaaagtttactaaagccttaagaatgtaggaaatggccacaaaaggaggtatacaaaacattcctctgtctttattcctctttatacaaacgtattcactttcccatcagcaagtcataaaatacttctcatcttgcattacagtaggacacctactataacaataggctacaaaatgtataatggctcaaacacctagcagtttatttcttatttacttaacaatgctgggtccacgaacatgttgatatcataaccctcttttatgtggtcactcagggactcaggctgttgagggctctgtcatcatgaatgggtggcttccaaggtcatcctaagagttatctccattctaaccagtccagccagaaaggcagaacaggcttggaggagcaaagatatccatggatagatcatcctcttaaagtcattgtagcattgtgatagggctcttttcacaaaacaaggatacagtccatgttttcaagattttacattttagtagccacaatacaaagaagctaagatagtcttgtgatttgtcatcatggctgttaatggagagtgttttaaaagcactgatatcagggctccaccctcagcttccaatcatcaggtttggatggaacctgacagctgcatcttgtaaaactccacgggagattctgagagacagccaagtttgagattcacaaaccttaagagaaaaaatctccttgaattgccataacaaactaccagtctaataaaacatacatattcctttgactactcttaaatgaaacaaataggtaataatttacctgtacatataattaaaaatgtaatgtattttataaccatcatataaaggagaaattatattaaactatattaaaataaaatgatatatatttcaatgcagatgcccaagcttgactaaagtaggaaacataataaagtaataaaatgcttatatgtacttataatgaatgtttggctatgagaagatgatcagaggctttttgtccaagaagtacaggcatatgaaaaagtagagcaagagatggacaccagactgagaaaactaaaaactaaccaacctatttgtgtatgataaaaggagagaaaaaaaattgattagtaaaaatatgctaccgtgtggtctgaatgtttgtcccttccaaaactcatgttgaaatttaatcccccatgtggcagtattgagaagtgggacctttaagaggtgattggttcaagaagattctgcgctcatgagtggttgaaaccattcacggaataacgggttaatggatcaatgagttatcccaggagtgggactggtagctttataagagaaggaagagagacctgcgctagcacactcagcctccttgccatgtgagccatctcgggaccccgcagagtccccagcagaaagaaggccctcacccaatgtgtccccttgacctaggatttctcaacctccataactgtaggaaatgaattccttttctttgtaaattatccagtttcaggtattctgttataaacaacagaaaatgggctaaaacacacgccaagaaaattgaaagactgtggaagtgaaagaagaataaaaaatgaagtaattttgcaaatgagtctggctttattataagtgtattgtcaaagtgattccctttgttataagatgaaaaagagccaaaatggatagaaacatttatcctatcttaatatcccactacattcaaggcaaatattcagtcagtctctagaacttaacaaggccttggagatgatatcctttggatgagcaatggagaagacaagatggattggaaaaagaaacaaacaaacaaaaaaacatgtaagaggctatcaggaaaactctggagacgatgtcaatgtaaaacagatacaaacctcaaaataattttaatatgtacattgcacaaaaatggacttcttatcatgttacaaatttattttaaaacatataggaggcaacaacaatatttcattgatgtgtactattttataattgttggctctaattttatttagtagagtcttacatctcctctctacatatttacatccggttgtattgtttttgtagtacctgttcaactgcactgaaatcatttcaattaaatgcatggttgaaaagctgacataatacattcaattgccaaattgcataaagtgaataagctatttaataatttggagaaaatatattccatttaaacttccttctctataaccagttcatacactggaccttttgggcacagccatgtgaaagcttttcaaaacttttcactacttttttttgagacggagtctcactctgtcacccaggctagagtgcagtggtgcgatctcggctcactgcaacctccacctcccaggtccaagtgattctcctgcctcagcctcccgagtagctgggattacaggcacctgacaccacacctgactaatttttgtaattttagtagagacaggatttcaccatgttggccaggatggtcttgaactcctcatctcaagtgttccgcctgccttggcctcccaaagtggtgggttacaggcatgagtcattgcacccagccactatagatttttatttgtagtagatttagttcagtagggcatttgagaggcataggaactggaacaaatccttcattgtttgggactgccttgcacattgtaggacatccagtacagtcccttccacgaagtggcagcagcagcctcgggctgtccaaacaccctgttagggacagtgccactcccggaaccacagaagaaccacaatcataggagaagcatacaacaaacatggtgttcatcggacggtcagcttcagtggcacttttgagcaagcacactatttggttgtagaatgagtccctggcagggcacccgaaaggctgatgtgtgactcatccctagtacctctgagaatgctgaaatctcctccttctccaagctgagtggcagctttctggtccagactacttaaattgtgacttgaggaattttcttcactttttcctttgagtcattctgtttttgatcaagatgcgatagaatgaaggattctttcagggtctgctgtcacatccttcctttgggaacagatagaaaatctggcctggcttgaagagtttgtcctcaaacatctggtaagccataggcatcagcatctcttacttctccagagacatttagatgtgtcccccatctccatggaggcccatggcaaggggacccctagttgtactagagcttccttctgggcacagccacactgcacaggcactgcagtgtacagcacagctcctccagcttccggaagactccattatctagaaaagtgctgagaaatggagaagggggttcctctggggtggagatggaaagaggaaaaggaagggagaatgtccaagcaaaatgagagaaggtgagggacagcagaattgagagtgagggagagggagagagcaagagactgggttgagatgtcttgtacatgggggtgtcctcgtggcttcactcccctttcgtttgtaccactccgtttccccagactcttcctaaatatccccttattggctacaagatccagattgcctagaagctcagatttgctgacagcacctcaagactggttaatgacatatagattttttcttgtttccatctttgggatttggagcaatctccagagttgcaaaagcctaccttgttgcaataatatttttgagggtccacactgtctgctcacttgctctatgctgctgggcacagtggtgtggccatccagggtgggagagaccacctgggatatggaaattaccagcagccctgttttgctcttgcagtggttgccaaagcacacgaagcattctgggaatctgaatttctgttgtttctcccaaatggcccctgaagggcaacaggcagcacacatggaccacattttgccagaaaagtccagaaagaagatggctgctgttgtcaactattggcatttcaacaggacctatttttatttctcagtatatttgcacaactaggaagcatctgctgacaaggatgagatgataagctgtattgatgccaaaacaggactagaaaaacaggcttgttctgcaaatggcctgcatcctgagagtccgtgttaagaacattctctctctgcaggcaatatctgctcttaaaacattaacacttgaaaggaagtaaggcttggaatccttagcatagttatgcacacactaggttctcagtaagtgcatgctggatgaaggaacccacacgcaccttaaggaggatggaacattggcagcccaagaaaaaagtcactccccagaggccgagtgccatgtctttgacctccattggcaaggtcatggtgaaatgctgtctcttggggtcgctgaggtcccagcacggtgtgccttcacaccgtgcaaacaataagaagagaagagatgcacacatgtcacctttccaggcagggacatccaagctgtttgagtctccattctgtgatttccttgaacaagaaagggattattggtgaatgaggccagcatcctgggtgggaacaaaaaaggaaattggtagaaagtacatcatccaagttggtctaactcagccctgtggcttgggcgggttcctaggatatccagccggaggcagaggctctaggggatgtgaggctgcactgggtatgatgacacagaggactgtgagaggcagagaaaaggggagaagagctgaggccctcctagccctaacctcccagctcacaccctctgctatctgccacctccaggccaacaccacggccatgggaggtttgcccatttttctgatagacacattctttctctaccaacagcccacatggaacataagtgaagtaattcagcagtttccttcttaatctgctgtctctctgctgcttactcattctgtgctgtttgctttagatcaaggtgccccagggtaccaaaagctacattatcctattcaactgcatggaaaccaagatcccgaccattctggtttgttgttattgttacgttagttttaaaccttagccattttccattctgggcagttacaactctgtttactatgagttcctctgtgtagatgtttctcccatacccgacctacaaactgctacgtgagcagtaacttgtcaccatgttatccgcataaagtcagggattgataaacttgggagcctttagctcttgaaggtgctgatgaggaaggggagaggggaggagaaggaatttgtttgtgagatggtcagtgggctgaatagtggtatgaccaaaaagtgttactataaatacacataatctggaaaacaaaaatactgtcatctcctccctgcaaggcgctgtgattaggcaggatggagcttattgctgcagtgttagaaaatgcatccttgtagtcccaaaaaagcctgttccatcctgcccatctcttgttctcaatacttcttacttcacggtcactcattttcttcctgtccttgggttgaggtctcaacttcttgtaatagaattttttcagttataagcgacagaaatccaactcacactatcttaagcaaaaaggggattcactgatacgtgtgttaggaaggatatatgaaagctcaaaggtcaagtgaaaaaaatgtaagaacgaagaccttggtggggtgtggtggctcacgcctatcatcccagcattttgggaggccgaggcaggtgggtcacaaggtcaggagttcaagaccagcctgcccaagatggcgaaaccccatctctactaaaaacacaaaaattagccgggtgtggtggcaggctcgtgtattcccagctacttgggaggctgaggcagagaactgtttaaacctgggaggcagaggttgcagtgagttgagatgtgccactgcactccagcctgggcggcagagtgagactctgtctcaaaaaaaaaacaaaaaaaaaaaactaagaccttgtgactactacctactacctggatctctctctctctctctctctctttctctctctctctctcacccccccacactatcacctctccttgttgtcagtagtttcctttctgcagacaggagttccatgtgctgggaagagggccattcagagcctcgtattctcatcctctcagtttagcaatgcgagaagaaaaaacttttgtctcacaacctcatatacaatctcagaaataggctcttattttctggcttgaggctgtccagaggcaccaggcactgtgatggtctcactttctgtcctggatctatctgtggggcccagacagcaggatctatttcagaaaataggcgagagaggaaaaacttatgtggccgtaaaaaacagcggttttcaagtggcctatccccatccacatcataaacttttctgctgaggcttaaaagtgcttagacttcaaacttgatctaaaacagaaatcctacctggaaaaatcaccttccagtcacttagccaatcgctcatcactctctgtctctgaatctcaccacgagtttcacacgtctcccgagagagcgtctcctttatcattaccacatgtggagtcagcagattgggtttcatctaagctctgcctacctactatccgagttccctagcaggttagtgactttctctgcctttttgtttcttgatgtgaaaaggaacaacagtggctgctcacagggttgtcagttacatggtcaattacattacatggacaattcatgatggtgtcagacctgtctgagaaaaggtggcccatgttaccatgacaggccccaaggctaacagcccctttctgggtcatggctcatacaaaggagccctccttggtttgctggtgctctgagacttgcaaatgcattaggaattttacactgtaacccggttttaaatgggtccagagcatccccattgctagactactgtgctgaggaagggcactggctcattgttacatcccatgaacactctgggtctcctagacctcatcctctttgagcttctctctctcactctctctctgcgcattcaggagtgtacacatttctgtccagcaccctgaagtctctggaagagaaggaccatatccaccgagtcctggacaagatcacagacactttgatccacctgatggccaaggcaggcctgaccctgcagcagcagcaccagcggctggcccagctcctcctcatcctctcccacatcaggcacatgaggtgaggcatctgtgggcttcctacaggagagacataaagaaaacatgcccccaaacctatgtgacagctggccgggaaggactggtgcctgcatatggagagtgcacttgtgacagttcctggcatagaataagcataaatgctataggaggacagaagagagaggttttaaatctgcgagggtcacagggcaagtgtcagagaaggcatagaggaagcgatacttacgcttggtttaaagcatgtgctttggggcagtggtttagagattgggtgcagtgtgcaaataggaggagggggccaatcaagagaagtcagtgaatgtacacatcccctgaagacactgggtacatctgttatggtccctgtgtacactcggatattctaaatgagagaccctggggccagatgcctcacggagagtcaatgttgactccttcatacctgttgaaccccttcttgtcacccccattgccattaccctagtctaagccaccatcattttctgttggacttctgtgccagtcactggatgtgtatccctgcctgtaatctagatcctttctagatcattctccatgatgtgtccagagtgatcattctagaaccaaatctgatgtcatcctcctgcttaaaacccttaagttctcattgcttttagataaaatataaaccctttcactttgtttttattactccttatgattcagcccttacttagcttacaaggacttcctcatgtctgagctctagccataatagctgactgttggatgagtcatcggggggaggttcttcttcaggctgcagattggcggtcagccctcctgacctcagctgggctcactcacacatctgggaggcagctgcctgaggccagggtgactctgctctatgcctcatgtctcctatcctccttgtacccacatgttagctgggacatgttctcatcgcaatggcagaggcatgagaaagtgatcctgtttgggcaagtgcattttactcttttctttcactcatgtccactgacatttcattggccaagcaagcatgtggggtgtccagagtcaaagagggacatgttgccggggtcatgactatttctgagcaataatctaacctatcatagctcagatctcactccttgcaggaagcatctcctaatccttaagacctagttggaacttacactctgttcttccctatggttactgcccattttactatttttctgcccatttagactgacaactctgtgagccatcattgcaatatggcttgcttacccaatatcacctagcatgatgtagagcacatagtaaatactcaacaaatgttttctgtaagagctaaggaaggacatcagcagacaaaatagagtctttctatgccaaaaggtgaaagtggtctcatttccattccattgtcctgtaatttggctagccaaaagcttagtggataccattcccataagtagacctcatctgcagggaagagatggggagactgctgggttatttattgcagactccagcaggaccacaacaatgattcaaagtgatgacactagaaggacaggtgccaatgggtgatgaagccacaatgacgatgtcaagtggtatcactaaaaggacaggtactcatgggtgatgaagcctacatgaccttgggcttacaccaggaccctaggaatgaaagagattccttctcttagtggctatgagggaaggcctatgatgtcttaaggaggttggattcgatcatttttaagggaccttcaaatccttagaccgtgattcaaatggtaagaagtttgctccattaaactcccaggcaccaccctttccggagacaacctttaaaaattattagctcctgggaaaatagatgtatctcattttctttgtatccctcacagtgccatatgtgaagacttacatatggtatatgcccccaacattactactgagtgagtgaacaaagaaatgagggaatgaatggatgaacaaatggctcatggcaggcttttccctgccctgtgaattcggcttctacttggtaagaaggtgattgcaatctctgttctcagggttccccaaggattcctgtgtaacagatgaaggaatcacgtctgtcaggtagagtaggtgactgcattcagagtatacatttccagtctcccctgtctttttcttttgatgagtattatagagagggaagccatgagtggattagatgccaaaatccctggctgagagaataaccttaccctggaggaaaacatattagctttgactctgagctgggaatttcggtgatgttgtagattcaatgcattgcagttgggtgtttttatttgttgaaaggaattgctgaattttcaaatccattaactgcttgtcagcattagcaagcctaattagttaatactaagtaaatttgcactaaatatacaaccctggctgattttactggccacgtctggcagagggcagcagcagggagaaagctctgtagagtttctgttggaatcgtgtgaaaagctggagaggttgcttctctttctctctctctctctttctctctctctctctgacacacacacacacatacacacacacacaattgtaataataataatattttggttcctcactaagccaatctaaatcgcagaagtctattttgttaagtaagcttggccccagccatatgttgctactcagagaatttaatatcagatttcatctgactgtaaacgtgaatcatcaggttgcacaaggaacacagtggcagatccagggggcatttaacttttatagcattttaaatgaaaaaaaaaaaaagtaacacttaaacaagtaatttagatcatgctgtaggccctgaatagctttgatgttgtgttttcatggcaagtctccaacttgagctgaattttcccctactaaaaatgcaaatttttctaagaccttctcttggtcctgctactcatgatacatatttcttttaaaagaaatttcaaactagataatagttgttctcctccccacccccgccaccagtagtgtggtggggcagcagagttgtggctagtggaggagagcagaggaggagagtagggaaaggagaatgccatttgcctacatttccctctgcccatttccccctgcccatttccccccttgttttcctgaacgtgaactgagctctgggcactgttttaggcctagcaggggacaggataaagcctgcttctctaggaattcgcactgagggtgtgagtgtgtgcacgtgtgtgtttggaggcgggagaataaacacaaataaataaaaaggagaatttcaggcagtgataagagtgctgagaaaaacagaacggtgtgaaagaggaaggctgagcctgcagaggcttgaggctgctgccactgggtagcggtaggcctttccgaggaggcggcatttgaagaccggaggaaggttcatcccagcaagtaggaacagcaagtgtaggtcccctaagtcttgggggagcttagttcctttaagggcagcacaaaaatcagtgtggctccggagagcacattaggggagagaggcaggaagagcttggagacatggatggaagctggaccagttgggccttgttgaacatggaaaggcatttagatcgtattctgagttaaatgggaagtgacgtgagagatttaacaatggagcgtcttgaactgctttactcatttaaaatacccactcctgcttggctgaatatctcatgttgtctttttagaagctttggcgatcctatttgaatgcatttaggtcctattggaggggaataggatctcatttgaggccacggaggtccatggaagtcacctgcatagcaaataccctgaaagtggctgcagggagagtgtgagggtgggaccgccctggtaggaggtggaaaatgaaaaacacacggccatgagttccagattagggcttctgaaagccctcagctttcccagctcccatcctaaagtgggtctttaaacaggaagaaagaaagattgctaagtgtctttggagttcctcttccttccccttctagggatttcagcactcctggggctcgggttggctctaaagtagtcctttctgtgtcttcccacctacagtaacaaaggcatggagcatctgtacagcatgaagtgcaagaacgtggtgcccctctatgacctgctgctggagatgctggacgcccaccgcctacatgcgcccactagccgtggaggggcatccgtggaggagacggaccaaagccacttggccactgcgggctctacttcatcgcattccttgcaaaagtattacatcacgggggaggcagagggtttccctgccacagtctgagagctccctggctcccacacggttcagataatccctgctgcattttaccctcatcatgcaccactttagccaaattctgtctcctgcatacactccggcatgcatccaacaccaatggctttctagatgagtggccattcatttgcttgctcagttcttagtggcacatcttctgtcttctgttgggaacagccaaagggattccaaggctaaatctttgtaacagctctctttcccccttgctatgttactaagcgtgaggattcccgtagctcttcacagctgaactcagtctatgggttggggctcagataactctgtgcatttaagctacttgtagagacccaggcctggagagtagacattttgcctctgataagcactttttaaatggctctaagaataagccacagcaaagaatttaaagtggctcctttaattggtgacttggagaaagctaggtcaagggtttattatagcaccctcttgtattcctatggcaatgcatccttttatgaaagtggtacaccttaaagcttttatatgactgtagcagagtatctggtgattgtcaattcattccccctataggaatacaaggggcacacagggaaggcagatcccctagttggcaagactattttaacttgatacactgcagattcagatgtgctgaaagctctgcctctggctttccggtcatgggttccagttaattcatgcctcccatggacctatggagagcagcaagttgatcttagttaagtctccctatatgagggataagttcctgatttttgtttttatttttgtgttacaaaagaaagccctccctccctgaacttgcagtaaggtcagcttcaggacctgttccagtgggcactgtacttggatcttcccggcgtgtgtgtgccttacacaggggtgaactgttcactgtggtgatgcatgatgagggtaaatggtagttgaaaggagcaggggccctggtgttgcatttagccctggggcatggagctgaacagtacctgtgcaggattgttgtggctactagagaacaagagggaaagtagggcagaaactggatacagttctgaggcacagccagacttgctcagggtggccctgccacaggctgcagctacctaggaacattccttgcagaccccgcattgccctttgggggtgccctgggatccctggggtagtccagctcttcttcatttcccagcgtggccctggttggaagaagcagctgtcacagctgctgtagacagctgtgttcctacaattggcccagcaccctggggcacgggagaagggtggggaccgttgctgtcactactcaggctgactggggcctggtcagattacgtatgcccttggtggtttagagataatccaaaatcagggtttggtttggggaagaaaatcctcccccttcctcccccgccccgttccctaccgcctccactcctgccagctcatttccttcaatttcctttgacctataggctaaaaaagaaaggctcattccagccacagggcagccttccctgggcctttgcttctctagcacaattatgggttacttcctttttcttaacaaaaaagaatgtttgatttcctctgggtgaccttattgtctgtaattgaaaccctattgagaggtgatgtctgtgttagccaatgacccaggtgagctgctcgggcttctcttggtatgtcttgtttggaaaagtggatttcattcatttctgattgtccagttaagtgatcaccaaaggactgagaatctgggagggcaaaaaaaaaaaaaaaagtttttatgtgcacttaaatttggggacaattttatgtatctgtgttaaggatatgtttaagaacataattcttttgttgctgtttgtttaagaagcaccttagtttgtttaagaagcaccttatatagtataatatatatttttttgaaattacattgcttgtttatcagacaattgaatgtagtaattctgttctggatttaatttgactgggttaacatgcaaaaaccaaggaaaaatatttagtttttttttttttttttgtatacttttcaagctaccttgtcatgtatacagtcatttatgcctaaagcctggtgattattcatttaaatgaagatcacatttcatatcaacttttgtatccacagtagacaaaatagcactaatccagatgcctattgttggatattgaatgacagacaatcttatgtagcaaagattatgcctgaaaaggaaaattattcagggcagctaattttgcttttaccaaaatatcagtagtaatatttttggacagtagctaatgggtcagtgggttctttttaatgtttatacttagattttcttttaaaaaaattaaaataaaacaaaaaaaaatttctaggactagacgatgtaataccagctaaagccaaacaattatacagtggaaggttttacattattcatccaatgtgtttctattcatgttaagatactactacatttgaagtgggcagagaacatcagatgattgaaatgttcgcccaggggtctccagcaactttggaaatctctttgtatttttacttgaagtgccactaatggacagcagatattttctggctgatgttggtattgggtgtaggaacatgatttaaaaaaaaactcttgcctctgctttcccccactctgaggcaagttaaaatgtaaaagatgtgatttatctggggggctcaggtatggtggggaagtggattcaggaatctggggaatggcaaatatattaagaagagtattgaaagtatttggaggaaaatggttaattctgggtgtgcaccagggttcagtagagtccacttctgccctggagaccacaaatcaactagctccatttacagccatttctaaaatggcagcttcagttctagagaagaaagaacaacatcagcagtaaagtccatggaatagctagtggtctgtgtttcttttcgccattgcctagcttgccgtaatgattctataatgccatcatgcagcaattatgagaggctaggtcatccaaagagaagaccctatcaatgtaggttgcaaaatctaacccctaaggaagtgcagtctttgatttgatttccctagtaaccttgcagatatgtttaaccaagccatagcccatgccttttgagggctgaacaaataagggacttactgataatttacttttgatcacattaaggtgttctcaccttgaaatcttatacactgaaatggccattgatttaggccactggcttagagtactccttcccctgcatgacactgattacaaatactttcctattcatactttccaattatgagatggactgtgggtactgggagtgatcactaacaccatagtaatgtctaatattcacaggcagatctgcttggggaagctagttatgtgaaaggcaaatagagtcatacagtagctcaaaaggcaaccataattctctttggtgcaggtcttgggagcgtgatctagattacactgcaccattcccaagttaatcccctgaaaacttactctcaactggagcaaatgaactttggtcccaaatatccatcttttcagtagcgttaattatgctctgtttccaactgcatttcctttccaattgaattaaagtgtggcctcgtttttagtcatttaaaattgttttctaagtaattgctgcctctattatggcacttcaattttgcactgtcttttgagattcaagaaaaatttctattcttttttttgcatccaattgtgcctgaacttttaaaatatgtaaatgctgccatgttccaaacccatcgtcagtgtgtgtgtttagagctgtgcaccctagaaacaacatattgtcccatgagcaggtgcctgagacacagacccctttgcattcacagagaggtcattggttatagagacttgaattaataagtgacattatgccagtttctgttctctcacaggtgataaacaatgctttttgtgcactacatactcttcagtgtagagctcttgttttatgggaaaaggctcaaatgccaaattgtgtttgatggattaatatgcccttttgccgatgcatactattactgatgtgactcggttttgtcgcagctttgctttgtttaatgaaacacacttgtaaacctcttttgcactttgaaaaagaatccagcgggatgctcgagcacctgtaaacaattttctcaacctatttgatgttcaaataaagaattaaactaaagacaacgagtttgttttttgtaagctccacttcttgctagcagttcaccactgatcctctaaaatcaaggtggttaaacgatctgtcacacacagtgagtctgaatgctaaagcctctcctcacctcactccctctgcccaacacccccaggtgtatcaggaagtgtgtggacactgtggtcaggcagaactggcctcaattcttggcttcaccacttacaaattttatgatcattggcagttgatttttcagagtttcggcttccttatcaacaatatgatgataagtaataacacctaattcacacgatggtggtgaggactaactgaggtgctcattaaacatagttgctgttttttaatgcctggcccaaatccttccctgtgagggagaagaaggatgcttgagagtggttatttatgaatgaatgagtgaatggaagaatgagtgatctgaaatgatataattagcttaaaaacctctccctcattctgaaggtaaagcaggaacaattggtccacccccaccccaggtttccatttcaggactcccttccctttttggagctacctgcgtgcttcctttacccattttctcagatttaactgatgaattgggagggggtgggtataggacttactgagatgcaacataatattcacacaggctctgcagctagattactgtttgaatcttcattctacctttttttttttttttttttttgcatcaccttgggcaagttgagttccctgggcctcagtttcttgacttgtaaagagagatgacagtgcatctgcctggaagggttcttttatgaagaccacatggttcgctcatggagagtatggaaggaccgtggctgacactgcttctccctctccagagtcttccgaaactgcacgttggactcatttctttattaggatgggttgagggtcttctcattgtttgagtcacatggatttcaggaaactaattcattttcttgtccaagcattcccttggcaagttcttcaatccctgttttcaatggtttcctcatttctaaaatagaaacaagaatagcacttaccctatagcagtactgtgaagattacaagactggacatgtgaagtgcccaggatagtaccacacatagtcagcactcaatccacattagctatttttatcacaattattgttgccctgtctgagcatctacatttaatagaatgatggatatgtttagatttacatttttcacgttattatcgttttgtacatgcctcctgtctttgttcctctgttcttactgcctttcgttgttttagtgatattatggtacaataagaaatatatatttggtctctggccccagtttctgagacaatttctaaaactcttgtagacaggggtgctaggaggctcttttgttctaatatttggtctttgaccctggtttctaacacagagctcccaaatcccttggaatttcctgggcaatagaaacttcttttgttctaatgaggcagctcctggtgggctcctggataacctcaggatggggaatcagccatggcattaaagggttggaactttcagctctaccctttgacctctggagaggctcttgagaggctctggagaggggctgatggttgaatagatcatcagtggccactgatgtaattaatcatgtctatgtaatgaagctgccataaaaaacccaggaggacagtgttgagagagcttctaggttggtgaacacttgggggtgtctggaagacagcccacctggagaggacacggaggctcttcgcaccttcccccatacctggctctctccatctcttcatttgtccatctgtatctttttcattatattatccttgataataaactggtaaatataagtgtttccctaagttctatgagccaccatagcaaatgaatcaagcccaaggaggggtttgtggaaactccaatttataaccagttggtcagaggtataggtgacaacttagtactttgcaattggtgtctgagatggggggcagtcttgtgggactgagcccttaacctgtgggatctaacagaaaacctttaaccttttccccccaaattgttaaataaatatttttagggtgtcattttaattcctctgttaatttttttttttttttttgagatggagttttgttctgtcacccaggctggagtgcagtggcacaatcttggctcactgcaacctctgcctcctgggttcaagcgattctcctgcctcagcctcccgagtagctgggattacaggcgagcgccaccacacctggttaatttttatatttttagtagagacagtgtttcaccatgttgggaaggctggtcttgaactcctgacctcaagtgatccgcctgcctcagcctcccaaattgctcagattacaggtgtgagccactgggcccagccaatttaattattttttgaattattttcttagtgattgctcagtatgcatcttttttttttttttttttttttttgagacggagtctcgctctgtcgcccaggccggactgcggactgcagtggcgcaatctcggctcgctgcaagctccgcttcccgggttcacgccattctcctgcctcagcctcccgagtagctgggactacaggcgcccgccaccgcgcccggctaattttttgtatttttttttttagtagagacggggtttcaccttgttagccaggatggtctcgatctcctgacctcatgatccacccgcctcggcctcccaaagtgctgggattacaggcgtgagccaccgcgcccggcctcagtatgcatcttaatctatcacagtatatttcaaattaatagtaacttaaatctgatgacataaaatgaaaatatttgctccaatgcagctccattctcttattaccacatatattatatctatatatgctataagctcaaccatgttattttattgccttaaactactttctatctttttaaaaaaattgacaagaaatgagaaaaaaatttatggactttagaaatactaatctgcgtatttgccaattccagtgtgcctcatttcttcctgtggatttgagttactgtctggtgtcgttttcttttagcctgaagcaattcatttagtattttttgtaaagtgggtctactagtaacgaattatcttggtctttgtttatctggtaatatattaattccaccttcatttttgaagcgcggtttgtagtttttttgaatgtggaattcctggttgatgatcattgatgtttttgtttcagcactttttgttttgctttgttttgttttttgagacagggtgttgctctctcacccaggctggagtgcagtggcacaatctcagctcactgtagcctccatgttccaggctcaagtgatccttccaccttagcctcccgagtagctggaagtacaggcatgtaccaccaaacccagctaattttgtttgtttgcttatttatttatttattgtagagatgaggtctcattatgttgcccaggctggtcttgaactcctgggctccagcaatgctcctgccttggcctcccaaggtgctgagattacaagtgtgagccaccatgccctgcccagcactttgtatatatcatcccattgtcttcaggcctccattgcttccaatacaaaatcagagccacccatgttttgatgctcacctgtatctgacaagttactttttctttattgcttttaagattttatctttgaacagtatgactataatgtgttttggtgtagatctttttgtatatattctacttgggaatcactgaacctcttgaatgtgtaaagtgatgtttgtcatcaaacttgggaagttttcagccattgttttttcaaataatgtttttcccccttcatctctcccctcccttgctgagactctctttacatatatgttggtatgcttgatgtcaatcccacaaatttctgagcatttatttattttcttttgccttttttcctctctgttcttcaaattacataatttctattcatttatcttccaggggactgttttgtttttcttctgccttcttgaatctgaggttgagctcttctagtgaatttttatttccattattgtatatttcaactacagaataaaaattgattttttaaaacttatttctgtctcttaagaattcccatttgttgattcattgttgtcatactctaattctttaaacatggtttccttcagatatttaagcatatttataatagctacatgaagtctttgctaaatccagcatctgggaaacacatagtttcttttgacctctgctattcctgattgtgggccacattttcctgtttctttacatatgtcctaatttttattgaaaactgaacattttagatactctattgtagcaactctggattcttattcttccctgcttgttgctactgcttgattttgttgtttttattcattttttaaataactcacctgaattaaatatatgagacttgcctctactagtatttggcttctgatatttctgctaggttcttaaattattattcctgtttttatttttaagcctgactttctcagagttgcccctatctccacagctgagcgtgtatccaatgactaggctcaaacaccctaacccagcaaggcttctgtcctccaccgatggatctgtatgtggctggagaatgcattcaattttcaggctgttttcaactctgactcaattttttgctgggcccctttgcatctcctctgcacatgcacacagccgtcatggtcagacaggagtcaggggctagctagcctgggcacactctgatctcccctaggcatgtttgcagcctaagccaggaatgtgcttgccacggccacaacctcaagctagtgaagacattggccctgcacactcatccaccaaatcaagtgagctcccctgtgactgcagcaacaaagctgtcggtccttctacctgccttgttctgttgctgaccaaactgggggaggtaagggtgggagcagccccaggcaagaatgccacaaatctgcactgtacttatacaaatttcagcaatttttcaatataaacatttctcagattgttatacatctttggtcaacttgcagagtgttgaaatagttgtttttgtcaattttgttcaaccttatagtttctttttggagtgaggatttaccaatactctctctcagccatagctggggatctcacctctccacataccctgtccatcctttatttctcttatcagaacaccaaggagcagacttgtctacatatgccatgtgttatttctggggatcagcaaggttttgagagaatactgagcaatctatggagcttttaaatgtacccattggagtgtgccaatgtaggaatgcctgactggggctggattacatactaggtaaagagcacattctccagtgttagatattcttaagcctttgggaacatttaaactcagaattaccacgtttagatttgcttctccaaaaatacagaatgtacgttgtattagcccattctcacgctgctacaaagaaatacctgagcctgggtaatttataaagaaaagaggtttaattggcttacggttctgcaggctgtacaggaggcatggcagcatctgctcagcttctggggaggcctcaggaaactcaatcatggcagaaggtgaaggggaagcaaggacttcttactttgccaggaggagaaggcagagggaggtggggaggcgctacacacttttcaacaaccagatctcacaataactcacttactcactatcacaaggatagcaccagaggggatggtgctgacccattcaggagaactccgtcccatgatccactcacctcccaccaggccccacctccaacactagggattacaatttgacatgagatttgacgaggacacagatccaaactacatcatacgccttaaataagtaaattttcatagttttcattatttggactatgtgcattaagaagctagttttaagttcacattcgtggtggcttacagttaaaatatttggggctgggcgcagtggcttacacctgtaatcccagcactttgagaggccaaggcgggcggatcacctgaggtagggagtttgagaccagtctgggcaacatggagaaactccgtctctaccaaaaaaaaaaaaagaaagaaagaaaatacaaaattacctgggtgtggtggtgcatgcctgtaatcccagcttctcaggaggctgagtcaggagaatcacttgaatccaggaggtggagtttgtggtgagccgagattgtgccattgcactccagcctgggcaacaagagcaaaactctgtctcaaacgataacaacaacaacaaaaacagttgcaatatttgtgaataccaccaaaagagcagagctgagaccagagaaaagatgttcgttcaagacagagatacactttctaacagaactgcctatagataacctggggtgccggttgaagggaagggtggggagaatttcctgcaacgggagacacctctgcatggatccataaccatgaagctacaatgttgttgaaaagattccctcagcagatggaatgttctttgatttttctttctactgtgagacagcatacacacccacattcatacacacaaaagctacgtaccagttttacaccactttttcaggtaatcctcacagctaccatataaggataaattattatattttacagatgaagaaactgaagcctaaggcagttaagcaactcccaaaggtcagaaatcttgtgaatggcagacatgaaattagtcttcctgactttaaacatgagtggtacttcttagaccagggttgagcttcctaggaattactgagagttgctgagtacatatggaattttactcaaggactagagtgaatgttagttttgcatgtaatgcctgtcaatggtagactggataaggaaaatgtggtatatatacatcatggaatactatgcagccatgaaaagaatgagaacatgttctctgcaggaacatggatggcgctggaggccattatccttagcaaactaatgcaggaacagaaaaccaaatactgcatgttctcacttataagtgggagctaaatgatgagaacacagggatacataaaggggaacaacacatactggggcctatcggggggtggagggtggaaggagggagacaaacaggaaaaataatgaatgggtactagacttaatacctgcgcgacaaaataatcggtatgccaaacccccatgacacacatttacctacataaccaacctgcacatgtactcctgaacccaaaataaaagtttttttcaaaaattgcatttaagcaagctttcacattttctgaggagaaagaaaaactcataagaacttttaacgcaaaaggagtatttcatcaaagaaatatgacaccttggacaggatgctgaaagctatgtccatactcaaatcctggagaaatgtgtcccggttgtctttctggtgggcagccgttgggtagggaagcttgaggagcacttccaccatcttcctggcacctgggggtgccagtgctcttggtttctgaggcccctttcctgcctctgcttcctgctgaggagtggttttcctctgtaccttggcaccaggaggagctctatttctagccgatgacctgagaccttgaagcctgcagcggtggcaccctcactagcagcagggcctgtctcagcctctgacagtttctggggcaggctcaccctccccccgttgccacaagaccatctcatggcccaggaagggaccacagcccacagtgaaagcacttggcatctatgtagaactgacaaactaggaactgtcacctcactaaatgaacgtgaaaaaagataaaactggagcaaggaagcctttgggcaaacatttaaaaaagtgatttcgaaagtgggtgggctgacctcagtggccaggccaggctgggtgcctgggatgcactccaaagtggcagacgctaggccgtttgccaagagccagtcgccccaagggttgcaggacagacagccctccgagcgacttcccagattcagtgcgctgctaggcctttctgcggacctgcaacctgccatcagctgccttttcattgagaaatcagtaattgtgggaaaggccagtgaaaggtttgtgagccggttaacatttttacaagctgattaaattctcaagttcaccccggactcaatggagtttaagctgaaaagattcctgagtatttccacatttccaaccagaaagaacatgtttcaatacccagggccccagaccacaggctggaagggaggggagaagggcagagagagggtgcaggcagctgcaggaaccgtgtcgctgtctcggtagctgctttacacgtggtctcagtgccttgaggacgccaggcgcagaccagttttggggctcaaccccagcaagggaagcatttccttccaattggagggaagggctgatggtgccaaaattggagctgccagatggttccctaagaacggattacaaactagagtaaacactccatcaattcatctttgaatttattactaaatatttttaaacaccctttaacaatccctacaatctaatccattctcaaatgctaaagaaacgtgtataaagaaaaacattaagtgggtttgtcaaaagattggaggtttggatggaaaagtttattttagttacttggcaatgttggtacccactggttttagcccagcatcacaagaacctgggtccaggcagcagaaagacctgaacccaaaaaggacagaactcaaggcagctccaggcttctgtctatggaaaaagcagctaaactttgatctaggtttaaaaaacaatggaaaggcaatgtcagagaacttgaaacaatatggagatttttttcctctattttctgtgattgcttagaagcagaaagttaaaatagatgccctttcaaatttcctgtatctcatttcaagtcaagtgtccccgactagtgagttcctcctttccccagcaactctgtgacactggagattcaagacctcagcagctaccagggatatttaggcctctggagtacacaaaggccaccaaaggaagaaagggcttaacaatgcccccgggatcccatcaagccaatcaaaaggattgaaaaccctgaataagcaaggtttatcaccagccaaactatgtcaccatcctggtgccacactgcccattcccaccgagctctgggaaaccacctatgtgctctccttgccggagggacatacccagccccagaacgaaactctgcagaggggccagctactggcactcctgatgtcagcaccagcagctgacctggcaggcgcccaaccaggaaacgaacaagggaaactggaagcggccaagggatttgcagaaccttctgagcccactgcaaaagaccatgccatttccattctgaagacaaaaacgtgaagtccctgttcccaagaccccctacagaatccaagaaaaaacaaaaagggaacatcaaaatgaaagagagaattcttcatggatggatgtcacgaacgtgttttcagggaagaaccccaaatggcagtcagatggaggtggggcgagtgctgagctcacccaaagaggatgcccattctgagaactgtttcaggagaaagaagcgcaaaaggccggggccgctgcctgtcccaccctgccgccagtgctgtgtgtcttgggtggctctatcacaggtcagcaaatttttctgtacagggccaaagagtaagtagtttaggcatttctgtttgtttgtttgtttgtttgtctctctttgctttacaattctttgaaaatataaaacccattcttagctcaagggcctataaaaacaggcagggactgtaattccctgacctttgtcaggcaccatcaagccacaggtaccctcctgatgaaaggagtaagagtccctgacaggtggtcctctgcatggggcggggggcacctggaaagggagggcctgggaaatgcactcatctgggagggagtctttccattcccactggctgagtcctcagttaccgcagggctgtcgagagtctgagacagaggtctgccctacaacattgtgctgagaagtaacgaactgagctgtacactgacacatttgtgaagagggaagatctcatattgtgtgtgtgtgtgtgtgtgtgtgtttaaccacaatcttaaaaaagaaagaaacaacaattttaacaattttaagagactttctcctcataaaaaagattaaaaacaagtgtgggaaga

SEQ ID NO: 1206 - DNA, 640 bp, Homo sapiens
gggatacgaaaagaccgaagaggagggagaatgttgaaacacaagcgccagagagatgatggggagggcaggggtgaagtggggtctgctggagacatgagagctgccaacctttggccaagcccgctcatgatcaaacgctctaagaagaacagcctggccttgtccctgacggccgaccagatggtcagtgccttgttggatgctgagccccccatactctattccgagtatgatcctaccagacccttcagtgaagcttcgatgatgggcttactgaccaacctggcagacagggagctggttcacatgatcaactgggcgaagagggtgccagaaaggatggatatgtgtgtgatcctgggtgtgccaaatgctgtggcttcctgaagcttagatttccagcttgtcaccttcaaggttaccttgtgaataggacttttttgagctatttctatccagttgactatggattttgcctgttgctttgtttccaccaactctccctgaagatgaggcgcacagacagacaactcacaggcaagaacagcctggtccatcttgaaagattctcaagactattctccacaagataattgtctacttttaaaaatattcagtaaagggaatttttgctgtt

SEQ ID NO: 1207 - protein, 112 aa, Homo sapiens [sequence omitted]

SEQ ID NO: 1208 - DNA, 6880 bp, Homo sapiens
gagttgtgcctggagtgatgtttaagccaatgtcagggcaaggcaacagtccctggccgtcctccagcacctttgtaatgcatatgagctcgggagaccagtacttaaagttggaggcccgggagcccaggagctggcggagggcgttcgtcctgggactgcacttgctcccgtcgggtcgcccggcttcaccggacccgcaggctcccggggcagggccggggccagagctcgcgtgtcggcgggacatgcgctgcgtcgcctctaacctcgggctgtgctctttttccaggtggcccgccggtttctgagccttctgccctgcggggacacggtctgcaccctgcccgcggccacggaccatgaccatgaccctccacaccaaagcatccgggatggccctactgcatcagatccaagggaacgagctggagcccctgaaccgtccgcagctcaagatccccctggagcggcccctgggcgaggtgtacctggacagcagcaagcccgccgtgtacaactaccccgagggcgccgcctacgagttcaacgccgcggccgccgccaacgcgcaggtctacggtcagaccggcctcccctacggccccgggtctgaggctgcggcgttcggctccaacggcctggggggtttccccccactcaacagcgtgtctccgagcccgctgatgctactgcacccgccgccgcagctgtcgcctttcctgcagccccacggccagcaggtgccctactacctggagaacgagcccagcggctacacggtgcgcgaggccggcccgccggcattctacaggccaaattcagataatcgacgccagggtggcagagaaagattggccagtaccaatgacaagggaagtatggctatggaatctgccaaggagactcgctactgtgcagtgtgcaatgactatgcttcaggctaccattatggagtctggtcctgtgagggctgcaaggccttcttcaagagaagtattcaaggacataacgactatatgtgtccagccaccaaccagtgcaccattgataaaaacaggaggaagagctgccaggcctgccggctccgcaaatgctacgaagtgggaatgatgaaaggtgggatacgaaaagaccgaagaggagggagaatgttgaaacacaagcgccagagagatgatggggagggcaggggtgaagtggggtctgctggagacatgagagctgccaacctttggccaagcccgctcatgatcaaacgctctaagaagaacagcctggccttgtccctgacggccgaccagatggtcagtgccttgttggatgctgagccccccatactctattccgagtatgatcctaccagacccttcagtgaagcttcgatgatgggcttactgaccaacctggcagacagggagctggttcacatgatcaactgggcgaagagggtgccaggctttgtggatttgaccctccatgatcaggtccaccttctagaatgtgcctggctagagatcctgatgattggtctcgtctggcgctccatggagcacccagggaagctactgtttgctcctaacttgctcttggacaggaaccagggaaaatgtgtagagggcatggtggagatcttcgacatgctgctggctacatcatctcggttccgcatgatgaatctgcagggagaggagtttgtgtgcctcaaatctattattttgcttaattctggagtgtacacatttctgtccagcaccctgaagtctctggaagagaaggaccatatccaccgagtcctggacaagatcacagacactttgatccacctgatggccaaggcaggcctgaccctgcagcagcagcaccagcggctggcccagctcctcctcatcctctcccacatcaggcacatgagtaacaaaggcatggagcatctgtacagcatgaagtgcaagaacgtggtgcccctctatgacctgctgctggagatgctggacgcccaccgcctacatgcgcccactagccgtggaggggcatccgtggaggagacggaccaaagccacttggccactgcgggctctacttcatcgcattccttgcaaaagtattacatcacgggggaggcagagggtttccctgccacagtctgagagctccctggctcccacacggttcagataatccctgctgcattttaccctcatcatgcaccactttagccaaattctgtctcctgcatacactccggcatgcatccaacaccaatggctttctagatgagtggccattcatttgcttgctcagttcttagtggcacatcttctgtcttctgttgggaacagccaaagggattccaaggctaaatctttgtaacagctctctttcccccttgctatgttactaagcgtgaggattcccgtagctcttcacagctgaactcagtctatgggttggggctcagataactctgtgcatttaagctacttgtagagacccaggcctggagagtagacattttgcctctgataagcactttttaaatggctctaagaataagccacagcaaagaatttaaagtggctcctttaattggtgacttggagaaagctaggtcaagggtttattatagcaccctcttgtattcctatggcaatgcatccttttatgaaagtggtacaccttaaagcttttatatgactgtagcagagtatctggtgattgtcaattcattccccctataggaatacaaggggcacacagggaaggcagatcccctagttggcaagactattttaacttgatacactgcagattcagatgtgctgaaagctctgcctctggctttccggtcatgggttccagttaattcatgcctcccatggacctatggagagcagcaagttgatcttagttaagtctccctatatgagggataagttcctgatttttgtttttatttttgtgttacaaaagaaagccctccctccctgaacttgcagtaaggtcagcttcaggacctgttccagtgggcactgtacttggatcttcccggcgtgtgtgtgccttacacaggggtgaactgttcactgtggtgatgcatgatgagggtaaatggtagttgaaaggagcaggggccctggtgttgcatttagccctggggcatggagctgaacagtacctgtgcaggattgttgtggctactagagaacaagagggaaagtagggcagaaactggatacagttctgaggcacagccagacttgctcagggtggccctgccacaggctgcagctacctaggaacattccttgcagaccccgcattgccctttgggggtgccctgggatccctggggtagtccagctcttcttcatttcccagcgtggccctggttggaagaagcagctgtcacagctgctgtagacagctgtgttcctacaattggcccagcaccctggggcacgggagaagggtggggaccgttgctgtcactactcaggctgactggggcctggtcagattacgtatgcccttggtggtttagagataatccaaaatcagggtttggtttggggaagaaaatcctcccccttcctcccccgccccgttccctaccgcctccactcctgccagctcatttccttcaatttcctttgacctataggctaaaaaagaaaggctcattccagccacagggcagccttccctgggcctttgcttctctagcacaattatgggttacttcctttttcttaacaaaaaagaatgtttgatttcctctgggtgaccttattgtctgtaattgaaaccctattgagaggtgatgtctgtgttagccaatgacccaggtgagctgctcgggcttctcttggtatgtcttgtttggaaaagtggatttcattcatttctgattgtccagttaagtgatcaccaaaggactgagaatctgggagggcaaaaaaaaaaaaaaaagtttttatgtgcacttaaatttggggacaattttatgtatctgtgttaaggatatgtttaagaacataattcttttgttgctgtttgtttaagaagcaccttagtttgtttaagaagcaccttatatagtataatatatatttttttgaaattacattgcttgtttatcagacaattgaatgtagtaattctgttctggatttaatttgactgggttaacatgcaaaaaccaaggaaaaatatttagtttttttttttttttttgtatacttttcaagctaccttgtcatgtatacagtcatttatgcctaaagcctggtgattattcatttaaatgaagatcacatttcatatcaacttttgtatccacagtagacaaaatagcactaatccagatgcctattgttggatattgaatgacagacaatcttatgtagcaaagattatgcctgaaaaggaaaattattcagggcagctaattttgcttttaccaaaatatcagtagtaatatttttggacagtagctaatgggtcagtgggttctttttaatgtttatacttagattttcttttaaaaaaattaaaataaaacaaaaaaaaatttctaggactagacgatgtaataccagctaaagccaaacaattatacagtggaaggttttacattattcatccaatgtgtttctattcatgttaagatactactacatttgaagtgggcagagaacatcagatgattgaaatgttcgcccaggggtctccagcaactttggaaatctctttgtatttttacttgaagtgccactaatggacagcagatattttctggctgatgttggtattgggtgtaggaacatgatttaaaaaaaaactcttgcctctgctttcccccactctgaggcaagttaaaatgtaaaagatgtgatttatctggggggctcaggtatggtggggaagtggattcaggaatctggggaatggcaaatatattaagaagagtattgaaagtatttggaggaaaatggttaattctgggtgtgcaccagggttcagtagagtccacttctgccctggagaccacaaatcaactagctccatttacagccatttctaaaatggcagcttcagttctagagaagaaagaacaacatcagcagtaaagtccatggaatagctagtggtctgtgtttcttttcgccattgcctagcttgccgtaatgattctataatgccatcatgcagcaattatgagaggctaggtcatccaaagagaagaccctatcaatgtaggttgcaaaatctaacccctaaggaagtgcagtctttgatttgatttccctagtaaccttgcagatatgtttaaccaagccatagcccatgccttttgagggctgaacaaataagggacttactgataatttacttttgatcacattaaggtgttctcaccttgaaatcttatacactgaaatggccattgatttaggccactggcttagagtactccttcccctgcatgacactgattacaaatactttcctattcatactttccaattatgagatggactgtgggtactgggagtgatcactaacaccatagtaatgtctaatattcacaggcagatctgcttggggaagctagttatgtgaaaggcaaatagagtcatacagtagctcaaaaggcaaccataattctctttggtgcaggtcttgggagcgtgatctagattacactgcaccattcccaagttaatcccctgaaaacttactctcaactggagcaaatgaactttggtcccaaatatccatcttttcagtagcgttaattatgctctgtttccaactgcatttcctttccaattgaattaaagtgtggcctcgtttttagtcatttaaaattgttttctaagtaattgctgcctctattatggcacttcaattttgcactgtcttttgagattcaagaaaaatttctattcttttttttgcatccaattgtgcctgaacttttaaaatatgtaaatgctgccatgttccaaacccatcgtcagtgtgtgtgtttagagctgtgcaccctagaaacaacatattgtcccatgagcaggtgcctgagacacagacccctttgcattcacagagaggtcattggttatagagacttgaattaataagtgacattatgccagtttctgttctctcacaggtgataaacaatgctttttgtgcactacatactcttcagtgtagagctcttgttttatgggaaaaggctcaaatgccaaattgtgtttgatggattaatatgcccttttgccgatgcatactattactgatgtgactcggttttgtcgcagctttgctttgtttaatgaaacacacttgtaaacctcttttgcactttgaaaaagaatccagcgggatgctcgagcacctgtaaacaattttctcaacctatttgatgttcaaataaagaattaaactaaagacaacgagtttgttttttgtaagctccacttcttgctagcagttcaccactgatcctctaaaatcaaggtggttaaacgatctgtcacacacagtgagtctgaatgctaaagcctctcctcacctcactccctctgcccaacacccccaggtgtatcaggaagtgtgtggacactgtggtcaggcagaactggcctcaattcttggcttcaccacttacaaattttatgatcattggcagttgatttttcagagtttcggcttccttatcaacaatatgatgataagtaataacacctaattcacacgatggtggtgaggactaactgaggtgctcattaaacatagttgctgttttttaatgcctggcccaaatccttccctgtgagggagaagaaggatgcttgagagtggttattta

SEQ ID NO: 1209 - protein, 589 aa, Homo sapiens
MTMTLHTKASGMALLHQIQGNELEPLNRPQLKIPLERPLGEVYLDSSKPAVYNYPEGAAYEFNAAAAANAQVYGQTGLPYGPGSEAAAFGSNGLGGFPPLNSVSPSPLMLLHPPPQLSPFLQPHGQQVPYYLENEPSGYTVREAGPPAFYRPNSDNRRQGGRERLASTNDKGSMAMESAKETRYCAVCNDYASGYHYGVWSCEGCKAFFKRSIQGHNDYMCPATNQCTIDKNRRKSCQACRLRKCYEVGMMKGGIRKDRRGGRMLKHKRQRDDGEGRGEVGSAGDMRAANLWPSPLMIKRSKKNSLALSLTADQMVSALLDAEPPIKEYDPWFSEASMMGLLTNLADRELVHMINWAKRVPGFVDLTLHDQVHLLECAWLEILMIGLVWRSMEHPGKLLFAPNLLLDRNQGKCVEGMVEIFDMLLATSSRFRMMNLQGEEFVCLKSIILLNSGVYTFLSSTLKSLEEKDHIHRVLDKITDTLIHLMAKAGLTLQQQHQRLAQLLLILSHIRHMSNKGMEHKMKCKNVVPLYDLLLEMLDAHRLHAPTSRGGASVEETDQSHLATAGSTSSHSLQKYYITGEAEGFPATV

SEQ ID NO: 1210 - DNA, 67679 bp, Mus musculus
  misc_feature (1)...(67679): n = A,T,C or G
gacacctactcatctatgttctctgctgctctagtcaccatagctgggaaatggaaacagcccagatgctcaccagctgattagtggataatgaaaatgttctgtatttatgtggctctccctgccatcagggatcatcggctgatacagtccacaggggcaaggggaagagagatgttcaactggggattagggaactctgggtacatccagtgaatgattacatctggaccagcttcaaggaggcagatcaactttacttggggtaaataatataacttgggggactaggagtaggaacatctgggataggcaaaggtcactggctgaaggcttagggattatgttgcctcattagcatggggaagctttacaggagtctcaggggccagctgaatgggttcttatcccactcagcatctatcgagcatcgaggctgtttccaatcccagctatggtgactggagcagcagtggacatggatgagtaggtgtctctacaggaagataggagttctcagagagtgagcccagagagaaatgagcccagaagaaaggaagttgaaccagtaatctaactggtagatgtgtgtgtgtgtgtgtgtaggggggtttgaattccccagacaaagtcagagaaagagaagccctgaatatcaagggagtcctagactatatccttagttagttagttaacaatttacacattggaatttcatccatctgtaaaaacatgaaacttgcaggtaaaggaatgaagctgtaaataataatatttgggtatattcattcccagatgtaaatttctatgacaattaaaaatgcccaggtactccttctggtctggtctggtgccctgagcagaccttgggcaagaattctgcagccagtcccacaacacctagaggaagaacccctcccaggtgctctaacatgcccaggatcaaaggatctgaggtgccctgagcagactttgggcgctaaatttgcagccagtcccccaacacccagaagaagctccactctcaggtgctctaacatgcccaggaccacaggatcccaggatccaaggatcccaggaacttggtcacaccaggatctcagggtccagaggcagcttgactccctagagctctgagacacccaggaattcaggatcacaggattccagaatcaaaggaatacagaaacagctgaactctgaggagttctgacacaaccaggatcacaggaaggacagtcagatatagagaggacaggtagcactagtgataatcagatggcaggaggcaagcatgaacataagcaacagaaaccaaagttacttggcatcatcaaaacccaattctcccaccatagcaagtcctggatataccatcacacccaaaaagcaagattcggaactaaaatcacttctcaagattataatagaggactttaagaaggacataacacccttaaagaaatataggaaatcggccatcattggaaagagagtcccatcggtcttgcaaactttatatgcctcagtacaggggaactccagggccaagaagtgggagtgggtgggtaggggagtggggggggggggaagggcatggggggacttttggaatagcattggaaatgtaaatgaagaaaaaacctaattaaaaaaacaaaaaaagaaatacaggaaaacacaggtaaaaagctagaagcccttaaactggaaacacaaacggcgcttaaagaattacaggaaaacacaatcaaacaggcgaaggtaatgaacaaaaccatccaagatctaaaaatggaagtaaaaacaatgaagaaatcacaaagagtgttagaaaacccaagaaagagatcaggagtcatagatgcaagcatcacgaacagaatacaagagatagaagagagaatctcagatgcagaatataccatacaaaacattgaccaaacagtcaaagaaaatggaagatgcaaaaagatcctaacccaaaacatccaggaaatccaggatacaatgagaaaaccaaacctaaggataataggtatagaagagagcaaagtttctcaacttagaggcacagtaaatatcttcaacaaaattataaaagaaaacttccctaacctaaagaaagagatgcccatgaacatacaagaagcttacagaactccaaatagactgggccagaaaagaaattccttctgtcacataatagtcaaaataccaaatgcaaagaaaaaatattaaaagcagtaaaggaaaaaggtcaagtagcatataaaggcagacctatcagagttacatcagacatctcaccagagactataaaagccagaagatcctgggtagacgtcatatagaccctaaaagaacacaagtgccagcccaggctattatacccagcaaaactctcaattaccatagatggagaaaccaagatattctatgacaaaaacaaatttaaacaatattttccataaatccagccctacaaaggataatagatggaaaacaccaatacaagaagggaaactacattctagaaaaagcaagaaagttatctttcaacaaatccagaaaaagataggcacataaacataactccacctctaacaataaaaataacaggaagcaacaatcactttcccttaatatctcttagcatcagtggactcaattcctccaaaaagacatatagactaacagactggatatgtaaacaggacccagcattttcctgcatacagaaaatgtacctcagtgacaaagacagacactacctcagagttaaaggttggaaaacaattttccaagtaaatgttcccaagaaacatgttggagtagccattctaatattgaataaagtcgactttaaccaaaagttatcaaaaaggataaggaaggacacttcatactggtcaaaggataaaaaatctaccaagatgaactctcaattctgaacatctatgctccaaatgcaaggacacccacattcataaaagaccatttaccaaagctcaaggcacatattgcaccccatacaataatagtgggagacttcaacattccactctcagcaatggacagattgtggatatagaaactaaacagagacacagtgaaactaacagacgttatgaaccaaatggatctaacagatatttatagaacatttcttatccagtaaaatactgcaagaaagcatgcaagaccctccacactatcgcagggacaaatttggagcattcttgctatgggaatgccaaggttcaatgaggctgtttccatgaaactctttgcctcaggactgcatccaagcctttaggcctgtcacatagacttcactggagtgggtgtggcaggtacccacattcataaaaggttactaaagcttaaatcacacatcaaaccccacatatgaatagtggtagtaatcaacaccccactctcaccaatggacatgtcatccagactgaaactaaacagaggaataatgaagctaacagaggttatgactcaagtggaattaacatatctatagaatatttcatccaaacacaaaagaatataccttcttcttagcatctcttgaaaccttttccaaaacttaccatatacatcacaatgcaagcctaaacaggtacaagaagattggaataactccttgcatcttattagattatcatggattaaagctggacttcaaaaacaacagaaagcctacaatctcatggaaatagagcaaccctctactcaatgaccattgggtcaaagaagaaataagaaagactttctagaactcaacgaaaatgaaggcacaacatacccaaattcatgggatatattgaaaacagtgctaagaggaaggtttatagcactaagggccttcataaagaaattagatcttatactagcaacttaacagtacacacaaaagctctagaatgaaaagaatcaaacactcacaagaggagaagatggcaggatatagtcaaactcagggctgaaatcagtcacaaacaagaataattcaatcaatgaaaccaagagctgcttctttgagaaaattaacaagataaactcttagccaaattaactaaaatgcagaaagacaaaaatcagatttggggggggggcatgacaacaggcactgaagactgctagcagaatacaagtttccaggcagctaggatgaggacctttttttaaaattaggtattttcttcatttacattttcaatgctatcccaaaagtcccccataccctcccccccactcccccacccactaactcccacttcttggccctgacgttcccctgtactgaggtatataaagtttgcaagaccaatgggcctctctttctaatgatggccgactaggccatcttctgatacatatgcagctagagacacgagctctggggggtactggttagttcatattgttgttccacctatagggttgcagactcctttagctccttgggtactttctctagctcctccattgggggccctgtgatccatccaatagctgactgtgaacatccacttctgtgtttgctaggccccggcatagcctcacaagagacagctatatcgggtcggatgaggatcttataacccacagtgacacacctactccaatagggccacaccttctaattgtgccactccctgggcggggcatatacaaaccatcacactaaccaagcaagtaaaagatcagtgacaagaacctcaagtctctggaaaaagaaactgaggaagatatcagaagatggaaagatctcccatgcacatgaatcagtaggtttaatatagtgaaaatagccattttacctaaagcaatctacagattcaatgcagtccctatcaaaatcccaacacaatttcttagacaccttgaaagagcaattctcaatttcatatggaaaaacaaaaaacccaggatagttaaaacaatcttgaacaataaaagaacttctgaatcaccatccctgatctcaagctgtacatactgattaaaatctgcatgccatcggtacagagactgttgtgggaaataataaagggggaatggcaagttccctagctacacccagctactttttgccccggcgggctggacggctatgcactggtggcaatggctggccttttcttagaaaggggatactttctaactcagagctccaaaatctctccacctacctcactaagttcccattggccagccccatgcttcaaaaccgccatggcctttgtggtgcacacgtggcaaacccacactttgctgctgtactgttctctctggaatgccacacaggcttagtccagaaacaaaaatagacatagtgatcagtggaattgaatagaagaccccaaaataatcccctatggacacttactttttgatcaagaggccaaaaccacataatggaacagagaaagcatctttaacaaatggtgctggtctaactgggtgtctgcatgtagaagaatgcaaagagatcagtatttatcaccttgcagaaaactcaagtccaagtggatcaaagacctcaacataaaactgaatacatagaatctaacagaagagaaagtggagaatactcttgaacacattggtacaggagacaagttcctgaacagaatggacaccaatagctcaggttctaatatcaacaactgataaatgggccctcaagaaactgcaataaggcaaaggacatcatcaataggacaaaatggcagcctacagtttaggaaggaatcttcaccaaccccaccgctgacagaggactaatgatatccaagaactcaaaatgttagacaccaacaaaccaaataactcaattgaaaagtggagtacagagctaaacagagaattctcaacagagtggtctctaatggccaagatcacttaaagagatgttcagtgtctttagtcatcagagaaatcgaaaccaaaatgactcagagattccaccttacaccaatcagaatggctaagatcaaaaacttaagcaacagtacattttggagagtatgtggagcaaggggaacactcctccattgctggtgggagtacaaatgtatacaactactctggaaatcaatttggcagtttctcagaaaattgggaataggtctatctcaagacccagatgtactattattgggcatatagacaaaagatgctctagtagaccaccaggacacttgcttcactatgttcatagcagccttattcataataaccagaaactggaaagaacccagattctcctcaactgaagaatgtataaagaaaacttgtcatttacataatgaaattctacataatgaaatttgcaggcaaatggatggaacttgaaaatatcatcctgagtgaggtaatccaaacccaaaaggacatgcatgggtatgtactcacttataagtggacatcagccataaggtacaggatagccgtgttacattccactgacacaaagaagctaaataataaggagggcccaaaggaggatgcttgaacctcactctgaatcagaaatagaattgtcaacagagttggatggagggaggggactgggagggagagaggatggggagtggacaggggtggaggtggaatcagagcctaggagagagggctaggagagtgaatagaaattaacgtgggaaagtggggaggcatttctaggatgtaccagagacctgggatgggggaggctccagagagtctatgagagtgactctagctgaggctcctagccatgcaggatacagagcctgaaatggctacctcctgtagccaggcaggactcccagtggaaggataaggacaccaacatacccacaaaaactcttgacacaaaaactgtcctgcctacaagaagtgccacagaattaagggatcccatggacaagaaccaatctctgacactattaatgatgctctattatgcttgcagacaggagcctagcacaactgtcttctgagaggttccacccaacagttgaccaaaacagatatagagactcacagcaaaactttagatggagctctggaagtcttgcggaagagttgggggtaggattgaagaatctggaggggacagggattcagaaagaagaccaagagagtcaactaacttggacccttggggcctcccagagactgaaccaccaaccaaagaacatacaaggcctggacctagctgcccctcctcccacatgcatatgcagcagatgtgtagcttgatcttcacgctccaagtcttggtctcctggagcaagggctcaccctgagtatgttgcctgcctgtggatcctgtccagactcctaacttggctgccttggttgacctcaatgggagaggatattcctagtcctgcggtgacttgaggtgtcatggtgggttggtacccagtggggacctcacccttatcagagatgaaggggagggataggaggaggagtggtgtgaaggggggactgggaggaaattggaggttacgatcagggtgtaaagtgaataactaagaaaattaatggaaaatataaataaataaaaaatcacacacacacacacacacacacacacacacacacacacagagagagagagagagagagagagaaagagaaatccttaaatcttttaaagtctttgaagtgttccttgacagagggactactctataagcagttcctgatttttagctgtgttcaataaaatatggataataatataaaatatggatatgggtaataataataaaatatggatatcacctgggatatagtgcagtatacatttggtttttattctcaaatcctgatagctcctaaaactcttagcaccttgagggttaggagtgtcttttgtatgcagactcatcgatttgttgacgatggcctctgccgtgaaggatccttcccacagaaaagaacaaggcatagttagaaggtagagactttcagcatcctccctcagattctagggaagtgagatgtatagccagtcacatctgtggatgtaagtcaacataaatatctaaaaggacaggtgtggtgctttgagtatgtttggcccaggaaatagcactattaggagatgtggctttgtgggagatggtgtggccttgttgtagggagtgtgtcactgtgggtgtgggctttaggactctcatcctaactgtctgaaagccagtcttctgtttggcttcagaagaagatgtagaactctcagttcttccagagccatacctgcctggatgctgccatgtttcccaccataatgactgaacctcagaacctgtaagccagccccagttaaatgttgtcttgtaagagttgccttggtcatggtaactgttcacagcagtaaaccctaactaagacaccagggttagtggtttctttgcagcctttatatcagactaagctctcctgagttctacgaggtactgcagcaaacgaattgaacccagtgtgggcaacctagaaccccaaatttgtggtgggacccaaggcacagggcacaacccgaggtttgagatatgcatctgacctttgataaggggtaagtcttaagacctgagcctccaacctgtggtaccagataccatcttcaggtagaaggtgccagaattgaaagagaatcctgctgaaccggatgtgtctgctggagagtctgctatattggttgctggatgtgtgtggagaaagaacccattcccctagacacagaactgttccattttctgtgactttgggattgtggactgaagggacaatgccctttcttttccattttgacacccagacagccttgtataaaatcgtacctagctgagctcaccagaggctcatggccacatgcaaaaggaatcatctttctctccttttcagatgggaagacagactgagacagcctctgacttgctcaagataagatagtgaggaccctgctttgacaaagaggacctctgcttggctgagagcatgcatagggagtctgctacacagaatggcctttatcacacaagagaccatgggcttttccacatgtcttggagcctcggtttatatctgtagaataaggaggatacgtctcatttcacaagagaatggtgttacgtggtgatacagtcatggctaaagcgaaatctcttattagtatattaacgtggttaatattattctattaaatattatctgggctggagaaatggctcagcgattaacacatgtaattgccagcaccttcatcaggtggcgcaccaccacctataactccagctccaggacatctggtgccctcttctggcctccatgggcactgcgtgcatgtgagaacaacatgcaatagaccacagaccaacagaccacagcaatttaaatgtaaaacaaatctttaagatatattatagctattgtgatacaaccaattacgtctctagaatcaaatgactttcagggaggtttaatgtgggcttttcctactactgagctgtgtgtgtttctgaggaggtgacactcagcaaataccagttcccttctataaatatttggttcatcctaacttattttctgaataaattttccatctgccaccaggccggcatctcagctatcaacaactctgaacaatgcggcaggggaaacgagtgcttggttctagctgggactttttggaagtcagacagaccacccatttatttgccatgcaaacaaatcagccggagaaactccaggctggtggcaagctgaagttcttgaaagccagacaaagacaggtcatagaggacgaaacttcccctgcaggcttggcagagaggcagttccacagagcttacacgtgcctctctcctggggagtcagaggcagacactgtggcatggaccaatggagggtaagcttagagagagtgtccttaataatttccccaatgggaaggagttttgttttccctgtctcttaggagaccaggctaacaggtcactggaaaacaagtgttggtgccaggacctccggtggataccagactgctttttcagagacaggtatttgaatcctcactctttgctctagggtcgttctgtatgcactctgggattttaggggtgtgtcttggtggggttggggccagagattgataggtcacactatatcaggacatgccctatgtttctggctctctttccactccactggcagctggttattcttagccacagattgcttttcaccctagtgttaacttattagagctgtggcgcaaggctgctagataggcaactagtaagatcatggccgtctgtcttctattacctcctctggaaacaagtccaggacctccctctcccagccttccccactggactgtgtcctgctgggaatcttctcttgtctttcttcaaccctggcagtctgacatctcagctcacctgctcagaaacgcacacggctcagttggaggagaagcgcacattaaacctccctgaaaaggcttcaaggctcacggagtgggagtcaagtggagctagggaggaggcagagaaccactcatagccagacctcatgatgtctgccatggctaacctcacctggcctgatgccctgttcactgcctgttgcaagaagggattgtaccaggggtgggtgggatttaggctaacaacacaagcagctggctgagagaactttacccctaaggaatggctataactaactggaataattacgttttgtccactctccttaatctggaattgagccagatagagggagttgggcatggagcacacatagtaagacaaagaagtgaaggcgggcaggaggctgacaggtcagcaccaagtaacagattcctgctgcctctgcggagagcgtggaggacactgacatctttgcccctctctctaccttccacacaagatgtcagccttggggtgcctggcgcaggcgcctggtatctacattttccctacatcctcccacaggggatctatttgggagacagcctcagcggcctgccgtttactactcaaagaggctaataagaattcatttggtgctgtcttcaggtgaaggcacagaggctaaaggaccgcggccatttcttcctgttatgcaatcatctgtggcagccagacatgacctctgtgtctgctccctagagtcccgggagcagaagtcacagctcggctgcttcccaggactagcttacctcctcagcagtccctagaatgtgcccatagggaaaaagttaggcaagggcactatgactagaattctacccccgaatgccatgtgattagtgctggtgagcacggcaggcaaacctaggctgattctgttttggtagcaattgcccgtagagagacctcgaagttcgcactgttatttatggaatgagagcttaaaaggttgctgggctgggtcctggggaccctttttcggaaggaagttttactctgagaggctgcctgatgtaaggaaagaactttagggtcagatttcatccggggagaataatgccctaagcaaggtggtccatttgcgttttcctccttaggccatggacacagtgtgtattgcggtcgttggagctggcgtgatagggctgtctactgcagcatgcatttcccaactggttcccggatgcaccgtcactgtcatctcagacaggttcactcctgataccaccagtaatgtagcggctgggatgcttattcctcacacgtgtgcaggtgagagacggtacatttgcaagatgctaatttcacaccggccaccaataggcatgagtgatcctgaagatggcctggtgtctcccagtcatctgagagttcctccaaacacgaacctccactctctctgtggctgagtgccttggtctcctggatcagctgcattttctttctgctgttgttagatgaaggctttgattcggtccccacatttcttccttagacatgattcagatcaaatactttctactcctatgcctatccagcggcaggctcttgtgaggattaaatgagctaatcacaaagttcagaacagtgccctgcacagaatcagccctctatcagcatttgcaattactcctgcctctctggctaccagttttgcttgaccagcacttgaatatgaattaggtcacaaagcttgctcgatccacagttgaattggaactgtctgttatttggggatgattgctgtagcgtgtggctcttggccactagtctgttgtttttaggttcaggggcaggaacatggacatgcatattaaatcagctctccacactgacataggtccttggctgacagtccattgaggtctactgtaatcatgcaatacagctatcatttcttctttatctctaaacaagcagcctatctgaaagttatcgagagagtatggcactcacatgggtatacttttaattgatgtcaatgcttagtcagtattatggaaatatttattgattctataaccagtgctttatttaaaagtcttgttactaatatatccatattgacctagggtccctgcttgtcacctattgtgcttccaaccctcttataaagagcctctcaggtctttctattgtcccagaaataagcctggctggatttcccagtcatacacccattccttctcaggatggcattttaggattataccttgtaccaaagacaagtttctggcccctacgtcttttactttgcctagcctgttcccactccatcagtagatcattacaagagtgagtcagacacatcagcatgtaaaattctgggaattctgtcaaaatgttcctccctgagtatctttgtggcagaagcatggttgcaaccattcccttcattccagcctttgcttttctccatgacctctcagataccccggtacccacacagaagcgatggtttagagagaccttcgagcatctttctgaaatcgccaagtctgcagaggctgcagatgcgggtgttcacctggtatctgggtaaggaaaggattctgaagttgttgtagggtaaacaacacagacatcagaggtcagcagaacatttgccagccttagggaggatttagaaaagactccagagaacttgagaaacactacttacagaattagggggattgcttatttttgttttgtttttaactgctatttcttgtcaaaatatattactaaaatatagtagtatattttatataatataatataatatataatataatataatatataatatatgtataatgtattgtatatgtctaatatacatataatgtaacacatgcatagtacattgtatatgtataatataatatactatattaggtatagtatatgtgtaagtagtatataaatttacatatagtattattacatatagtataagttttatatatgtataattttcctgaaggaatgtgaagtggtttgtaaatatggaaaaaacaagcaaaggtcctgaatagcaaataaaccctgagtctgggtatgtggagggtggcatagctgatggaaatgagacacagtcatgggcagagaccttgggcagaggagagtctaatttatttgagaatcattagaaaacaaatggcccccaaagtaagttttgtgcatccatcactgaagttgcttttgtggggaggggtagtgttggaaattgagcttagggcctgtgcgtgctaggcgtgtgctctacaacagagctttatctccagtcctaaaactacctctcaaagcgtcatttggaaaatagtgtttctgaaaagatctatacgcttctatctgattgttactatctgattggatgcacacttaagtgaggtttgaggacatattgaatttagcatttctaacgcagacagcactcaaagcatgatgatttcatcctacactctcctaagcagagattgctaaatgttctagcatctttaactcaggtcatcaaattaattggtgtcgtcaaatgacaaaagacgtttgtcacccgtgttatcctatgtgccagcactgccttctgaagagcagagggttttcaatggcaattctatctttgtgaaattaagacaggttaaaaagtaccagtctcggaactggagagatggctcagtggttagaagcattttctgtgctcatagaggacgtgggttcagtttccagcacccacaacacttctcaccacacccgcagctctggttccaggagctctgcacttccccctggcctccgtgtggctgcctacacacagttttcataaacatttgcagacacacatatagtaaacaaataatattgaaaaaacagaaggaagaaaagtaccagtctctccatttgatgccaggccctgaaggacgcctcttctaagttcatgcgtgtattgagtgcacacttgtgtcagaagaatttctactctctctctcacgccttccctcaccatagaaccaaccaggatggatgtgaaagccttacttttccaaagcccctagcccagatggcagattttgcttaaacatgaagcatcgacttctttctatcaatggcagggtctagtctcccttcccaacgtgagttattgagccacattgaagcatggcattcactgtgttatggtcgtgcttaacttgttccaaaaccaataggattcaccgacactgcctctaagtaattcttagaaacagatatgctctaattctctttccctttagaattaaggcttttcaaatatctcatgtatctccgatatgactttaatcttcaattcatttcttcaagaggacttttgacagccctctctgcagcaggtcttctaggacttagggatttggcaataagggacttcatatataataaatgcttaatgtattagttagggttctctagagtcatagaagttatggatagtctctatatagtaaaggagttaattgatgacttacagtcggcagcccaattcccaacaatggttcagtagtagttgtgaatagaagtccaaggagctcatagttgctcagtcccacacagcaagcaggcgaaggagcgatatagcgcgactcccttcttccaatgtccttatatggtctccagcagaaggtgtagcccagattaaaggtgtgtgccaccacacctttaatcccagatggccttgaactcgaagagctccctgtcttcaagatctccataccaagatccaggtcagaaacttctatctcccagcagattagggtcactggtgagccttccaattctggattgtagctcattccaaatatagtcaagttgacaaccaggaatagccactacacttaataaatatgtgttaagtgaattttgcagaagacagacacagtcctgtcctcaagtgattgtggcctatggggaatgtcccaaatcttattaattacaaatgaagcatcagttaccaaaggctggagtacaaagagctatggaaaaatatacagagagaagacacttgctttaaagactcatcagaagccacgtaagaaaaagtgattctcatgagaccctcaagaggagtgtaaattcatgcagattggagctcagaggagacaggtccaggaaaaaagaaaggcacacacacactgacctgtctcatgtgactgtggtgtattggagaactcaaacaaatccatggtattgaacacaatgaggtaactgttcagatttgcattgcaaaggcattttatctgcagtggagagactaaactgtggagagaggtgatagtaggatacattgatagtgagcagacagattagtaaactgcttaagaggagactagatgagttcaatagttaagccaaaccagaggcagggagatctctgtgagtttgaggccagtctggtctgtcagggagacactgtatccaaaaaaaaaaaaaaaaaaaaaaagtgttaatgatgtggggagctaaggatcaaggagggctcttctgggcacctggcaagataattaacattttagacctgggccctgttggaggtgacatgaggtgacatgtggaggagggcctcagaacccaggaagggtttgcacattgacaaggaaaaagacttgccctgcccaagccatacttcctccttctcagggtctcctctctgagtaaactggtgtacttaagagacacaaactccgggatgtcagcagccacgtctttaacattcagattgagtcttgcttagagcagggacagtggtcaattgctgacagaaacagcccaggatttagcaagtccccaggcatggagcagctccaggcagccggttgcaagcttttttttttttttttttaaatctaaagttttgttctttttgttgttaattctttgaaagtttcaggcaatgccctctgtggtaccagcttcttgctaatgaccaacagtactggtgaccctccaccccagctgcgctgtggccccagtaccccctccatagtctcctcttggtgaccccttactttatgacctagaacttgacttaaaagtcacatgcctgtttccttccattatccagatttggtgatgcatatctttaatcccagcactcttgttagtttcaggccagccaaagtttcatggggagatcctgtctcaaaaacaaacaaaatcctactaaataagatatcatgttcaaaaccaaggctatgctttggattccttgcctttgccttttctccttcatgtgaagagttgtgcaaaaacattaaaaacttttcctctaaaatacacagtctcatttaaatagtggaaatcatggaaaaacatttcagaaaaaaaaagtctagtttgttttgttttattttgtttggtttctctgtgcaatcctggctattctggaactcactctgcagaccaggctgacctcgaactcacagagatccacctgcctctgcctcccaagtgcaaggcacggaccaccactgcctggcctaataagtacaaaattttaaaaggcatactatttatttttatttttctgtcatgctgggggttaaacatctgacctgttgagtgctagttaggatttattcaccgagtaaagtcccagccttgagagtgctttataaacacccgacgccttcagctgtgaacgtctgaaatctagctactcacttatcagagaatggagggattccgctgtccctctttgtgtttataggaagtaaagtttttaaatgccttattgagttgtatttgaatggagtttagggagttaatgaaaaacacacaacttcaccaaaacgtaaggcgcactttctacctctggtgcttcagttggcagatattccgcagcgtccccgctgaagaagtgcctttctgggctgatgtggtgctgggatttcgaaagatgacagaggctgagctgaagcggttccctcagtatgtgtttggccaggcttttacaaccctgaagtgcgagacttctgcctacctcccgtggctggagagaaggttagttgaaatgtctctgtgttttgtcctgtttgacatggtgataaattattgtacagcctcctagctcacgcagcagactctctgggactttcttgtaaggtcttgctgctcacaaagggccaggggtctatgaacgcatctggagagtgtttgccaggcagggactaaatccttagcacactcgtgataacttggtgtctcattcatcgccattccctcagagcaaaaccagttactaaaatcttagtttcctcagttaataaaaaaaattaaaaaaaggaggcattcggataatacagacctttagttcttatgattggaaaaatcttatattgatcgtgaattattgtttaatctttttctcatcttcagtaaaaatagcttcactgtttattgttgctaatgtgtgatgggtgagaacattaaaactgagaacctttcggaggcctgtactttacaccttcagcctttgacagttcattttggcttggcttccgcacatcctgtgtccagcttgttaggagtcacagcgagagtgttttcgtttgcgacacaccaacaaatctctggctgattttcttagccattgcatgatgtttgcggggggggggggggtcgggatgggtggggttgttaaatataagnnnnnnnnnnnnnnnnnnnnatagcgctgtcagtccccaaagccggatgtgatgcaaagaacccgaaatctaaaatgtttgggaccggaaggcattttgaaattagttttctttttgttttgttttttagtataactaacgagcctggcatctggccagatgaccaataggggatggcgtgggttacctgcccccttttctttcataaaaggcattgtgggacagagcagggcctcatagcagcccaaggggaggccttcaggctggagggaggtggggcagtgaaggaattggacatctggggctcactctgtgggctgggcaggcccagatgggcagtcacacaatccctgctgcttctcacacttgggcctgttctgtcgcctcctacgcctctcccccacagtgtgagcactcggtcttctgtgtcctgattcaaaagggaacattcctctcagtgagctttggagcagtgtcttcaaaacccagaaaaagcctattattttattacaacttaaatcgttcattcgtttccaaaaccagcaaaggtcatcatacccttctcaaaaattgcctaaacaacccgatactcaaaagccctcagaggcttaatcacccatacaggtaatattttatatcttgggacagtaaagtcacacacttggctgtgttttttttttttttttccttgccatcccaggaaatgaatcacagagacaagaagtctcctgccaggcagcctacttaaatacattattctgaagggagcagagtcaccctgcatttgacggcatctagaaggcctggtgcttcctatccgcgctggaggcctgtaatttagaccagctgattgcttccaggatgccaggctttaccctgtggcccacacagatcacaccgctgacctccctgcccacgctgttggcttttctgctgtttttctgggcgggcattgaatccctgagacttcctcacattctttgtgttcttctccctgcctgacaccggtgatttcctagattatatagaaatacacacctaccctgcacgtcgcctagggggcaggctgtcccagctttatgcttgaccaacttgcaagggccttttcttgtgtgtggagcagactcctgtgcccctctggctcagcccacactgggcctactggagcatagcctgtctgaagcatcccttagggaccgccaccccagcctatcttctgtcctccagtgtccgttagaggaatatgagaccgcacaggctgcagacacagttgaacgtgctcactgttgtttttccccgggtgtaagcaaggacgaattgagagaacactgtaaaaggcagaaagaggctggtgcctgcttttcctggcactggcggtaagctttgtaaggaacagatgcagggtgggtgcagtggcctctgcaggtttattaaggccttcgtctgctcggaggcatcttcctggctgtatcttcctcgccaccgcttctgtgaagttaagggagtgtgactgtttccctttcaggcctgcctgcctacagaacccctgggccacgcccatacaccctccgtggagggtccaaaggaccggaagctgctttatacccgatgtctgatgtgcttggagtgatttgtgtgtattcatggagtcggccaggctggggtggacggacactcccagagggtatagcagcagctcattgtcagagagacagtgatggcgtcaagacggaattagaccatatgcatctggcggctttgccaacctaaaatacattttaaagctctaactctggagcaatgtcaggctatgaagaaaccagtctctaagacttgccaactgagactttaaactaggcttcttcttgtttctgaacaaactgactgaacataagtgactttttgttttgttgtttttaaatctctgatgagaaggtgctgttctttgggttgagatctgcgagttagctttaaagctgactaacagtgcacatgcagagagcagtcctaacacaactcgcacaagttcgcatcgtccttgagtcccacccggccatccttagctctctcttcatcctcagtgtggctgtttctcacctctccacttcaaacctgttttcctatgatgcctaaaaactcattctgattgactttagagactcctaacaaggttgcctctattcattctcgagtgagaggagacctaactccataccaagagagatgttttccttcagatactgaatggttgggccagagctcctggcagctctaataagccatgtttggccccattctccacaagccaattaaacaatggtgaaaagcaaagtggagcaaacaaaccaacaaaaaggagtgttattcagtctagccacattgttaacaaaatccagtccaccctccagaaccacacccaccatcaggtttaaagagaggggagaggtatgtgtcactgaagcgctccggtcagggtgtggtctgggtaccacgctgtgtccagccgcagtcttttctgcacatggtctaacaagttgtcaggactgcctgaatctctttccaggagacactcagcctctaacactggggttcagccttcctctctcagcatgagattcctgggggaaaatggggtccattttcaacagtctgatagctaaagcaaggggacaaacgtctctcaattatcttcgctcctaccgggatccattccacattcagctctgagccccaattccaggcagccttgctcggcctccagcctcctccattctattgggatggatgctctcatcctctgaggtaggatgcaccgctgcctgagtgttgtgtctggccagcagatcacaacctgggttctagcctggaaaggcattttggaaacctggaagagaagaggggttgggctgcgcgacataaggaaggaaccaagacaaagctctctgctcaaggttcaatttttactatttcagcactcagttataaaggaagggggaggtgcccaattcccgccaaataatcttggaatccagtagcagggtgatcacgtgatggtttcggaacagcaaagcggcaggttccagcagtaggcgtggcagaaagattgagcgggaagctccatccctgagcaagcaggtttcaggctgggggaggggagactacacctgagaagccggctgggcatgggcaaggtaccagcctccttcctctcctctagctgcagaagtcctgggcaagtagtcttcagggacatagccccaagtcttttaccttgtctctgacattgacttaatctgcaaaaggagttttcaccttatagcttagcaatgcaggggcttacttgggtaacattctcaaaataaggtatagtctgtctcaaaggaatgtttgccagcttagaaaccacataaaatttaaatgattttcaaatgtctactgttcttccttttctcttcatcaagttcctatttaaaaattagaatgtgtctcataggttggtccaggtgagtgggttccagggcacggtcgggcagtgctgtggggtgaacttgccctctgcactgatctgttccctccaccctgccctgctctcccatccagagctctctgctccctcctgccagtcctcactacaatatttctccaacagagcccctccttctgcctcagtgccctgagccaatacagctcccttttcctcatgggttctcagccatggcatgctccctctacaggatgggctctccctcagttgccaaaggcccagagggaactagttgagtgtttttacagccctagcttctgtaatagcagcttcatatagataatgatgggtgggcagcatcatgcatgcccattcagacagcccgggctgacctgcctctggacatggacagcaagtctcctccatccagtccaaaaggactcggcacaacaagcctggccaggccttccaaaatcccagccatccgccacctggctcctctcccgtaacatgttggacttttatcatagctcccagcgagggctgttgaaatagaaaagaacatttgcgtttattgaatcctctcatagacctaactactctttgagcgggccactcacttatccctgggctattaaggaaacaagttcagtgaatttaagaaaattacatgaaccccaaggctgagaagtccacttacctccctgaattagaaaattaaccctgagttctgatttgaatgatggggcacaggtcagaacgttcaaagactagcacacagaacccacagcctattaaaagaaatcaaagccaagatagcgtttaaaaagagcaaccacataaagcctttaaagagacaaatggttgtagttaaatataagcagtacgagggtgtgaagcagggctacccccaggtcacagagctgggattgtgctttatagtgaccaacccttgagtgtcttgtttttctaggaaagcagccgcagcagttgtggtgggtcacagtctgatacttgctcctttcaatttcacaatgcgctgaaaccagggcctcacagcattatggcggaagaagctagcttaacaaggttgcagggacagcgaggggagatggctcgctccccaagtcttttcctggtccttgtctgcttttagtctttgacagtgtgtcacacattgaaggacttctagttgttttcagttcccgttaccctctctcctgcctctgcctcctctgttcaaacgctttgtccttgcttgcttcctgctgctgtgagcaaacatggtcaaaggaacatgggcaggaacatgatcatgagggaaagtcaggactcaaggcaggagctgatgcagaggccatggatgggtgctgcttactggattgctctgcgtggcttgctcagtgtcttagggttttattgctctgaagagacactatgaccatggtaactcttataaaggaaagcacttcgtcggggcttacagtccaggggttcagtccattatcatcattgtgggaagggtggcagcgtccaggcagccacggtgctggagaaggaactgagagctctatatctagatctacaggtggcaggaagtgacaatgagacactggccaggcttgagcttctgagaccttaaaggccatcccctctagtgacacacctcctccaagaaacccacacacactcagcaaagccaaatgtcctaatcacaccattcccttcgagccaagggggaccatttttattcaaaccaccacatctagtctgcgttcttacataacccaggatctcccgtccaggaatggcaccacacacatcagttaccacccaaggaaatccccttcaggcttgcctgctgatggcagcattttctcaattgaggttccttcttttcagataactctagcttttatcaatctggcaaaacaaaacaaaacaaaacaaaacaaaacaaaacaaaacaaaacaaaacaaaacaaaacaaaacaagaccaagcagctcacccttcctccggacagctcctgacctacttttgtgtattttttttctttttgtgacccactgagtttaattaaaacgtgtgtgtgtgtgtgtgtgtgtgtgtgtgtgtgtgtgtgtgtatgtgtgtgtctctctgtgtgtgtgtgtgtgtaggtttattactagaacatgggcacattatcactggctacccctctgaaataaacaatacctcttcctccagaagctaccagggaaaggaggggcctcatgagcccttccctatccaggaggaagcattgatgggcccagtctgtgcccatcttttgcaggtcacaccggctgctgccagttcacggttacagcagctagaggatgtccagaagaccgactcaccgagcactcctccccaccttctggctcgcacactttttcattccaggtttctgtggcattggtgcttattgtcttaaacaccaccaaacagtgtgctggatagagtcaccacaaagcaccgactcatccctctctctgtctgagagaatggcttcacctttaaagacagtccattaatgtacatccaactaacatgatcttggcttccaaattgttgcaaggagagagcagaaatttatgtccatgaaataaaaggttctgttctcacctatttaagtcactccatcatactaaaacttttcatggttatttgtggtcggtgccatgaatgcttgccagggtctttgattttctcgtcccaagtaaatggcatagcctttcactggttttctgaataataagcaaggatgcacagggtgaaaattagtgcctgaaaggacctctggaccgaatggaaagaaaatacactccaggttcgaattactgagggcttagcatagctggccttctgtaaatatttagtatatgactcaaatccagaggtttccagctgtcctttaaattgctcagtggtgaaatggtccccacagtgggaggaatgtggcggttgacagacccatctccagccaccctcagctgagctgcgaaggcagctgtcgggtctgtgacgctggggagtggcaatgttctcgtatactctcctctacttgtggcgttttctagaaatgagaccagtgtcagaaggccagttcctcacagacctcaatgcaagtctcagttgaacttcccagctagcaagtgggaatagaaagccagagtcttttcttgttgcgtcaaaatcaacaatgaaactgtgccaccatttccagccacgattatgctgtctgggaggttctgccttttcttgtgttttccttcttgtgaaacctttgctcatccagaatggaggaggggtgtgttgagaactggcatgtgaacttctgctctctcagaggcacagagggtacaggcatccaaacctctgtttgtgctgtcagtcaagtcgtcccgggttctctcttgagtgacagtatacagggagacaaatgtttctgtggtaccagtctatttgtcagagttatccagagatggagctgattatgggtttgtgtgtgtatgtgtgcacccaaatgcatgcatatgtgtgtgtatatgcatgcacatatctgtatgtaaaggcatggacatgtgtgtgtgtatgtatgcacatatctgtatgtgaatgcatgcatatgtgtgtgtatatgtatgcacatatctgtatgttaatacttcattctttcagctagctacacactctcccagttctttctctggcccctgagaaagagcactgggtcttattagattttgttcctcttagcaatgttttgcttctagatggccaacctgcatctgttgaacagtactgccaagagtctcttagagtaaatcccctgtatcctataagtaacccaggaatacgattataagattacaggggattaagattatgatgacaagattactggggttattttttttaaatggctacagaatttctccattcaataagaaaagtctctgggatgggtggtggtaagggtcatacaatgatacaaatgagcttagggctactgagctacttagaaatggcccctgtggtgaggttttactctgtgtgtattagcctacaattcaacaatgattatgaggcttggctaagccattccttctcatttggtccaacaataagtggtcatttattccatcagttctctgtattgttccttttgtaaaaacatccctcgtacctgtgagtgagcaggtgtttgtgtgtgtgacagacagagatagagacagagagggaacatggagcaaccatctactagagagagctgacaaatcccaaggcacatgcaagaattaacagcctatgacggagcaggagcaggagcaggagcaggagcaggagcaggagcaggagcaggagcaggagcaggagcaggagcaggagcaggagcaggagcaggagcaggagcaggagccggaggagccggaggagccggagccggagcaggagcaggagcaggagcaggagcaggagcaggagcaggagcaggagcaggagcaggaggaggagcagaaggaggagcaggagcaggagcaggagcgcaggggcaggagcaggagcaggagcaggaggagcaggaggaggaggagcagaaggaggagcaggagcaggagcgcaggagcaggagcaggagcaggagcaggaggagcaggaggaggaggagcaggagcaggagcgcaggagcaggagcagcaggagcaggagcaggagcaggaggagcaggaggaggaggagcagaaggaggagcaggagcaggagcaggagcgcaggagcaggagcaggagcaggagcaggagcaggagcaggagcaggagcaggaggagcaggaggaggaggagcaggagcaggagcaggagcgcaggagcaggagcaggagcagcaggagcaggagcaggagcagcaggagcaggagcaggaggagcaggaggaggagcaggagcaggagcaggagcgcaggagcaggagcaggagcaggagcaggaggagcaggaggaggaggagcaggagcaggagcaggagcaggagcacaggagcaggagcaggagcaggagcaggagcagcaggagcaggagcagcaggagcaggagcaggagcaggaggagcaggaggagcaggaggagcaggagcaggaggaggagcaggagcaggaggagcaggagcaggagcaggagcaggagcgcaggagcaggagcaggagcagcaggagcaggagcaggagcaggagcaggagcagcaggagcagcaggagcagcaggagcaggagcagcaggannnnnnnnnnnnnnnnnnnnnnnnnnnnnnnnnnnnnnnnnnnnnnnnnnnnnnnnnnnnnnnnnnnnnnnnnnnnnnnnnnnnnnnnnnnnnnnnnnnnnnnnnnnnnnnnnnnnnnnnnnnnnnnnnnnnnnnnnnnnnnnnnnnnnnnnnnnnnnnnnnnnnnnnnnnnnnnnnnnnnnnnnnnnnnnnnnnnnnnnnnnnnnnnnnnnnnnnnnnnnnnnnnnnnnnnnnnnnnnnnnnnnnnnnnnnnnnnnnnnnnnnnnnnnnnnnnnnnnnnnnnnnnnnnnnnnnnnnnnnnnnnnnnnnnnnnnnnnnnnnnnnnnnnnnnnnnnnnnnnnnnnnnnnnnnnnnnnnnnnnnnnnnnnnnnnnnnnnnnnnnnnnnnnnnnnnnnnnnnnnnnnnnnnnnnnnnnnnnnnnnnnnnnnnnnnnnnnnnnnnnnnnnnnnnnnnnnnnnnnnnnnnnnnnnnnnnnnnnnnnnnnnnnnnnnnnnnnnnnnnnnnnnnnnnnnnnnnnnnnnnnnnnnnnnnnnnnnnnnnnnnnnnnnnnnnnnnnnnnnnnnnnnnnnnnnnnnnnnnnnnnnnnnnnnnnnnnnnnnnnnnnnnnnnnnnnnnnnnnnnnnnnnnnnnnnnnnnnnnnnnnnnnnnnnnnnnnnnnnnnnnnnnnnnnnnnnnnnnnnnnnnnnnnnnnnnnnnnnnnnnnnnnnnnnnnnnnnnnnnnnnnnnnnnnnnnnnnnnnnnnnnnnnnnnnnnnnnnnnnnnnnnnnnnnnnnnnnnnnnnnnnnnnnnnnnnnnnnnnnnnnnnnnnnnnnnnnnnnnnnnnnnnnnnnnnnnnnnnnnnnnnnnnnnnnnnnnnnnnnnnnnnnnnnnnnnnnnnnnnnnnnnnnnnnnnnnnnnnnnnnnnnnnnnnnnnnnnnnnnnnnnnnnnnnnnnnnnnnnnnnnnnnnnnnnnnnnnnnnnnnnnnnnnnnnnnnnnnnnnnnnnnnnnnnnnnnnnnnnnnnnnnnnnnnnnnnnnnnnnnnnnnnnnnnnnnnnnnnnnnnnnnnnnnnnnnnnnnnnnnnnnnnnnnnnnnnnnnnnnnnnnnnnnnnnnnnnnnnnnnnnnnnnnnnnnnnnnnnnnnnnnnnnnnnnnnnnnnnnnnnnnnnnnnnnnnnnnnnnnnnnnnnnnnnnnnnnnnnnnnnnnnnnnnnnnnnnnnnnnnnnnnnnnnnnnnnnnnnnnnnnnnnnnnnnnnnnnnnnnnnnnnnnnnnnnnnnnnnnnnnnnnnnnnnnnnnnnnnnnnnnnnnnnnnnnnnnnnnnnnnnnnnnnnnnnnnnnnnnnnnnnnnnnnnnnnnnnnngaatattagaggaacaatttgtgatttttctttggtttggatttccaaagattaaccacagggaatctctactggccaagcacagagcccgactttgatgcgatgcgggtgaaccctcaaagcgcccgaaagccttttgttccagtcacccttcatttctgggaagtgggtgagcggtggctaccaaggctcaccccagtctctctttcccaggataaaggggagtggaggtctgctactcaccaggagaatagaagacctgtgggagctgcagccatcttttgatatcgtggtcaattgctcaggcctgggaagccggcgacttgtaggtgaccccatgatttccccggtaaggggccaggtgctccaggcacgggccccctgggtgaagcatttcatccgagatgggggcgggctgacttatgtttaccctggtatgtcctatgtaaccctgggaggaactagacagaaaggagactggaatcgatccccagatgcagaacttagcagagagattttttctcgatgctgcactctcgagccttccctccacagagcctacgacataaaagagaaagtggggctgagacccagcaggccaggtgtgcggctgcagaaggagatcctagtccggggacaacagacgctgcctgtggtccacaactacggccacgggagtgggggcatctctgtgcactggggctctgctctggaagccaccaggctggtgatggagtgtatccataccctcaggacccctgcttccttgtcgaagctgtagctgacaccaagtaacagcagctaatccaggtgatatgggtcaaagcacaatttaaggtccgtaaccgggtctcgtaactttcatactgcttgaacgttgagtctgaccttctttgtttttacgcaatgagtatcagtagacttagaaagcttgtcagtaatgacacagaacacaaagctcggtttttgtcaaaatatgtgctatttaaaaatacttgttctatggggtagatttggggaggatcgaatgctaacttatatgaatgatgtaagcgatagggagttcgtatttttggctcagaagcacataagcacataagagaagattaatgtgtgagaaatatacttggctccctgtcagccctagagctgtgcatgatcctctcaggtcatagagccaacagaggaagttatcatcccactagatgggaccacacagtgtggacccccggtatttaaccgagggtaggcagcagcagcttcctcacgccagctggtattcatggtagctgacagaggtggagttgccctcgaaggctgcgccagttttggagcaactttgtgtctgttttgttgtttctgggaccaaacacctaacagaaacaacctaaagcattgttcatagctgcagcccatagcgccagggagggccttgtagaacagagctgttcaactcacatctgcaagaaagcagtgtgaacaggtagcagggcagatggggtgacagtgtctaagcgctcattcccagttgtctactccccgtcccaactttcctcctatacctctaccatctcccaacagttcatttaattctcaaatctgtccatggattgagtcatcgattaggtcatccatatctagaaacaccttcagccccacccaaagggcgggctttacgtctgtcttaagcaatcccctatcttgtcaagctgccaggagggatttaccatagcaatcgtggaggctgcatacttcattaccacaaatgatcaagagctgctgactgcgcagtgaatgagcactgttggagactgaatcgtctatgcgacctaggagctaatttgctaatggagacgaaacaatcatttttttaaatgacatacgacacaaagtgttcatgtcgcaagtattggggagaaagggaatatgtcttgtgataatgtaagtttgagaattgctgagttgaataattttacctggctccctaacttcaggctactcagaacctttaccgtcccgggttcattgtaggtcctcgggagggtttttggcctgggagaagattgttcactgaagtaagcaatcctggagcagggatgtcattacattttggagagaagtacttttttgttgttgttgttgaataataaagcctgttttgaacctcctaggagtcttacgattggccataagtatagggacagggctggagagatggctcaacaattaagattgcttgttgctcttccagcagacaagagtttgtttcctagtgcccatgaagtgcctacaacctcctgtaactacagcttcagggtttccaacatactcttctggcctttgtaggtacacacacacacacacacacacacacacacacacacacacagaggaattaaataaatcttttaaaaacattataaaacttatggacaagaagcttgtgtttgcgtttttgttgaggtttcgtgtgcgattttgtttgaagagagcactgagctggggtttcataccaaacagtgtttaatgggctacaaaaattcttgttaaatcaagcagtctcatttctattaattttcaccagggggcgatgttgtatcaatctcaaataaaccagagcatctgaaaatttagaaatgaccaagatataaaataaaataaaaataaaataaggaagtgtgtgtnnnnnnnnnnnnnnnnnnnnattgtggagactagagttcctatggccaaaataaactattctgaactctatttaaagtagacaagaaatgcctgtatttacatcaatttagaacatgtgcactgcatgggaaatgtagcatgaaaaactggcatcttaacatgacaaggtaacctttttaatggttacaaataaaaacaaagggtgtcacttgatacagcgggagtcttgtccctcacggggcaagtcacatttttcatacaatgtactttctcatgcttccccctttcctaggcaactcagactctcctcacttccctatccccacacctttatggtctctctcaaaaaacctaaaacacccacaagaactcaaaaatgaaaaaagtgtaaccccctcaaacccccaacaagacaaaaaaatccaaaaaaccccaaaaacctaaaataaatggacaaaaccaaaaagcccatttaaaaaaaaaagtaacccaagcaaaactcgaagctacagaattcattgtgtacgcctgggcatgccgtggagtgtggttgatatgtggagtgccacaccaatggagaacactgacttccactttgccatcaggtgtcgactgtaaacagcaccttgggtaggggtggggacctgggtctacagcccctcagtgctgggacaccatgtggctcgaacgtgctttaaatgtctcctcatccggttcttgcaccatgtggatgcccagcctctgcattttgcatctcaagtctcccacactccatgacctcttcctgtttgccattctggctcagtttcacacccattttatatctctaaagctccacactgtaagactgaaagatcagaggcgtcctggctacctgccccgatttcattgtcactaattgctgaaggcttccttggtatttctcaaaggatattattcatgttggtcatgagctgcccttctgggctgcatcttaagatcacatagggagttaagggtgggggtgggggtgggggtggatcctgttgctcagccttgctctgttacagcagaatttcgaagacaaggggtgaaggaggaggaggtgcagcggcattagtgtgtgtttagagctgtccacagggctctgactgagcctttcccttagagctactgctgctgctataagcttaccttccctcccattctcccttgccaccatgttgcagagctgggagagtgtgctggcttcagcaggttcatccttatgcactctggagaaggcggcctgtgagaattagctatctcctgtaatggctctctagaaatgctggaaattacctcaacagctggaggttagctgctgagagacagcgcctgtctgaaagatgagaggtagactatacacatggacaacagcctgcacacgtaagacaacagaggtctgagccatgacctgcagccttctgtccagggaatcatcccccaagatgcagcacaggaaaccagcctgctgtgtgtcagacttgcatggctccaatccagaaacctaaacaatacttctgtaaggattgacacaaaatgctcagagcatgattgataaccaagatcttccttaattttgtctttccttctaaatttggatcaacccaaggaatcaaaatatgcaccactatccagtgattgtggatgtctgtctttgtgggcctgcttgccgtttcccatgtggaaggtctccaatcagcacattactgatgccttccccctcttctattccaaagctttctaactcctctgccttctttgagtacctgccaaatgcaagggattcaggccgactcccacacaagcattaaagaactagccctcatttttcttttggctggtatattagtcagcattcttcaaagaaataaagccaacatacagctctatagagatttatcataagggggccatgacagatcatgtgatcatggaggctgagcagatggctctaagatctccattttgcagatgatggaactctccaccttcatccaggaaagcaagtggttcagctctagtccaggcctgaagcctgagaaccagggcagctccagtctgggtgtgaaggtcaggagacagcccagttccggcagaagaagagattcatcccccccacccccccttccatccattcaggcctgcactggctgtctcatgccacacttcagaactcagtcatcatctctggtcagtaaaatagctcagtggataaaagcatttgccactcaaacctgactgtgggtcagagaaccgtggtaccagaaggagcaggcctggagcaagagtggagtcaaagcctgtccaaaccctgaaaatctcatcccgaaactgacaggagtaggatctctcccactccattcctgggcctacatgtcctggcatatgtagtcctgtgcccccatctccacccccatctttgccccacttagcctggcaaacttccttttgtcttataaggtcatgtattcctctttgtgcaaatgaggcatttccagaaccctggctctgaccaatgatatacatatgcctatagcccctacccacccccaaaggtttaaatagcctttgctcccccaatcaacggaaacagttctctgaagctgttcccgcatgtgcgtgttctttgcacacttgcagttgatcaagatactgcctgcacgtacccaggtccttctgagcttctcttcctccaattcagcctgatgcaccacaggcttcgctaccctgagggggagaagcagacaggggccagcacctgacaaccgaagttcatcttccaggacccacagcagaacccacagtagaaggagggaactaaatcaaaggctcatctcttctggagacattcccatatccacacccatgtccacattcgaccagctatttgggtgcttgtaacccaggcaattagcacatgaaataaaccacccataactggtctttatttctaagaagatttcactttatgtaagtaggattttttactggaaattgctgctgtctgagaatgggacacctgttttacttctctgtttccaattttggaacaccatttatgatttttttttttggtgctttttagacacagaggacaactgatttctctcttaaatccctgctttcaagtgtggggcctttgtggctgagtgtgtgcctgctgtgctgtgacctggggaacacagctactttgagacactgtcattgtcagcatggcgcttctgtggacaaaggttatgttgagagtttgggattttattcacttggaaagaaaagatgttgaacagaaagaccacagcccagctgtgtgtaatgtatagaagataagctattttaaaatgacacatattcctattacagaatagatgcattcagatgagctctctttctctctctctctctcctctctctctttctgcttccccttccctaactctttgcctctttcccttttctttccttccttccttccttccttccttccttctcctttcctctccctaacccttttctcttcttttcctcctcccccccccccccctttatcaagacaggaactcactatgtagttctggttgtcctggatgttaccatgtagaccaagctggccttgcactcacagagatactctgcctctgcccctgcccctgcccctgcccctgcccctgcctctgcctgtctctctgtttcctgagtatggggattaaaggcgtgcatcactatactcagcctttcctacagggtctgtagcagcccaggctggccacaaacaccaattgatatttaagccaatttttctcagtcaattaatagtttttagaaataatggagaacagtagcgccctgcctgctgggagttgtagttcttacaaacctgccacagtctctgctaatgtcaaaggtttgaaatgaacacagcttttctagtatttccttcctcaatctctctcatctttcttcttgaatgtgtgacggatggagatacttttgaagcctttttcctcaggatatcactcaccggagaaaagcggattgagatgtttaaatggtatctttcttcttgaaaaatctcagcagtttgctgccagacctgggggttttattatcctaagtgactttgctgtctataaatcacagccctaagtagccaagggaacacgttaaccagatcccttaaaaatataacagaggctttctcaattgttagtggagcaattgacttcctcagctcagggcacctgatgacctggcccggagccagctgctcacagccttcaccctggaactgaacttaccttggcttatattgtatggcatcaacccactcccagttttgtgatgggccttagtatttctcttcactcagacccaggttatctggcatcatgtacatcttctgagtgcttagctggctctgcccaggcccctttctggatccctgcagggatcagctcagccatctcacccatgtcctgggcttttttgtgagaacaagaacattagatataggttcagttgcaaggaatagaaagtccccaaatatttgcataaattagcatgaaggaagccaggaagtgggctggttagggctgtaatcaccagtggcccaagcaccttggatatggtcctgtgctcatgaaaggagagactccagctagcgcatcattttgtcttccctcaaggaaacgctccagaagactcacgtggcattctgctttcatgtttctgtgtgagatttagtcccaggactccacagagattcgaaagatggtgggaatctagtctgccaaattggtggcaagaaaaggccaagttcttagatctgtttaaagtattaaactattcatagagtttcaccagctagagtaagaacttgttctaagtgggctggagagatggctcagcagctaagattgctgctcttctggaggctcagggttagattcacagcaccctcaagttgctcactaccatctgcaactccagttacagggaatctaacatcctcctctggcctgttgggcaccaggctcataggtggtgcacagacatacatgcaggcaaaacacccatacacataaaataaaaattaaaatgtttactaagggattttgtaatggtttccaagtgactacaagttctagaaacatgtagaccatagctgacaaccagatgattcagatttatgtgggggaagacaggcaaggcagaagaaaccacggtggcagagagggaagcttgacaaggggccatggaggtctgaggatgcatcaaggtggcttcagatcctgaccctttgtgacgtctgaatgtgcacagtcaattctacgctcctcagaaactttccatcagaaaataaaggaaagagagtagaggagaggaaaggtggaaaagggggaagagaaggaggaggaggaaggagaagaggaggaagacgaggaggaggaaaaggaagaagaagagaggagagaaagtggaggaagaagaagaaaaggagaggagaaaggggcagggagaggaaaggatgtttcagattctctaagaagtttctgcgctggagagagagagagagagaaagagagagagagagagagagagagagagagagagagagagagagagagagagagagagctcagtggttgagaacatgttctgcttttacgcaggatcagagtttggttcctaatacaaaagtcaggcagctcaccactgcctgtcacttcagcttcagagggtctgattctcagttctggttctcattggcacttccagtcatgtgcttgcttgcaagagcgtacacacatgtgattaaaaaataaaataaaattaagggctggagagatggcttggtgattaagagcactagctattcttccaaaggtgccaagttcaatttccaacaaccacatggtgcctcatgaccatctatagtgtgatccgatgctctcttctgacactccagtatacatgcaggtatatacataagaataaatagtgctgaagagatggctcagtggttaagagcactgactgctcttccacaggtcctgagttcaattcccaacaatcacatgatggctcataccgtcttaatgggatctgatgccctcttctggtgtgtctgaagacaacaacagtgtactcacatatataaaataaataaataaatctttttaaaaaagaataaataagtcttaataaataaataaaatacatcttttttaaaaaaaagaataagaagttgcttttttgggggcctgaagagatgattcattgagttaagtgctttccctgccagtgtggggacaagggatccaattcccagcatccacagcaggccaggcaggcatggtggctgcttgtggtccagcggcagagccaaggaatccctggaacaagctggctgactgcactacccagaattgtcaagctcccagttcagcgagagaccttgcctcaaaatacaattttaagaaccatctagggagacattcaatattacaagcttgtgcatgtacagtatcggcatacacatatgctcatacatgtgtaaatacacatacatcacacatcacacatacatcacaccacacacacatacaaaatcttttcttttcctctgcagtaactgtagtcaaatgcttttctatggtggtgaagtaaaaattacaggtcattgcttttttctaagatcacacatagccatatagatcagcctaaaataaaatgaaatcactcacagtaaagatgaaactaagctgtttatctgaccttccaagaaattagggtcacagaagcaaaggccaagttttccagacaagtctgtgtcaattgatatgataatgaaattctctcggctgcagtaatagctgcagtaacaggtaatagaaggtaaggccctgtcaaccagtcagttatttttctgttcttgtcttgaatgaccaataacttcttttgcttctgatatttttcatttgataaaatcaacatcttctcttcataccattaaaacacttaatgtatttcatggaatgaagttctgcctgagtccagaaaggaaaagaaagccagttgtggtgtttgagtaagaatggcccccgtgggctcacatatttgaatgtttagtcaacaaggagtggaactttttgaaaggttagaaggattaggagatgtggccttgtctgaggaagtggaggcatgccattagggtgggctttgaggttttaaaagtccatgccatacatagtcagtcagtccgtcagtcagtcagtctgtctgtctgtctgtctgtctgtctctgcctgcagatcaggatgaaactctcagctcttgcttcagtgacaagtgtgctgctatgctccctgccatgatgataatggactaagcctctgaaactataaacaagctcccagtcaaatgctttcctttgtaagagttgctgtggtcatggtgtctcttcacagtactagaaaaccacttaactaacctaagtttgtcttctagcactaggtagctcaaacctacacgtacagtgcaaactcaaggtttggtgacatgtggcttcatttcctatcatcagaaagggctcgttaataaactcatatctcatctgtatcatcactcgttgctaggctaacccaagacacagatacccaagtaaagccccaggatactcaggaaacactgttcgattctatggaactagccctgagcatttcattaacttcctggttggaatcgcatgaccaatggtaactttagcaacgttgattttgttttggacagggcatgcagttcagtggtacaaggcttgcttagcttttgctggtgatgaaaatcaaagaaacttgttgagcagtgtagggcagggacctggaaaatgcttcttgcccttggcaggcagctctgtcttgtccagaagcaggaaatgtctttggttttatgacattttatcctggccaggatatcaaaattccagaaatgtttaggggacctggcttgtgttctggtttcttgttatgttttttctcttttgcatatgacttagtcagggtttctattcctgcacaaacatcatgaccgagaagcaagttggggaggaaagggtttgttcagcttacacttccatactgctgttcatcaccaaggaagtcaggactggaattcaagcaggttagaaagcaggagctgatgcagaggccatggagagatgttctttactggcttgcttcccctggcttgctcagcatgctttcttatagaacctaagactaccagcccagggatggtactacccacaaggggccgtcccccttgatcactaactgagaaaatgccttacagctggatctcatggaggcatttttcaactgaagctcctttctctgtgataactccagcctgtgtcaagttgacacaaaactacccagtacagcataacaaccaagtgaacccggtttattaaaaatgagaggattagaggtggaagacatgcagaggcttgcctgttgtgtgtgcaagtgtgaggtgtacagatgagagagaaagagaagcagaacagtttgagcattatgaagagagatggaaccagggactcaggggtggagagaagtagcctgatgtgagcagcctgcactgctacctaaggccatggtgaagttccaggccatgctgctgcttaaagccatgtctgtgggttcatgatcatgcaacagcaggggtttgtgtcaatgtctgtggcccatgttaccaccaaaggtaccaccaaagctgcctctacctctcactggctatagcactcaagagagcaggccctgtactttgcctggacagcatagtagagctggctctgttagtgggagtgggaatgagccagcctggtccctcatctgtcttgagagttggcatgggtgtggttgagccaccccttaagtcatgaaagcaggagagctgtctctgccccttgccgactgtaacattggctgaactacccaggacagtggcaaagctggctctggtggtgtaggtgtgggagagctagcaggctgcccaacttagctaccacttaggtccagatccagggctttgaggtaggctgccccagtgtctacctcatcagtgaacttctggagtgagtgaagaggctagattcaaaactgcaggatccccatgacatagggcagcaacaggatatctgagaggagtcccagtgaggatccaatattgatagtgtagcagaagctgtatagacagaatgatacattgtgggacacactgtgacatactgcagcaagatttttgtttctttttcttttttctattatttggggggtgggttgcaagggcagggggtgggacagggagatgaatggggttggggtgaatgatgtaaaattcacaaagaatcaatacaaagttttataaaaatgaatggattgccatgacatagaaatagttcaaccatctactaggactagattgacaaactgctttcatagaggtcctgacagcaaatgatcaaggtcatgccggctacagaggctctgttgtaacttaactacttgattcttcaaaattgtcactgtagcctgagagcactcatatataatggtaaacatacagccatattgtgtttcaataaagctttattcacaaaagatttatccagcatagcctgaaggatagagttttgtcaactcagtttttaagttacatatgggcagggacatgtctgatttgttcgacacttttatacctatctggaggtaccaagcctagtatatgacaacatttcttgagcaaattatcaatggactaattacccaacttaaactgaaagatgtagtaagacccatttatcaagatttcttgttagctttttcattgattttcttcaagaactgtcctacagagaatatacaataatgaccagaatccttgggtagctcaattatctaagcatctttcaggactaggccagtgaagaccttcttgggaggagacccgccatctctgtgctttggtcatttctacacacattccctggctcaagtctactaagctgagattatggtgtatgaggtgctttctggcggtgtcttttccctgagtctgtgatcttggtggcctccaggccttttagacttagaatggagctcctcccacaagatgaacaatatggaaacatcaaacctgggttagaagcgtctttgaccaaaggcctcctggtaagactactacggtgctgtcttagttggggttttactgctgtgaacagacatcatgaccaatgcaagtcttataaaatataacatttagttggggctcagtcccccaaccataagttcagaggttcagtccagtatcatcaaggtgggaagcatggcagcatccaggcaggcatgatgcagaaagagatgagagttctacatcctcacctgaaggctgctagtggaagactcacttccagaaagctagggttagtgtcttaattccacacccacagtgacatacctactccagcaaggccacgcctcctagtagtgccactccctgggtgaaacatattcaaataatgtcattccactccttggctcccatagacttgttcaaacatatgagtatctatgtttagatagatacccaaatctagccatagcataacaaaaagtacatttagtccaacttccaaagtccccatagtctatagaagtctcaataatgttaaaagtccaaatcaccctcagcaataaagtcttccatcttcctactcggttggcccactaagccccatgtaaagcattccactgctttccaaatccaaagtcccaaatctacattcttctagacaaaaccatggtcaggcctatcacagccatcccccagtccctggtacaacttctgtcttagttagggttttacttctgtgaacagacaccatgaccaatgcaagtattataacagacaacatttaattgggtctggcttacaggttcagaagttcagtccagtatcatcaaggcagggacatggcagcattcaggcaggcatagtgcagcagaagctgagagttctacatcctcatctgaaggtggaagtggaagactcacttccaggaagctagggtgagggtcttaatcccacacccaaagtgactcgcctactccagcaaggtaacacctcctaatggtgccacttcctgggccaagcatattcaaaccatgataggtgcctaagcttagcccttctttgcactgactcctgagtcctgctgccctcctggccaccaacagcactgatcacaggcttgtgatcactgatccacaggccatactcatccactgagtatgtgtaagtatcaagtgggttgctataacacaaacaaacaaaacattcataccttggccccagaatctctccattggcaactgtgggcagcagcatttttacttctagaggatctgaacacgcatggaagatagagagccactgacctagagttctagtcctggtgagaagcactgctttgtttactttaacagatgcatggatgttcatgctctattcaagccttcaaggtcagagtctcatagggtatgggaactgagctgtgtctttctgaaatgaaagctcaagggtttttctgatgacccatcttgatcccattcttaatggcagattagatctacagtgaattctgggcttaaagtcccttctcttaccatctagaagatactattccattatcttctggtcccaattgttgacatagagaggtatgatacaggtctatttgttgactttttgggtaactggctttttctgcctttcctcatactgcagcttgtttttggacactgcattacatatagcttcatggtatttctctcctcatccctcattctgaagttttaatgtctctattattctaggaaaatttcaggaacttttccccccattctgtttattttctcattggagaaatattcacaaactgtttgctttaattgtattaggtgagaattggggcatgtttatgttcttctttggacaatctaaaatcattttatttcagaaagatatgttaactgcatatttctcaacaatggtaacatagaaaagaagagaattcattgttctgagtagttagaatattggagtaaatattttttaaaaaatatttatttatttattatatgtaagtgcactgtagctgtctcagacactccagaagagggcatctgatcccattacagatggctgtgagccaccatgtggttgctgggatttgaactcaggacctttggaagagcagtcggtgctcttaacccctgagccatctcaccagcccctggagtaaatatttaaaatcctggcctgaggtttctaccccacctgagaccatttagttcttgaatgaaaaacacacttgaagcctttttatttacaataaaccctaaatggcacaatagctgggcagctgcccaccctccatgctgtaagaatctactttcctactgataacctcgagttattactatgtgctatgttccatccgggctgctcttgactgcaattgggcaacccttagggttctcttgacccatgatggcttctccttcttcctctcccacaccttctctttttctcatgatctttctctcccccaaagccctcaaaacctaaaccccacctattgcatttctgcccagctattagctcagctatctttatctaccaatcagaattaccttggtggcagggtctcaggggttttgtgcagactccaggtcttgggggcctgcacttagcattacagtaggtagtaaaaggagaaagcccaacactgggggtctttaggaagagcagttgaggagggatttagtatgaggaaagcatcaagcagaggactgagttgtgaatgtgttgtatggaaatggacacagcaggtgagactaagccttctgagaagagaagttcatctgttcctttaggatgagagagatcagatgctgaaggaaatagtccttagggtaacaaaaagccacgcccaagtgttaactggtgtacacatgaccactcacccctgtaaccttcccggcagaatgaagttgttctaaagagaaacttgtgcccttcctcgtgactgtcataatgtgaaaactggtccccaggaaattagaatttcccccaggattctaatgctgagagaaggagaaagctgaagccttgtactagtcagaggctgcacctgtctcctaggaagagttttcacagtctaataacttgtaaaccaccttgcaggagagacgagctcagatgatgatgggtgggaccacgcctcgatcaggactttgtaggtctctgtacttcctgtcctctctttaaacctcagcctcacatcaggactgtaaaggtggattcagactgatcccaggacctcttcccaatgcagccacactgaataactatctgccttctgtgtttgattattacttgtcttttcagttggttcacttaggacaggtggtctagtccagcttgttagggctgatgttaaggctcaggttctgatcctaacaactctggtaaaactgagaaggcagtgagaggcaatggtagagagaaatactgtgctgagatagccaacaaagggaagcggcttcggtatgtcctcaggcatggctaatagtctgctggggttatcacctgatgtcttcgattgttccctgaacagtggggaaacaaaatcttttgctgttaatgagtgagaaattgtagcatcggtatggagagacccctgagagctctgttctagtttgtttctggtgttgtggaaatcaagtctgagaaaagcaactcagagaaagaaggcttattagctcacagtcccgtggcggggaaatcgcagcaacaagagtaggaaatagctagtcaccttatattcacagccagagagagtgatgattgctctgtgtctgtgcccagatagctcttctcactcttaaacagttcatcatctcctgtctagggaatgatgctacccacaacaggtgggtctttccacctcaaccaaagccatcaagatactcagtcccccacagacatacccataggacaagctaaccaatacaatggttgagactctcatctcaggtgatttcagaatgtgtcaagttaataaaacaaactatagactctgactattctcatatgctgttgctcactaagtgatgcctggaggttagtgatcctaatgtcagagcttcgattctgcaaattaattaattggttaattaattaattaacaagtcacatttattaaactgtaacactgtatcaggtgtagttctccaacaaaggagtgtcgaacaagagctgtcttcacatagctaatgtacaatcggaggatacatgatatgtaagtgcacactgcgctctaatgctatacggtgtgtgctgtgaagaagggcgagtttcttttgaagtgggggatcaccacttaaaggaactatttttctattcttgcacttcagctgggtttgtccttgaaaagatgtttgcctgatgtaagggaacaaagatccacatgaagaactgaatgaaggacatttcaggcagagtgaaatgtgcttggtatacacaaggaggccagtgcggtaaggagacaggaaaagactgagccatgatccagatccagttgagatcatgtggtattggatctgtgtggacctaatctcatacataaaatgcaatggaaagctaaagactgtgatggcgtgacttacattaacctggtttatatttggagagtgtcttagggttttatttctgggaagagacaccatgaccaaggcaactcttataaaaaaaaaaacaaaaaaaccaaaaccctttaattggggctggcttacagtttccaaggttcagtccattatcatcatggcaaggagcatggcatcatccaggcaaacatgattgagagttccacatctccatctgaaggtagcaaggagagactgtcttctgcagacagccaggaggaggttctcttccacactgggcagagcttgaacactaggagatctcaaagcccacctacacagtgacacacttcctctaacaaggctacatctattccaacaaggccacacctcctaatagtgccacttcccacgggccaagcatattcaaaccatcacagaaagtaaactgaagaaggggcaagaaagcaaacagagagacagggtaagaaactcattgcaatgatgcaggtaaggagtagtgatattctgcaaccattttgaaggtagtacaggctttgctaggcattggacatggggtgtgaaggttaaaaaagaggggatgctgactcagcaaagtttggtccgagcagctgcatgaatgaaacttctgtgttctgaggtagagaacattagttgcaaggcaggagtaatggctattctggagtttggggcatgttaaatttgagatctgtatgaatatgtaggctgtgcaggtcaacagatggttctgagcgcagggctagcatggaggtataaattttagagctgtcaggatatttgaggctatgggaattttatggggccacctgggaagtatgataaaaagagaaaagaagatgctggagaaggcagctgaggccagccagcacttagatggtgggatgaggaggaggcagcaggacagaagacagaataagactcttccatggggagaagagaacctgggaatggggggggcggtggagctgagtgaggagggaggatatgatttcctgtgtgggacaccattggaaactgaggcctggggctttggcgggaaatcactggtgaggagaactatgtctctaatgtgtagggaaagattctgacaggagtgggtttaagagatggcgaggagagaggaagaacaaataccaagtgggagacaaattttaaggggtttagagatgaccagggacagagatgaaaagcagcaatatgaagagagccactgagctgttgggcaacacggaggatatgcattgtggcactaggtcagttcatggctgatggactgtagggtgaatactcttatacgcgttctcacgcgcccggccaggaaagaacacaacaaaccagaatcttctgcggcaaaactttattgcttacatcttcaggagccaggagcgcaaacccccagccccaaaagcgaaagccaccccaataacgaaaccgaaaccccttccctatttaggagagttatctttcgcctaggacgcatcactccctgattggctgcagcccatggccgagctgacgttcacgggaaaggcagagtacaagtagtcgtaaaatacccttggcacatgcgcagattatttgtttaccacttagaacacaggatgtcagcgccatcttgtgacggcgaatgtgggggcggctcccaacatctcccccttttcttttaataagagcaaataggccacccatattaatgagagtggagatagaggtcaaatccccagtgtgtaggtaaaggagccgtacacataacctcctcccaggctcatcacccagnnnnnnnnnnnnnnnnnnnngccaaacataccttgtaaagccattttccactttacttctgatagactgtcttgaatttccttagaaagttcaagaccagacttaccttgtaaagctgtactcactggtactctgttcccccagctgaaaagttctgaattcatgcagttgaatccttctcaacagcctgctttacgggaacctttattaccgcgacccacagttctggttctggaatgagggatcttccttgcgccggtgatggtaattttcgtcccaggttttctcttcccggggttttctcgtcccggaatttctcgtcccggaattcggcaccaactcttatacgcgttctcacgcgcccggccaggaaagaacacaacaaaccagaatcttctgcggcaaaactttattgcttacatcttcaggagccaggagcgcaaacccccagccccaaaagcgaaagccaccccaataacgaaaccgaaaccccttccctatttaggagagttatctttcgcctaggacgcatcactccctgattggctgcagcccatggccgagctgacgttcacgggaaaggcagagtacaagtagtcgtaaaatacccttggcacatgcgcagattatttgtttaccacttagaacacaggatgtcagcgccatcttgtgacggcgaatgtgggggcggctcccaacagaatacagccagtgtggtggtttgaatagtttggccctcatagactcatgtatttgaatgcttgggccagaggcactattaggaagtgtgaccttggaggaagtgtgtcactgtgggggtaggactttgaggtctcctatgctcaagctacacccagtgtagcacccagtctctttctccagtaatatgtctgcctgcatactcccatgctctccaccatgattatagtgtacaaaacctctggaacctcaattaaatgttttctttataagagttgccttggtcatggtgtctcttcatagcaatagaaccctatctacgacagtgagggacataatgtggaatgatgcaaggtcagttcatggctgatggtctgtagggtgaacccagtgtgggaatggaggcaaaaccacctcgggcactgctcagagtagctgaattggggccccaaggagaggccaaggaggtgggctgtggtcctggagagggttgggtggccaaggaggcaggtttgtggtccttcagaggagagacacaatggcaaacgaggacaggacattgttttgtaaaacgtagtctacttcannnnnnnnnnnnnnnnnnnntattaggaagtgtgaccttggaggaagtgtgtcactgtgggggtaggactttgaggtctcctatgctcaagctacacccagtgtagcacccagtctctttctccagtaatatgtctgcctgcatactcccatgctctccaccatgattatagtgtacaaaacctctggaacctcaattaaatgttttctttataagagttgccttggtcatggtgtctcttcatagcaatagaaccctatctacgacagtgagggacataatgtggaatgatgcaaggtcagttcatggctgatggtctgtagggtgaacccagtgtgggaatggaggcaaaaccacctcgggcactgctcagagtagctgaattggggccccaaggagaggccaaggaggtgggctgtggtcctggagagggttgggtggccaaggaggcaggttgtggtccttcagaggagagacacaatggcaaacgaggacaggacattgttttgtaaaacgtagtctacttcaggttcattggtgtttctcgacatgtgagtgccctggagttttgagtgacagcttggtggcttagttaatcaagtcccaatggcctatgccatattctgcccagtggagttgttagatactgagggtgtagaaagtttgggccttatacacttatcttcactcacccacaggtgagcatcatggcaaatatcttgggaagaagaatgtgagcttgagccacagtttggctctaggcctctgcttccagggaccaagattaaagacactttacgttggcttgtagctctctgcccagcctcctgggtacaactccagcacacagcaaatgccttaaagtggaacccagccactactgaggcttacatcagctgtttccatcagtctcagaggatccctggaaatgtcacttaacccccccctgtcttagcctacacaccacattgacagatgtttccaggggaagaaaatctcccagaagacaccccaccccacccctgtccctggaatccagtttttgcactctccagtctcagcttctacaggtctcatccgatgtcctttaggagacttttggttattataatgtactatggcccatgaacatggaatggacaagatagaagtataacaatacaatacacctgagcagaatggggggagggcaggagagtaagtgataatagatgaacagcgcaaaagcatacttctttctcttcctcttcctccttctcttcctcctcctcctccttctccttcttcttactaccactgggatttgaacccaggacctcacacattttatacaagagctctaccactgagcctctccctagcatgctttatatcttgagaatgggtctaagtttggccttgcactcatgagcatcctgcctcagcttcctgaattattaggactgtaagggtctaagagttgctcagtgtgattcgggaatcatatcactgtgaaccttctatggctgggtatttgtgacactacttcctagtgtttgaggaggacacatgcaggagctagctgtcctgtgttgtagctgatgtggctcaagcccctcgagctggcaaggctagcccatccttcaagctccagccactgatcttctgatatgcaatataaaatacaaatggggtctctgtgttgggatttagaatgagaagatcatttgatattttatgaagaaaagccttctgtgtttgctaagaggtctggtgccaatttctggcaagagagatgtgagctagtagtcacacactaatgcttgaggaagacatatccagctccgagagaagaaggaaaatgtgggcagatgtttatcccttgggactagactgtaatttttttttaggttgaggacgtttgaaacttttaagattttacctgtgatggccattcttgattttcaacttgattatatctgaaaccatctaaaaactcaagcagctaggcacacctccaaaggaatttttgttaattggatcatttgaggtcagaagccaccctaaatctgggttataccttctgatggcagcctacataaaagactgggaggaaaggggctttgttttttgtcttcttgtcctcattcttgtgggcaagctcatctatcctgctgaggcaattcttcactggcactagagcttgctttttcaggatcctgacatatactgaagactagctgagacatccagcatcatagactgaactggactcttggactttcagttagaagacagccattgttgaatagctgaaccacagcctgcaagccactctagtctctctctctctctctctctctctctctctctctctctctctctttctctgtctctctctctccctcctcctcctccttggaacctagggaagtgtgaagagaggccgggctagaaacatctgctcctgctgatgcagaagaggacaggggaccactgtccaacctcagctgcttcctggttctgctgcatacttaagactggaaggggctttcccagcaggggcagaagcatccaggagttggcccttagcactcacctttctatgattcagtaagtcacagactatgtaacaactactatcattggattgaatgaaatctaacacaacttctgttgcccctcatgccagatgtttgagaatctatccaaccccatctccctagctagctctcaggaccttgtgccaggatgctggttgttggctagcttgcctgtagaccaggcagcacccaaggccagtggcttctaagcttggaatgctctctgttggtgacttaactgtcctcaagtttcacctgaaggagtcccaccctttcaatcagcttagctgaaatgcaatgcacctcccacaaccccaccacacacacacaccatggaatgacttctttgcatattttggaaggtgtggccggaaagagacactagccatgtacaacttgccttgaatgtgttgcaagtttcagagagtggttgtctttgatagtgtgaatttggcagtgagaagggcttcagggtaaagggtgaaaataattggaaaactcatatgtgtgtagtgtctgctggagccagaagcatttgttgccaagggtgatggtacttggaacatggaggtggatgaagacagcttagctgaagatgggccacaccatcactgactaaggcttaggtgaaagagtagaaaatactgatacatgcagatataaagagctggtgtgaatggtgggcaatgcttttgctggcttgctaattccttcccaggcagcacaaggcttcccaggaaggcactggagagatggtgtgaccctcctccccacttgctgtcagtcatgcatttaactcatttgggctatggatgggatgatcttaaagagctattcagaaaccagggaaggagctgcttggttagttgaaccaagaacttttaacggttgagatggagtcagtagaattacttacaggttacaatgacatgtttacccacaaagctttgctccattctttcccaggtgattgaggagcaatttcacaacgatctaatttgaattttcccaggagtcttgtgaggtagctaagaacccttcctacacttttttttttttaaacagtttataaaattccatgacaagtattttccaaagaaagcacccggggccgaagtgtgaagccagccagataagtctgtctgctcagggcaaagctgtgcatcctcccttctttccattctgacccctgggccaccaatagccttcaagtgtggtcacccagggcttggcactgaccgacagtagccccctaggaatgttaatgttcaagactttcctatggccctggccctggtctgtgcatagagaatgatttcttcagctgggcactgcagaggcctcagagttgcagaaaaaaaaaaaattgagacaagatattgtgaacccttggggagtggtctttgttgggtaactcataaaggctttcttggagcaggaactgatcaggaaaggtagattaaaaaagaaagattatttgccattgtcttcttattctattgtctgaggaaagaaataacaccgttgctctgcccagctaagttttactgccgtcagcaacaaaggcttgatttctaccgctggtgatgagtaacaggtacagtgtatctgagattgttcaggccctgaaagagaacggagattcttccctttgtttaacacaggatttgaagcaggttacatggaaatagctttatttcatgaaagcaggcagtcaaggagaaaaagacccgttgtgtggaatcgaatttctgtttaatgagatcagattgaggcgggctatggatttatttttgattgtatttcttatcaatgactgcttaaggcatctccttttcatatttaattgctaaaaggagcttaggcctggaggtcccttgcaaagtcaattctttttttttttccattttaatctagaattggcaaaatgaaggacataagaggtcatgtgtgatgcccagcatgtgcccgcttggcacttcagccgaaattgaattctggaaaagattgcagtggcttccaaacaatctctagtattgtcctccaaacttagcaagcatgtaatctaatatactaaatatacacacatgaggctcccttaaaacgtcatcagtgcagctagaggttgggggcggagcctttgatgtacagcggcactcatggctccgaagctgttggtatattctttgtgcttgttggaaacctggattactcagaaataaatatgctatatcattatctaatagttgggcaatgaccacagcattttgttaaatccttatggatttatggcaggacactctacagtgaagggaaccgattcagtcttgggtgctaagggtaagtctttgtttacagtcatagtagtttccccccagaagatctataatcaatagctaatgctttgtgttttccacggtgagatgctgttttattctgaagttgataagacagggcattggaaggacccttccctgcattctgaggtctaccaaggctgtcgtcagggtctattctaagccatgccaatgtctgctcagagatcatcagtgacttgaggctggaaagaaggctcagcagccaagagcacttgctgctctctcggaggacctggctttggttctcagcacccacatggtggctcacatgaccattgtgactctagttccttgggattcaaagccctcttctggaccccctaggcactgggaacacatatggagcataggcatgcacacaggcaaatactcatatacataaaatataaattaaccacccatataaaccatcagtgactccctgtgccgatagtagatccaaactcctcagccgcctgtttttcaaaccaactgtgattgtcccatttcttttttttggtttttcgagacagggtttctctgtgtagccctggctgtcctggaactcactctgtagaccaggctggcctcgaactcagaaatctacctgcctctgcctcccaagtgctgggattaaaggcgtgcaccaccaccgcccggcgattgtcccatttctatcacagagcttttactgccaggtgcagaaagtgaccagggtaaaggcctagaggcaggaaatcacagtgcctgccttgatagtgaatgaacaggcctgaagattgggcctgtgccatgcttgacatgggaaggctcctgaaattctctgtcacacacattgtactgagttgctgccagagacgggctgatagcagggaggcagaaactatgacctcaccatgccagctccagcctgcatcttctgtgggttcagggccggtaacaatcagcgcagatgcgctaacagctttgacatctgctcaggtcctggtcctagcaataatggaatgttttcttgatttaaaaaaatgtatttcctcacattatagcactatttaaaatcacaaagaccttaaatagaatccttggctattagaaacttagcagtgacatagccgtagtggctgaagcagcacatgcgtgtgcaggtccacatacgtgagcacacacacacacatacacacaccacaaacccccataaatacacaccacacaatttgccaacatacaccacatactcacacacacacttacataccatacacatatcacacacacataaacacacataccccatacccacacacacacaccatatacacatgcacacacacatacatacataccatgcacacatatacatacacatacatacaaacatatacacacatatgcacacatacacatgcacactcatacacacatacacataccacacagatatgaacacatacatatatacatacacacacacttatatattacacacgtactcatacactcatacatatacacacaggtatacatacatacttacacatacaatacacatactgtacacactacacataccacacacacaccacacacatacacacacatacacacacgtatacacacatactacacacacatacatatacacacatattacacacacacacacacatgtacacacatccctccaccctctctttgttgtccaccccgggtggtgtttctcctggctatcctttgtgacacggagtgatttctcctctctcctagcaacagcagagtccatttagaaggcatctatcttcctttctgagcaactggctcagtcagttgggaaagcgggagacaaggcagggggcggctctaggcctcctgctccctctcagtggaagctgctctcagcttcggaaaattccagagggagggatgctctgcaaggggtttgcatctgataatgaagatgtgaggtctagtggcctctggccgctgatgctgttctgggggggtgggggggatagaagggcaggtggaaggaacatagaggtgatgtggctttaagtaccaaccgagagtgagctgcagagacagagagagggtggggtgagcaccccagtggaggaagaggaggagataaaagtgtgggcttcatgctgcacaacagtccgagacacagaaatgaaaggagagctctgttagcacggttgttagcactgtacacatcagaggggatgatccgccagttaagtcagatcagtgtactttcagaaataacaggaactctggagagcgccatctccaggcttacaaggcaccgaggagaaagatcacaggctggggagggttggcgatggatgggcagacagacagacagatgtagatggtcatcatcctcttcttatttcaggtcatttgagaccctggaagcccaaggcacaaacagttcaactgaaggcaagggaaggaaagcataaatcgctgcaaaacacagaatggaagcaaaggtccctttagattcacagacaacaacgtcagcaacaaattatactgtgggccccgcacatccctgcaagctctttagacatatgaactcacacaggcttggtggcttgggtgggtaaaagcagctgtctagtaaatatatgaacccatttcatcattacaacaaccccataaagaagttatttgcattattttactattattactattactactacctttattttattttattttattttattttattttattataccagttttccagaaaagggcactgaggcagnnnnnnnnnnnnnnnnnnnnnnnnnnnnnnnnnnnnnnnnnnnnnnnnnnnnnnnnnnnnnnnnnnnnnnnnnnnnnnnnnnnnnnnnnnnnnnnnnnnnnnnnnnnnnnnnnnnnnnnnnnnnnnnnnnnnnnnnnnnnnnnnnnnnnnnnnnnnnnnnnnnnnnnnnnnnnnnnnnnnnnnnnnnnnnnnnnnnnnnnnnnnnnnnnnnnnnnnnnnnnnnnnnnnnnnnnnnnnnnnnnnnnnnnnnnnnnnnnnnnnnnnnnnnnnnnnnnnnnnnnnnnnnnnnnnnnnnnnnnnnnnnnnnnnnnnnnnnnnnnnnnnnnnnnnnnnnnnnnnnnnnnnnnnnnnnnnnnnnnnnnnnagcaaactggggaaggaaaaatggagggatgggaggagggactctcttcacctctccgtgagaagaggtgggcgaagaccaggctgccctgggagagctagctttggacacggagactctttgtccacgctggcaatctttgttagtgtttgtacggaggggactgacttgactcctcccacacttcctcctgctccagggggtgggggcagtgccaaagcatctacagcctggaccacgggccacctgaaacataaaaggaccgcctccgccgagaactcccctgaggcggggctcttgccactgtagctgagcaatgctccatcaagattcataagcacacctacgcgtttgagagtctgtgcgttctgatctgaaaataatacagtttttgtgttttctctagggctattggcttactgtgaggagaaaccaagatggcttttgccctcaggatttttaacctagtcacaagctgagctggaatgacagagccctgagagttttgccttcgggcgtgctctgcctcaagtctgtcctgtcaggtccctggtgattttttctgaccttgaaaggttgaggagagctcacagtgatctacatctgggggatgatttctggtatgtgtcataatggtaagattggtggaaggtataggagggaagtgctccctaggtggtcctatgaaaaatgatgttttggtcattcctaaccaaattaaaatcttggaatgtctcatcgtgggagctaatttatataaacacattttcccccctaagaatgcttgaagtttgtttctagaaagtgtctagaaagtatgtgtgaacatgtgtgtgcacatgtgagtgtgtgtgtatgtatgcatatgtgagggcatacatgtgtgtacacaggcgcatatgcatatgagtgtgggtatgtgtgcatatgtgagagtgtatgtgtgtgcacacaggtgcatgtacatatgtgagtgtgtgtatgtgagtgtgtgtgtgcatgtacatgtgtgtgtgtgtgaatgtgtgtgaggatgtgtatgtgtgcatattgagtgagcatgtgggctcacacgtgcatgtacatatgtgagtgagtgtgtgtatgtgtgcatgatgagtgagtgagcatatgtgagtgtgtgttacatcttttgtcagtaaaactttctgacagaaacccaggacctagggctgacatcagagccaactgtggtttccacccttcttgagcactgttatttccacaattgtttatttgatctgtgccgttttcctcccagtgaattccatgacgatggctctgattattctctgggtcctacagagcaagaggtagcaggagagaaatgcagtctgtgagcaggcagtctaggtttggctgagactcttatttggttgagataagacaagcaacacggtctgttggaagaaatgctgtgtcttgcatccaatcactccatagggtctgtgtgattcctgttgttcatcgatcatcctgtcacgtggttgagaccaatcctgtggaaggctttgtgggaagaggcattaagggaaacagattctccatctctaagtgtgagaaacatcccacaggtctacagcatgaccaacagaaacagtgtaacaaccaagtgtaagaggtcacaaaagagagaagcaggttcctgctcacattgccaagcagaccaggaggctcagatacaccacccgggtacttcctccggccagcccatagccagctcgcatagcttgaagactagtctgtgaaatggtatcagtcagggctctgggtctcaaataggcacagcgactgttccgttacaactttagctttggtcttgagagcttccaactttgtgagtttgaccttgaacgtggatgtttttgtgatgcatgcatgagtcatgttcagctagtttcttatgtagctatgactccgggagatgggggaaacgaattcataagccactgaacacaaatcctgtctgggatgtggtttgggaggcatttgaggggaggtaagtattggaggaagtaggagaccagacttgctgaggtcattcttctgttgcagcaggctcaaggctacaatgtttcccaattatggtcgttacataggattagaacagtctttttgtggtatgcttgtaacaacacttttcatcaaaagacaaatttccctcaaattagcattccactcttaggactgaatatgacaaaataattagttaccaagctaatgtttaaggtattggggcagtagcaataacttggataaacagtccttgagcccttggagtgtatgatatggcttgggaagacacggtaaaggtaacacattattctcataggcagttctcagtctacatcagaggttctcaaccatttttattaggaataatactgacaccctttaatatagttcatgttgtggtgaccccaaccacataatttttttttttgctactccgtaaatgtaattttgtgactgttatgaattgtaatgtatatatctgatatactaactcatgcaagggtggcgacccacaggttgagaaccacttgcctatcttctaatcgctcccctcagcttcttccccctagaagtacatttttcactctgtgttactgcgggcaaactgtgaggtttcaaaagtccatgccaccctcagttctctctctcaatctctctctctctctctctctctctctctctctctctctctctctctctctctctctctctgccttgtgcttgtggatcaagatgtaagctctcagctgctgcccagcaccatgatggccatagacttacctaaccctctgaaactgtagcaccccccccccataatctcttcttctgcaagttgccttggtcatggcatcttatcatacttgtagagaagcacccaggacacttggtttctgagatccacgttctcgtatcatgctaggcatctaactcagcacctttattgagctctgcttgtgtttctgactttaaattggtgaacactggagctaagtgctcagaatcttcttatctcctcctctttttatgccgatggtctgaagttatgtttcaagtccttacaacttctaggaattttaatttcaaacccacctgcctactctacttctcactagagaagttttcaaatttagcataatcactaaaatcaaactcttggttttctgcctcaagagtctttttcctttcagtcaacgacaacttcatccttatagttactcagaaaaatcttggaatcagtcttgacttctttctctgatcctgcagagatgttcacaattgtgtttttttgaaacgtagaaccttgaaaatgatgtaactgttcgacagtggaagaatagataaatcgtgctactcctagtcattaaaataatattgagatcgctaataatcatagaaggtaaaagaaaaaacacgatgagatccacgaagatggtgttacacaaaagagaagagataacacctcttgacaacaactgtaagcaaggatgtgggaactggagtctatggtgggtaagagtatagatcggtacattgatcatgacaaatatggtaagccttctacaggaattaaaactagacatgtcgccaggcgtggtggcgtacgcctttaatcccagcacttgggaggcagaggcaggcgaatttctgagttcgaggccagcctggtttacagagtgagttccaggacagccaggactacatagagaaaccttgtctcgaaaaatcaaaaaacaccaaaaaaccaaaaaaaccaaaaaaacaaaactagacatgtcatactggccaacaagccctcttctggatatatgcttaaagaagagaaaaccaccactttgtaaagacatttgtgtccctgccctcacggctttatggttcacaagagctaagaaatataagtgcccatcagtaagcatgcataaagaccacgtagtgtatttatatgatggcatagtattgcctttggtctaagaggaggcgttgttattacctacaatatggatggagcagaggacgttatgctaagtgaaataagccacaggcagccataaaaatgttacatgatttttattacagcagagttcgagtatacagacaatgaaatagtgattaccattgatggaagaggagaggaagggaagtgggaacaggcgggtcaaaaggaagatgagtttgagaggactaatgtccaatatgaaatctctgattagcggaaccgcagtgcatcctgttaaatgtcattactagataaataccccatttctcctttacctgacttttgatttcaacagtttccgtttcctgaagataacttaggtgggaaaatattaagtggaaaattccagaaataaaaaaaaaagtttatacgttttctttgtatactgttttggtagcatgataaatcagccatccctttggtacaccagtgctgaatgctctactaaccagccacacggtgtctcagttaacacactgacttttcattctacagcagtgcctgggtctattctacagcttcaggcatcagtgtgggtctttggagcagatcttctgttggtgaacagtatctggactactgagattttagtcaatcttgccctccccaaataggaaccatttgagatttcagatgtttgagattccagatgtgccagtctttacgatagtgacaatggggaccatccactctctctgacaacatcttataagctatcatgaactgtcagttgtgttattttaaaaatgtagctactagcttacaatttaatacatttttatcgggcatgacttcaaacatgcttagtgatatagaattgtgaatccattaccaaactgtaacaacttacagccgttttctgctttgtttatgccctactccccctcccccacctctctgcacaggattattttaatgcaaatctcacatgtactatttacaagtggtgatttttatcttctttgggtatatataataactttgggtatataataatgtaaatattatgttgcaaatgtagatttcaggagaatgcatatggtttccctctggtaaacagggaagaggttgacaggatactttcctctgaataaaaacaaatgactgctcacatcctccttggtttgtatagatcttgccagtgtacatgtggagaaaagacgatggccgttggatgaagctgttgatgcccaccctccagctttatttgtcatgaaaacctgattgcattggttcaccccgagtgcttctgctttacacagcagagcaggcagagccaatccacgaacgtgagaatcgtttccgctggtctctctttgctccttggcacgtcagtcatttaaaatttcaatatcagcatctaccatggcagcatgctttctcatagtcagctctgctgacatcttgtgctggaccatgccttattgtggaaggctgtttatttcagtgaaggatgtttattagcatcctggctctttacctattagatcctagtatcatcttcctctctccctaccagctgcaataatcacaagtgtcttcgggcattgccaagtgtctctttgtaaggtaaagctacctctggctggaaatcactgcactccagtgatatatatatatatggagattagcgataaaaactttcattcattttattggctaaaacctcatggagaatgtaatttgtgatctgctaaaagttgttattgtgttttactgacctgcatatctaattgacaactgatgacacaatggctaatgataatctgcaaatttcagacatacccaggaacaaacttgacttggtcaactctgagaaaagcaaaggtcgtgaatgaaagcctgcttgcccgctgtggcggtgaccagtcacatttgtctctccagcttaccctcagaatgcttcaatagtctttaccatccacaacacagggaaatagtgtgtggaggttaagaatggaagatctctgcctagagaattaatgacgttccatacgtgtcgatgggtcttttgatcagtaatgaagatgtagacgtgggtgcaaaacataaaggggagggtatctaaacattgtgtgtaatttggagggtttccccatcccttagtggaaacgcttcattgagaagtgtaaaatgagataagggggagcatgagaccacctcgccccttctcttcaagggctacactgttctgaagtctcccttcaagggctacactgttctgaagtctccgtgtctccgatgccttcccagtccacagtcttattaaatacccccattttagcaatataaaaagtcccacgattcctctctatagatactcaaaggataagcagagggcatgaattagtggtgccatggtctttggaagattttatttagtggcactgtgttagacacatagaaacaaaacacaaggaaacaaaacctaaccaaagtccgcctcagacattgctgaaaaggattatcaaacactgtacgtgttgttttaaacaattccatctaagtatacaactcactagagtgcatttgcagcatcttgagtttgggaatggacgtcagggccttgcacacgctagggggaatatgaaagctagtgcttgtccactgagctccagctccagccctgggatcatgagtctaacgtgtccttgaaactgttgatgctttagtcaggttcgctagaggaacagaatcaagtgggtgaatgtattatcaggtaagctttaaaataacgacagccaagtcacatctgagacaggagaacccagctctcagctcctcgatctcttactgggagcgacgcctgtagctgcccagtccacatcagtagtcccaggtggatgctggaagcccacgaggttctccgagagcactggtccccattctcccatgaaagcttggaaatgctggctgtgctacagcagacaaatccatccctcggcccaggagcagtgagggaagggtcaagcaaaccaaggtgagaattaaccgactttgaaataccctcactggatctgagctaccacctaagggtgtcacccacagtctgggccggctgattcacatcagtggagacaatcgggaaagttcttcaggtgaggctttccactgaagtgacattaaatccaaccataatacaaagtatatgctaattatatgtaacagcgggcttcataatggagattttatgtacaaatataacctatttttaccatatcagttgggaattcctaagccaagagaagatatttataaatcctaagtcaatggtaagatgtctatagatcactttgtcttatatttgcccatcttttaaaaaatgcatactttttgtgacaatattcataattttgttattggtaaattattattatttaggtactaaatacaacatagttatgcaatatatgtaaccctaaatattggtctattttcccacaggaaaacagaagctcagaaaagatacatattttgtttagtgtctcatatcactcaatgagagggtcgtgaatcaaacacagttcaagtaaataactgcaggatttgaggctgtctctctcagcttgtgtgaatgaaagtttataatcttaataaagacttttagctgcaatttccctggaggtgggcaagtagatatctgtctgtctgtctgtctgtctattcccatcacgtgtgtatactttcaagcataataaaacctccaagcccctgaggaccggtgatggccagggaatgcactggattaggctgataagttctgtgactgtggggaaacaggtttaatgctctctgacaaagaataattctgccaaaaaggaatgggaatctcagagagcagagctccctatggaaaatcccaacattcaaatgaggaggtggccagacttcattctagatctctgttgtccgtgtcgcaggctagggagagagacaacctacatagaagcatggaaaatatatccatatgtgtgtgtatgtgtgtgtgatgtgtatgtgtgcttgtgtgtgtgtgtaatgtgcatgtatgtatgcttgtgtgtgtgtgtgtgtgtgtgtatgtgtgcgtgtgtgtatgtgtgtgtgcgtgcatgtgtgtgttgggggtgggtatctggccatggtttaaaaaaaacaaaagaatcccaaagaacctgaatgtaaatctagaaatcaatgtcaccctaaacaggtggagggaaagaatcctaacaaaagtgggataccaaccccatttgtgagtccaaactatgagcatctagatttctttaattaaggtcaaggtgacaatggcaatcccggctagggagcgttttgcccagagataaatatgtccctctgcatttctgccaggcagcagggaggtgtgtgtttggagctaaattaatttgatttccagcactccatggtaacttctgttccctctttcccgctgtcagatgtcttcgctggctgtctcccttcccttcacccccacacatttcataacaccgagggagaaagcatgggctggcttcgggcagaatttagaaactgaataactaatttgattcttctgcacggagtgctattctctcctctgtacggagtgctattctctctctctctctctctctctctctctctctctctctctctctctctctctctnnnnnnnnnnnnnnnnnnnnnnnncccttgagggagagaagttgtaaacctgagcataagtatgattatttttatatcatgcttagtggcaaaaactgcttgacaactttttctttggggccaaacctggcggctcacctctcctctttccttgtgtctaatactaacaccaacaaatgaagtcaaagctcaggcgccccggaggaacgtgctctattctgactctggctctccccactagccagactttacaggctggtcacacctaaggacacccagccctgttatggcagcctgggtgcacgcctagcccaccgcccctcgctcttcctgctgcggctgggcaggataaggttacgccggggcctccccggtcgcagggaagaaggcgggccgctggggagttgccacagttgtcagcccggtccgttgggaacgcttctctgcaggcggctgggagctgagggtgggacccagagcacagccggaggtcgaggtccccgccatggccactgtcaagcctcccgggcgtggttgtggagccctgccccggtggctgctcggtgccgcgctgcttctgggcctacggctttgcatggagttgcgccacgcgggctcgggacccccgggccgcggcgattccccagggccaccccggacacacctactgtcggcgcccggctccccacgcggagccagaaggaggcaggtgacctacgtgcgcagtgggcgccgagtgctgccccggggtggcgggagcacgacgtccccagagccgagctgctgtgcccagggcgggcttctccgcaggaaggtcagttgcaaaccatgcagacatggaccttggagttgagcctgcacccagatggcgctagggagccttctgctcaggccactgggacctcaagactcttctatttccttctagctgagctctccctggaactttctgtagtctcactcagtatccctatagaatgaagtggaattgagcagggatcatgcaaattcaactaacgtttgctgagcgcctactgtggcagacctccttctaggaaaggagcaccaagcaaccacacccatttcagcaagggagggggcgctgaaagggaaggaggcatggcttgccattgtgttttccccacccaggcctggacaaaaccggatgggtagacactatgaaaggctcatccaggtgatggtcaagatctgccttccagtagcatccagacaccgcccccttcacccactccgaccccagagtccctacccagcagtgggaactggcaccgggtgagaagccaaacccatagcaccacttagtgggaaataatcggatgctccagggccagatccttgccttgttaacttcccgcacttcattgagtaggtcagtttaaacctctggttgttgaagcctcaccttacaccttcttttgggagctctgtggtacctaggactgaaaagattaggaattggatatatgagcttgccacatccttacacctgccactcttgcttccaactgcggtgccatcctccgaagcaaggctggctgtgctgcctggagtcgggtttttcttgatggcatctgagcacccagcccccacctgcgagctggcccctgcatttaccagcctgctcttcctttggctcctctactctaacacccccactactttcagtgattttcttcccccacttttatatgccctgcgctcagtcttcccacatggcattgcttaacaggcaattctcttatgttctgggacgcacacagctcttttttctgtctccgaaatgcacctcctatataaagacttagctagttactctaaaagagacacctccttctcactgtgtccatgcagttcccatgatgctgtgctaagctttcaaaacccttgccaagggcttccactggatgctgggtcaagtgctgccagcacaaactgaattcaaagtgtctggggctcaggaaagtcatacaatttgattcaggccttgaacctatgaagaaagatcaaaaagtgaacaaaggagacatttgaactg

SEQ ID NO: 1211 - DNA, 1071 bp, Mus musculus
ctaacaggtcactggaaaacaagtgttggtgccaggacctccggtggataccagactgctttttcagagacaggccatggacacagtgtgtattgcggtcgttggagctggcgtgatagggctgtctactgcagcatgcatttcccaactggttcccggatgcaccgtcactgtcatctcagacaggttcactcctgataccaccagtaatgtagcggctgggatgcttattcctcacacgtgtgcagataccccggtacccacacagaagcgatggtttagagagaccttcgagcatctttctgaaatcgccaagtctgcagaggctgcagatgcgggtgttcacctggtatctggttggcagatattccgcagcgtccccgctgaagaagtgcctttctgggctgatgtggtgctgggatttcgaaagatgacagaggctgagctgaagcggttccctcagtatgtgtttggccaggcttttacaaccctgaagtgcgagacttctgcctacctcccgtggctggagagaagggggtgggggcagtgccaaagcatctacagcctggaccacgggccacctgaaacataaaaggaccgcctccgccgagaactcccctgaggcggggctcttgccactgtagctgagcaatgctccatcaagattcataagcacacctacgcgtttgagagtctgtgcgttctgatctgaaaataatacagtttttgtgttttctctagggctattggcttactgtgaggagaaaccaagatggcttttgccctcaggatttttaacctagtcacaagctgagctggaatgacagagccctgagagttttgccttcgggcgtgctctgcctcaagtctgtcctgtcaggtccctggtgattttttctgaccttgaaaggttgaggagagctcacagtgatctacatctgggggatgatttctggtatgtgtcataatggtaagattggtggaaggtataggagggaagtgctccctaggtggtcctatgaaaaatgatgttttggtcattcctaaccaaattaaaatcttggaatgtct

SEQ ID NO: 1212 - protein, 195 aa, Mus musculus
QVTGKQVLVPGPPVDTRLLFQRQAMDTVCIAVVGAGVIGLSTAACISQLVPGCTVTVISDRFTPDTTSNVAAGMLIPHTCADTPVPTQKRWFRETFEHLSEIAKSAEAADAGVHLVSGWQIFRSVPAEEVPFWADVVLGFRKMTEAELKRFPQYVFGQAFTTLKCETSAYLPWLERRGWGQCQSIYSLDHGPPET

SEQ ID NO: 1213 - DNA, 43354 bp, Homo sapiens
tcattcattccctatcatttactgaaccctgatagtgtactgattattggggcagggacagggttgactaagacagtccctgcttggcatgtcctgacccagggctcagttacttgtcttctccacaagattctggggtctggaaagatggggtaagtgtcttttttctttctgaccacagctcctaggacagcaccttcaggagtaataatgcaggcagtagctggcaattaaggaggcgctccatggtgggtcatgaaggaatgaatgagtgagtgatgagattaaacctcgttgatgaggaaaagaactcgaagtccagcacaagtaaccaaagatctcaccgagtaatcacagtgacaactgttatgtcaaattcaaatccattaccctctgaaaacagttaggaaattctattctccgaagggttcgttcctttcttgatgtgtcacttatcattatttttaattccttctagttgtttgttgggactatggccctcctgagtggagtgttaacactaaagcttccagaaacccttgggaaacggctagcaactacttgggaggaggctgcaaaactggagtcagagaatgaaagcaagtcaagcaaattacttctcacaactaataatagtgggctggaaaaaacggaagcgattacccccagggattctggtcttggtgaataaatgtgccatgcctgctgtctagcacctgaaatattatttaccctaatgcctttgtattagaggaatcttattctcatctcccatatgttgtttgtatgtctttttaataaattttgtaagaaaattttaaagcaaatatgttataaaagaaataaaaactaagatgaaaattctcagttttaaaaactgctttcttattgctgcaaaatatttttcaacatttgtttttctatgtagttgattctcaacctttccccaccacccccctaccatgcatgccagagggagttcacctatttcttttttttcttttttcttttttttttttttttgagatggagtctcgctctgtcgctcaggctggagtgcagtggcgggatctcggctcactgcaagctccgcctcccgggttcacaccattctcctgcctcagcctcccggagttcacctatttctatcccgccagtgccacccctccacggcttcccaaaagaaggggcatgtgagaatgcatttcttttgacaaagctccttgcagattctatttctgatattttttcccctcttatgagaatcatagctctaaaaacaagtcttattcagaaatgccctctcaaaaaatgcttgccttcacaattaaaccataaaaaatcagagctacaaaaatgatgccgtgcttcccagaaccttgagccaagaaggcttgaatgtgcagacagttgtgcttgtgtttggttcagataagggacacacacctgccaggctccaagagtgagctttctagtctggtattcttatttttcccaaatttaccaaattctccctgtaagtctcctttacagcccacagaggctatgactttttaacccactgcaaactttttcagttggcagatcatccaggaaactgactttaagtaccatctggatttgttgccattgtaaaaatgtttgtaagtattcttgcctttaaaaaaataatttacatgaagattttactcttttgttttactatactttttttcccaactctacttaaaaccatagtctttcaaaaacattaatatcctggacacttcaactgcaaattatgtaatcatcttatctgtggaagaatgcatttcagatttacagtcagtttcccataggttttgggtttttccttactgtggtttcatcataatttcattttttattgttgttgctcttgagattttgctgttaggtatgtcttatatcctgcatttgaattggtgaaacattagcattatctgcagaggaaagtaaaagaaggcagttatatagatgttgtgagtttgaaaagcatttccaagggggaaaaaaaggagggatttaacctgaattattgattttttatatgagtttagttccttgggtaattgcttagttcttcacttggtctttccattaacaaaggaaaaataaagccaaaaacttttcttcctttataaaagaaaataacatatataggattttatggagaaaaaggaggaagacatttattgagcctttatcttatttcttattttgtctcttttttcttttccctcagcccatttttctactgccattaaaatttttcctcttagttaacatttgatactttctttctttccttttttgagacaaggtctagctctatcccccaggctggaatgcagtgggctcactgcaacttccgcctcctgggctcaagcgatcctcccacctcaacctcccgaatagctaggactgcaggcacctgccatcatgtccagctaatttttgtattttttgtaggatttgtattttttgacaggatttcaccatgttgctcaggctagtctcaaactcctgagatcatgcaatccaccagtcttggcctcttgaagtgctgggattacacaggtgggagacaccacgcctggcaacactttcttgactttacttttatattctgttagtttgctaaggtgatcatagcaaaataccacagactgagtggcttaaacaagagaaattatttcttcacagttctgaaggctggaagctccagatcatggtgccagcatggttggtttcctctgacacttctcaggctaacagctggttgccctcctgctgtcttttaacatggtcatctatttgtgtatacacacccctggctggtatctttccttcttcttttaaggccatcagtcatattggactagggcttcactccaatgacctcattttaacttaatcaccatttgaagatctcatctccatatatggttgcattctgaggattgagatttcaacatatgaatcttgaggcatttctttacatttttattgcccactgtctttgtcagcttgagctgctattcaaaaaataccacaatctggtcagcttaaacaacagaaatgtatttcttacagctcttgaggctaggaagtccaacattaatgtgacagcaaggtaggttttattccagggctttctctcttgacttgtaggtggctgccatctcactgtgtgctcacaggaccatttctttgtatgcacagatgtggagagacagcaagctctctggtgtgtctctcatcataagggcactaatcccatacaagggccccacccttaggacctcatctaactctaattacctccaaaagacccatcttccaatatcatcacattgatggtgggtagggcttcaacatacgaattttcagatcatgacatctacatatgtatgactgtatcagtcaatgtctagtcaggaaaacagaaaccactggagataattcaaacagagaggaatttcatgcacagttagttataaaagtgtaggaaagactggtggaacaaaatgcagaagttacctagggatcagaaagccgctaccatggctgggttgggagcccacaagcctgcactttctgcttccactgctcgagctgaaaccacatttccgctgctgaccagaaacctaggagcccacacccccactgattctactgaaactgcctattatgctttcaactggaaggggttgaatttttagattaagttagggaaaattcactcttttttctggtattgactcttctatccattatcatgggttatctctctccatttacttaggtcatcattaatatcttttaatgaagtataattttttccataaaggttgtacatgttttttgttatattcttatatgtaaatttccattataattagaaatgagaagtttctaataattatattttgtgactgtatattgctggcataaaatacattgattttatatgttgattttgtatccatcaaccttgattaaagtagttttaattcaaaaggaaaaaattttctttattggggcagggtgcagtggcttatgcccataattccagcactttgggaggctgaggcaggtggatcacttgaggccaggaattcgagaccagcctggccaacatggtgaaaccccatctctactgaaaatacaaaaaaactagccaggcatggtggtgtacacctgtaagcccagctactcaggaggctgaggcaggagaattcctcaaaccttggaggcagaggttgtagtgaaccgagatcataccattacactccagcctgggcaactctgtctaaaaaaaaaaaaaaaaaaaaaaaaaaaaaatttctttttctttactggaagaaaaattaggctttttgtttgttgtaaaaattcacaaatgtttatcgtgcaggaagccaaacatactttgttccttcagcatttcttaatatgtgtaaccttctgattttatacttggaaaatggtgatgatctataatagttggaacctagtcataacacatccgatctgtctctgattgcaaatatttcaaggagtactttaccatagcattacaatgaatggaggacaaaccacacacaagtaggtaagattcagataggtgaccttgtttctcagttctatgtcactgaggttaatgcactaacttgactttgacaggctacgaagtgtgagaggcaatggaagcctggaaataaaaaagccctgactataagcattcctgcttaagcaaaccaatctctctttaccccaatcttctcatttggaaattcaggattatcatacaatgtccctctgggaatgggaaaattaaatgaaataatatatcaacaccatttaacgccactctgcacagtcccgatattttacaaggctatttctccattcactgtatgtgattccaccctcattaggtgtcctgcccagtcttggtcttggccagtgggcatgggggccccgtctatcagtgctccacatgtgtcgctgtcctgactgtgccctaccacacactgttgtcctccctcatggactctgcagtttagctacctggagatacttctgcagtttcccttttgctccagtggttagttccagtccatgatagctgtaggcaagactcactgaagctaatgacgcataaacttcaggctccttcagttggacaggctcctgtgatggagcgtagtaatgggtccacttggacataagctttcacagaattttgtacattttgcaaaagtaagatctagtcactacaatcagctgagaccatcatatttttccacttggttttcccttctatcacattcctcctctgccagatgttatcaaagtggtcacaggcattcttttcttttgtgattttgtatttttttcctcttaaaagggctcttgaaactgtacaaacttcagaccccacaaaagctgaatctttcccctgaatcactgttaaaaggtgtgttgttagggaggttcatactcaaaatatgctccgaatgtactcaattaaatgctctgttctgaggggcccacctgtgccctttctctcattcctatcaaatatgtaacgaaaacatactaagtgcaaaatggtgtaggcaaagcaggtacttaataaattcttgtatatggtgaagaggagtattttcttatcgaagatggtaaagctgactatggcagccaacgtctttggcaacttcccccaacagaatgtctggaagtttcgatgtttgttgttttacttgaatttgccagaagtcagtgatggctgctgtttttatgtctgaagtctacagtgcaccaacgtttcactggcaactgcttgttctctaagtaaacttttttttaattcccagcctctctctgggctcacccatgccagttggtgtcagccattctgctgaaattgaggatctgaagaacatcttaagcaattcttgggtaaaagatccactgtcagagattttatctgtaggaacaagttgggggagcaggtggtcagcatgctacctgattcttgattagttagcagtttcaggggagcaggtcaaaagtacaccaacccaccctggtcaatgtttaactagaattctccataaagcctggcttataatctcattaaccctatgaggacgatttcactgtcctacttccctgccccaaactgctgtacacatgggaatccctggcccctgagcctgatatcttcaatagtcttctgatgaacgcaggcttaggtcctgcatttactggccacagacacaccagcaaggctaacaccctgcaagccagaaacacccatggagagcacagcaagagggggagggtggctagagagaccctaaatgtgctgcagaggtgaggccctggggacctctgcagcccaagtttaaaagtctccgaagaagcgttgggaagatgatgaagcccagctcccctgcagtctcagggagatcacgtcaacacttcagaccccaaccactaacctggaaaacaacactagattctccccaggtggttcctgaggccccttttagaagttaccctcaatgatacctaaatcagttttcccatccattttctgaaggacccttcacttaagtcatagtgctagagctctgcgtttaaaaaaaaaaaaaggatttattagtcctatctgtatagactctgcactactacagagaagctttctttctgggtttcatttctgagtatgtcctcctcttcttgcttttcaggaaaacatggagtcctaacctgggcgggaggaagaaagagccttctcagatctcttccgtggctcccattactttttgaacacagtcttgcatcctagccagatttccagcactttcacaccctggtcttgcacaaacctccccatgaacccccttctctttcctcaggtcactttgaacttcctgcctctgtggctttgtctctccagagatttttctccctcctcttctttgtccatcgaaatcccactgattgattagggccttcctcacttcccatgtacgctcctggactagccacttgggtccactgtactcctctctctcctgatccttcccagcacctgcagtatgtgctgttggttagaggacagtcttattctgccttgtttcctttcttgagggagcaaacatctcagaagttcttaaatcttttatagcccttgcagtatgtcttggacaaagtggctgctccataaatgtttgttgattgatttttatagtaggtgctcaataaaatatgtataccacctgtgatactgggaactatgtatttggtcttcattcccatttcctgacatatagctcctaaaacccttggaatcttcagagtgataagagtgtcttttgtatgctaatgagatatctggtggctggagccctgtagtaagcttcaggatgggagctggtcatctggaaatgacaagacatgattagagagtggggactttcagccctatccccaacctctagggagaaggggttgaaggttaagttggtcactagtggccaatgttttaaccatcatgtctacataataaagctttcattaaaaaaaaaaaaggaaaaacacaagactgtgtttagggagcttccagatggctgaatatgtggaggttcctggacgttgtgcccccagagagggcacgggagctccttgcccgttcccatatgcctagccctggccctctcttccacatggctcttcatctgcatcctttgtaatatccatattaataaatgggtaaaggtaagcaaagtgttcttttgagttctggagccactctagcaaattgaaccattattaattgaacctgaaaaggggcttgtagggaccccgatttatagcccaccagtcagaaacccacaacctggggcttgtgattggcatccaaagtagggtaagtcttgtgggactgagcccttaacctgtgggatctgacactatctccaggtagctggtgtcagaattgaattgaattagaggacatgcagctgaagtgtctgctagggaatctgcagaatgggatgcttggtgtgtagggagacaacccccacacacctggtcacagaaagtgttctgtattcagtgactgtgacagtattgagcatagccagagaaaaagttgcttttccccaccaccccctcaccggccctcagaccaccttacaaagaattgtacatatctcaacttatcagagacctacaacaacttgcaagggattcttagttcattctcagttttcagatgggcaatccaactcagaagtcaggtgatttgctcaaggtaaaaatgcaggtctcttgaaaccaaagtttgtgctttggttaagggcttgagctttggctgggcacagtggctcaagcctgtaatcccagcactttgggaaaccgaggcgggcagatcacgaggtcaggagatcgagaccatcctggctaacatgttgaaaccccgtctctgctaaaaatacaaaaaattagccaggtgtggtggcgggcgcctgtagtcccagctactagagaagctgaggcaggagaatggcatgaaaccaggaagcagagcttgcagttagctgagatagagccactgcactcccgcctgggtgacagagcgagactccatctcaaaaaaaaaaaaaaaaaaaaagagcttgagccttgacgtcagatatccagactggattttaccatttaagagaccctggacccttccttactgtcttggagcctcaatgtactcatatacaaaatggggatagtgataatagtacctacttcatagggtggttgtgataatatgatgtcatacatgtgtctagcacatggttaatgctacatatacattattgaaaatattattgtcactaatttgacacatcacactgcctccctggaaacaaacttgttaactgtgcctcatgcctagagctcagtagacactcatcaaatattgaatcccttctttgaatatgtgggctaaatcagggatcccaaatccccaggccacagaccactaccagtccgtggcctgttaggaactggcctcacagcaggaggtgagccgtgggtgagcaagcaaagctttgtcttcatttatacccactccctatcatttgcattactgcctgagctctgcctcttgtcagatcagctgaggcactagattcttataggagcacaaacctactgtaaactgcgcacacaagggatccagtttgtgtgctctttatgagaatctaatgcctgatgatctgtcactgcctcccattactttcagagaaaaccatctaattgcaggaaaacaagctcagggctcccactaattctacattatgttgagttgtataattatttcattatatattacaacgaataataataaaaataaagtgcacagtaaatgtaacacacttgaatcatcctgaaaccatctccccatccccagtctgtggaaaaattgtcttccatgaaaccagcccctggtgcctaaaaggctggggactgctgggctaaagaatcatgtggttctatcctagattatctcctgaatagtgtttccagctccaatcaatcaacaacattactcagccctcaccccctccttcctgcttcccccaccagctgacccagcagagccaggcacccggctaactgtgggcagccaaacgaggttggaagttggacaggctcacccattattcaccatacctacaaatcagctggagaaagcccaggctggcggccagacagagggctcgtgggccagaaagggaagggcttggcagagacagcgccatggagatgacaggttgaggtcacttgctcctttctccggggcaatgggtgacagagacagccatgcaggccaatggaaaggaagaccagggggaatgtcctgaatcaagtcaccaatgggaatcagtttcgctttctctctgtctctcagggcatgagaccagccaggcactgggaaacaaggtttggtgccagagattttggtggcttccaagactgctttttcagagacaggtacttgaattcttgctttcagctgaggggtcgttccgtccatgctctgggagtttgggagtgtgtctgaatagggtcaggggacagtgatggacaggccactgtgccaggacacaccacattgctcgctcactcctcctccctggcagctggttattcttagccacagattgcttgccctttcaacttagtttattagagctgttttgagagagttgctggacatgggaggctgatgtgaaacagcgaagtcaataaggtcactggtggctgcaggacagctctactcaagctggcccccaccagactgctctggcctgggcccgttcccttctcttccctcagccctggcaggcccactctctctcagctgaccagcccactgtacagcaatcaaattaacgtatcaaattagcacagaaatgcatagactgctcgaggaataggaatatcacactaaacttcattggagggctttaaagtctcatagtgcgagaatcttcagaactggaagagaaagcagaggccactaacaaccaagcccacgtttttcctgccaacagcccttgctgaggaagctgcccagccttccagaggaaaggtgaacctctgtgtgtgggtggccatggtttgtaccatgtggcccagtaccctgattactgtgctttggacagagaagggcaactatgccaagggcacattcagaggctggtttagcccagcaagttggcctggtgctagaattttgtccaacaggggatgcaatgaccaactggtacaactgcattttctctctctggagtttaaacctgagccatacagaaagagtcagagcaggaacagatggggaaagccaaaaacagggaagcaaaggcaggcggggatgctgacagtggagcaaggctccgtgggtgaggggtgggacagagggtgccagcctcaggacacctggcccgggctccgggatgtctgtcccctgcatttccattcagactctcccaaggagccccctttatgagaccgcctcactgggtctctcttatttaccacccaaaggagcaagtaatccatctgttctgtgttacagatgagggagtggaggctaggagaccacggactgctcctcaggttacagaacctgtccaggacagacagggggccggtgacagtggcagatggcagaggagactgagttcagctgctgaaactttctgtaatgtccttattattagaaacaactttgtagacagagttgagttttgagttgctcatgggtcatgcccctcaccactgctcctcaggtagttctgggagcaaagactacagctctgtggttttctgtcaaccttccctaggttgtgcccatagggaaaatggtttaggaaagggggatgaagccgggcatggtggctcacgcctgtaatcccagcactttgggaggctggggccggcggatcacaaggtcaggagttcgagaccagcctagccaacatgctgaaaccctatctctactaaaaatacaaaaattaacctggcgtggtggtgggcacctgtaatcccagttactcaggaggctaaggcaggagaattgcttgaacctgggaggcggaggttgcagtgagccgagatctcgtcgctgtactccaggctgggcaacagagcaagaccccatttcagggggaaaaaaaagggaagggtgaagaatgagtagaaaactcctccaaatgcagacctacttactggctaggtgttctaaaggcaaatccaagccagttttgtgttactctctaaaagcccatggagatcttgttgcttatacaccaatatttaatggaaagtgagcttatggggttatcctctttatctcacaagaaacaccaataggctaagtcttattctgagtggctgaagacctaaggaaaaaactgtcaagaccaaactttgtctggatgggaaaatccttaaaacaaggggtatagctcccatttccctcctcacaggctcatggacacagcacggattgcagttgtcggggcaggtgtggtggggctctccacggctgtgtgcatctccaaactggtgccccgatgctccgttaccatcatttcagacaagtttactccagataccaccagtgatgtggcagccggaatgcttattcctcacacttatccaggtgagagatttcagctcctctatcagatacaatagatgtcagatagaatgatgttagtggaattctattgacaaaagacagctggctataggtgtaagtgtaatatgcaggtttttttctttttcctttcctctttttctctttttttgagacagggtctcactctgtcacccaggctaaagtggagtggtgcaatcttggctcactgcagcctcaacctcccaggctcaagtgatcctcccatctcagcctttcgtgtacctgggactacaggtgcacaccatcatgcctggctagtttttgtatttttgtagagacaaggtcttgtcttgttgcccaggctggtcttcaactcctgacctcaagcgattcatcccccttggcctcccaaagtgctaggattacagccgccatgcttggccataatgtgcggttttaacatcctgttggttcatctcttaggacagcctcagttatgctgcaggacagaaacaacatccaaatcttagcagcttaaaaggcaaaagtttgttcttgctcacactacatgtggattgagcatcagcaaggggccagcttgtcatcagggacctaagccgatggagcagctgtcatcctgattgtcatcagcgcatgtgcccaggggcggaggggaggggacctctgaggttctcgcctctgtgattaaacactctggacaggaagcgactttcaacgcttctgatgatggctcattggcagagcaggccacatgtctccaccctcagcaggaggccagaaagtgtgattctatagttcccggaagatggatagcagaagcatgggatgaacagtactgacaactacatgattggcggctctgtctttccactgataacagtaatgactatcaagtcagaaattacttgtaagggaactaaaattatcctaacttctaagcctgtataagaacaattatcaatatgtttgtaatcagtcaatcataattagttaatatgtattaagacctgaagatgcatggatttttttttttttttaagacagagtcttgccctgtcacccaggctggagtgcagtggcacgatcctggctcactgactcactgtaaccttcacctctggggttcaagagattctcatgcctcagcctcctgagtagctgggactacaggcatgagccaccacgcccggctaatttttgtatttttagtagagacaaggttttgccatgttgaccaggctggtctcaaactcctggcctcccaatcctcccactggtggggcatggtggctcacacctgtaatctgctggcatgccccaccaatgcattgatttttgaacatgtccatgcgtcctttcctttctgtattttccacttgaaatggggggaggaagaaaatagcattaaatagaaaccaaaatcacgctgcagtaatgaagtttatactcactgtccccatttcctcatttccactctatttttcctctttaattttattttttattttttatcaaagttatatatgcccatagtttaaaccgtcctcccttctgaagtccttttccctctttctggaaaagttaatatgctggacctcccagactggtcctccaattcttttagctttgtccccctcctatttatctctctctattttactttctgggagacttactcagttttatcttttaccttgctattgaattttttatttctactataacatttctaatattccaaagctcttttttgttctctgaattttcatttgttataacatcttatttgtgttagaagattgcaatgtcctctcttatctttatgaagatactaataacagtttttaaaaactttctccctgaatagtatctgagtatctgtcatctccaaattgtgggaggtttttgtttttgttttttgattttctcatttttcatgatagaggtttttcttggccgtgtggtattctttacctgtctgctgatgtttatgagtggaccctgaacagcagatgggaatttctgagtgtttgcacagggcttgttgccagtgagctcactggagtaagagggcagggccatttatttggggacatctgtgatgtcattcagtttaagtttttcttcttgggcgggtcctgtttcccagggaagagggttccatgtcctgcctggggaaggtgaaggcccggatgccagctggcatttgagaaggtgacaggggaagaggctggggtcctagcatccagtttgcatgtgtttccttaacactccttttttcagcacggcatccctgcctttgctggtgctttgtgttttccagtccaaagacccctaagaaagaatagacatatcttttattagggtggtaatagcagcgaccttggcattgcaggtccaggagcttggctggtcagctcctgggaactgcctcccaggaaacaaacacaggcacctggtgtatccaccagatgccagctgatatagtttggctgtatccccacccaaatcacatcttgcattgtagttcccataatccctacgtgtcgtgggaggaacctggtgggaggtagttgaatcatggagacagttaccccatgctgctgttctcatgatagtgagtgatttctcaggagatctgatggttttataaggggctttccccactttgctgagctcagctctcattcttctcttcctgccaccatgtgaagaaggacttgtttgcttccctttccaccatgatcgtaagtttcctgaggtctcccagtcatgctgaaccgtgagtcaattaaacttctttcctttataaattaccctgtctcgggtatgtctttattagcagtgtgagaacagactaatacaccagcttacactaagtgcttttcttgtgacgagagttcttgggaccattttccaggctctcccttgcctgtaccaggcctgagtgagtgttcagaaggctgccagctagtcatggaatcatccctcaaagacagtcactcatctgagggctcatagggccatcgaggccagaactgtctctttggccaggtggctggttctcctggaccagggtttttctctctgtgatgctgctagataaagactttggtcttctctttgggtttctttcctagacactattcagatgagccccagtcataactatctcctgtgctcataaatgtcaataccatatggagaccatgcctgtcccatagggttgttgtggggattaaatgagttgatacatgtaaagcatttagaacagtacctggcacatagtaagtgctatatcagcatttgctattgttctcaccattccagctatagttctgttttaccaggacttgaacatgaattaggtcatcaggcttcctagacccactgctggatgggaattgtctgttctttgggatgacttctgcagcatgtgaatctcagccactattttgtttttaaggtttggggtgagaacagggagttgcattttaatacaacctcacacagtggcatagattgttgggtaaagtctatttgaggccgaatttagttctctctgcagcttattatttatttattccttatttctaaagcagcatccccactgtgaaattttggaatatagtgttaatttcacatgggcacatgtttaaagatggcagtacagattcgctactaaagaaatatttattggctctataacaagcgaattgtctgaaaatcccgctactgacatgacttcagtgacctgggggcttcacctgggaagcaggatgtctccaaagatctttctatctgttccttgaatttcagggacacctctccaagtggaaccaacttagcatcctctctgcctcagttccctcatctcctctgtggcttccctcatagcagcccctgaggcttattgttccctggtccctggcctaaccctagccagtctctcatgatccttctacaggaatcagacggccacatacttcaaccacagctggatttgtctgtgattttgggtcattcctgccgtctctgtgcctacactggacacttattttgaggcttaaacgctgcctcttgtttcctccccaacaggcctggcactcttccaaaagttgtgtctgggtccaaccccatgtgctctggcagaggtgcctgggggatggtatggtccctgcacgcccctgctggcttcaggagtgctactctggctggcacctgattccatggtgtggaaggtaatggcagcccctgctgggaagtctggcctgcagggggctcgcctccagcatgcaagccttgtttccttgtaccaggaggcaagcccctggaactccccatcgaggtgcagtctgttctctgtcccggttggcctgggccccacagacctgcccatgtcatccactatgttttcagcccccaagaaagaggccctctgtccttggtcctattgtctcaactgtgtggccagctggatcccacagccatgaactaagctctgctcaggttggttatagacctgccaaggacctctggaatatacctagtaccaaaaaccaccttccaactagctcgcatgccgggttttgcccttattggcctgttttccctccattgattaatcatatgagcagatttggacagcatgtgtcaacatgcaaatctcttgttgctgacagatcctctgccacaatgtggcactttatattaatgttcctccctgcctccttattttatttttgcctccttattttttttccaagtttctaggaaggagcttatttgaagcactgtcattatcatcattttcctttctgttccactttgcttttctccatgattacagatacacccattcacacgcagaagcagtggttcagagaaacctttaatcacctctttgcaattgccaattctgcagaagctggagatgctggtgttcatttggtatcagggtaagtgaagaaatttgaagttattttagagtgtagcatgatcttaacaggcattagagttcaacataaaatatttactgagtagctgttgtgagcagagtgctgacttagatgcaggaggattcggaaagagcattataggctttaccccaaagaactgaagaaagacaagttatggtattagactttttaacaataaacaacaatcagagtttctcatcacaaatacgattgattttgggtttcctcagagaccatgcagtgatttgcaaatttggttaaaaaaacacgcaggaggtaaatgctggatttgggtgatgtggggatggtacagccgatggaaagcaaacaggtatgatgttgggatggctgcagagacctaagggagagggacttcttatttattcggtgtccttggagaatgagatattccaaagaaggaaattttgtaggtcactaaacttgccttttgaagtgccatgtggaaaaaaatatttctgaaactgttagcacacttctatttcatttttaatgtataatttcagtaggcatgcataattaaatgaaaatttgagaataaatgctatttgacatttctattagtaagacgagcacttaaaacatgacatcttttaatatcttcttaaactgagatcacttaatattctatcactttcaatttacttctcagtgtcatcatatgatgtaacatacatgtcattggtgcatgttacacttgtaacatacatgtgttatcctgtgtgataacacagtctttctgcggccttctgaaaaaatgtgtcttatctcctcttttgatgtcaggctgcccactggggttttttgctagtctagtgtacacacttgcattgggtgaatttctaccctttttctcttcttgtttttcctcaccatcacaaacaccaagatgatgctgatgtcagtaatttcccaaagcccctccccaaagtagcagttttgctttcctatcaatctatggattgattcttctgtataactaaatctggagccagttgatgagccaagtagaaaaaacattttctttgatttacggtcacactctttgtccaaatccaacatgagtccgtctaattcacaaattttggctctaagtaatttttggaaacagccatgtccagaattaaaatcccctgtgcatctttggcgtaagtatatagccttactcatctatttattccttcaaaacaacatattcagcattcttcagtatcaggttctttcttaggtattagggatatagcagtgagcaatttagtaataccacttggcatatgcttaacaaatatgtgttgagttaatttttaaggaagacacagtcctgcccttatgtagcttatggtctctagggaatgcagtaaatcaaatgagttaccaaattcactgggacatgagttaccaaaaggaagaggctagggtgctatggaagcatatgtctggagaagaaacttgctctgggaagtgatgagaagccatccagatcaaggtgtttcatccgagaccatcaggaagagtgtaagttagtctggtgatgttgtagaggtgaagtgggggcggggcagggtgggagacgaaggagacagcattccaggtggaggaaacagcatacacctagacctgagtctagggcgactgtggtgtgtgggagggactgaaggaagtccagagaaatgggaagccattgagggagtttacacagtgaagtgactggtcataattgcatttcaaaaatatgttttctatagtgtggagaatagatttgtgggaagagttgatgatgagatagattgggtgtggattgtagaaacagagagtagatggacttgagaaatgcctaagaggagatttgataggacttgtcagttgatggtgtatgagaggtgagtagggagagagaatcaaggatgattcttgggtttctggcattagcacctgcatggatgggtaccattttctgagttaggtaggattgggaaaagagtggatgtgtgtgtgtgcatgcatgcgtgcatgtgtgtgtaaatgcatgagacttctaagtggacttatctagtggggagtaggtaacatgggtccggatctgtttttggagctcaagagagagaatggactggagatataaccttctaagtgctcaggactggaaatgtagccttctaagtgtctggcctgtaggtcatggtgaagatatggaagagggcaagctagcccagcgcaagagtgggccagcacagagccctgcagtaaaggacatttgtgtcttcatggggactgctctgaatcaattacctagagatacatattccgatgggggaattattagcaactatgcttagcactcagattattttccttgctatttttgagcaatgatgatttataacttttttttttttgaggcagggtcttactcgtctaggctggagcgcaatggtccaattcagttcactgcagcctcgacctccctgggctcagttgatcctcccacttcagtctccccaatagctgggactacaggcttgtgcctccacacccagctaatatttgtattttttgtagagatagggtttcaccttgttgcccaggctggtctcgaacttcccctcggcctcctaaagtgctgggatcatagataggtgtgagccaccatgcctggcattataacatttattcatttactgatgaaaacaacccaatatttacaaatctaaacatttgcatagcagctattagtagtactattacagccttcttgttaacaaccaaatctaggcaggagctttttagaaaaggagtattaaattccatctttaaaaagcatgttacttttaagatgttttatttgcccagtcaccaacatctgctatttagctactgagttatctgaacctaagagaatagtaaaatagatcattttctctttgtgtttatagaaactaaatttttaaaatgttctaggccaggtgtagtggctcatgcctgtaatcccagcactttgggaggccaaggtgggtggatcacttgagtccaggagtttgagaccagcctgggcaacatagtaagacgctggctctacaaataattttaaaaattagtcgggtgtggtagcaagcacctgtggtcccagctacccgggaggctgaggtgggaggattgcctgagccccagaagttgaggctgcagtgggccatgattgtgccactgcactcccacctgggtgatggagtgagactctgtctcaaaaataaaataaaataaatgctctagagaatgtcatgtgaagtttactagaaatatgttatttcacaaatttcaggaaaaaatgttcacttaatacgtttgagttggcagatatttcagagcactccgactgaagaagtgccattctgggctgacgtggttctgggatttcgaaagatgactgaggctgagctgaagaaattcccccagtatgtgtttggtcaggcttttacaaccctgaaatgtgaatgccctgcctacctcccgtggttggagaaaaggtcagttgaaatgctccctgatatttccttatctgtcatagccataaatcacttcgtagctattcataaaatacatactgaaaagtctctggcatccctcagagctctttcgcgttgccttgccactcacaaatggctagggctttgtaaaacaatctgaagacagtgtttatgtcacaaggactaagtcacaccatgcttctagtaatttgtcttctatttttggtgtgcacttcgatgcctgacttattccctacccttcttgccccaggtaaaaccctcttattgaaacagtatcttagttttcctcatctgtaaaatggaacagtttggagaatatatttccagctacagaatgatatgatttactctaattctttggacgagagaatctttgcttattataaattatttttgaattttttctcatttttggtaaagcaaaaaaatttcattatttccttttgtcttaaataagaactctgaaactaaggacctatccaaattatgtcactccttcctcattaagttcagcccgtgataccttgaacttgcatttcggcttacttttcaggactttcaggaaactagtacttagcttccagttaggaaacacatcaagagtatcttcatttgagatacatcagtaaatctgtctttagtttagtctggacttgcaggcatgttgagagttgtgaaatattgatcctttcaattcccatatgtgtatattttggtaaataggaacgatgtgaattattgtgtaaatgttgggaaagtgacttgaagtaggccagggcaacagtgatctggtaccagatgtaggttataggataattgattcatataattcattaattacacaacttttgttgaacgcttatatatatctggcattatgctagaagctggtaaaaaagaaggataaaatatgatttctttttaaaataatttcatggtctattgtggatgactgtgtgtgtatgtgtttgcatattaattaacaatgatggtaacacacatggtaaaataaagtacagacttatgcaggttagaatgggagcagaaaggaggaagcctagatctgctaggcacatgtcagtggcatcgtaatctagttttgtagcttttcaagtgctcttctcacttttacctcttagcaatttatatgggacattttgcttctgtaagttctagtttcataaaacccatgccttttctggccttgttcaccagcccataaaccactgttcatatgccaagtttggacttgtctacatcagctgataaacgtatattttgagctatcacatgatggagttgcccaccagccaacaagcaaattttagcagcatcaccatctttcctgagtggcaatagtgtgtagtgttgaattttcccccttctaaaaatgactagaaatacaaaattagaagcattgatgctagtgataaggaactgaggcatcatataacttatcttaataaaatccagaataaaataaaataaaataaacaaaaaaagttaaaacatgtggaaaaaggcaataaaataaaataaaatttaggtaagtggaaattattaggcatggcaaaaaatggcagagtttcctttcaatacaatgcataacatttttagattatgactcaaaaagagctcaaaatggaagaacatgtacaaaatattgtgataaaaggtgaggtgtcattaaggagtttaactttttttggtattattagtggtttgggctgaagtttcattattgccaccaagtccattgtgtggctttctcatcttggatttttgtcttaatgatcagtaagctttctagaaaacctggctggagccctgtggtctccagcagatcacgaagaggcagatgagtgagaacctaagagtgttgttctccctcagagacatggtcaagggctgattaagggctttcctgcgtggggatggccaggggtatgtgttagggatggtaatggacacagagctaagggaggtagagaaactctaacaaactcttcatacagattcctaacattttgcttcattattttcgctttctttttactccttatacatattttctttcagaaccatttgaaagtaagttgcagttttcctcttgtggctcaggctgaagtgcagtggcgtgatctcagctcactgcaacctcccgggttcaagtgattcttctgtttcagcctctcaagtagctgggattacaggtgcctgccaccacgcccagctaatttttgtatttttagtagagacagggtttcaccatgatggccaggctggtctcgaactcctgacctcaggtgatccacccgtctcggcctcccaaagtgctgggattacagacatgagccaccgtgcctggccccatgtttaaatatttaaatacttgctctcagaacaagggtatcctcttacataaacacagtagtataataaaatcaatatcattatattgatacaacactataatctatggaccttattcatattctgccaattgtccatataatgtccacatgtaaatataaatacacacaacacataattttttccagtccgtgatccaattacagtcacacattgtcttcagttgtcatgtctctttagtctccagtctgtctttgtcttttattacatttacaagcttgaatagtacagaccagttgtttcatataatagaatgtccctcagttggggtttgtgtgatgtttcctcgggatcggattgaggtcctgcatgttggggtgagaatgcatagaagtaatgttgaatccttattgcatcatagcaggaggaagatgatatcagtttatccccttattggggctgttaactttcatcacctagaatgccagttatctctactgtgaggttactactttttctctttgtaattactaaatattttgttgtgatatacctgaaactatgtaaatatcctattcccatgaaacgagttcctatgaaagtagtactttcacctacgagttttagcatccattgatgatttttgcctgaactatttattactgtgatattttccaagtgatcattttataactccatctatatagtttgctttctactgtaaagaagttttccttttcctatatgtatttatatcaggatgaactcattggtacctattttattcaatggattataatttatcccccccatcattttgatgttcaaattgtccaagattagctgagtaggagccccttcaaactgctcttgtgtctttttgatatgttcacttgatttgctttttttttttttttaagcacttttttactttggggcacaacaaaattccacacaccccaaatttggagaagaaaaacattttcttttcatgaatattttccaccacctttcccttaacacaaacctgctgcaatgccacaatttaaatttatgaatttagtgcagaaagaaattgtcttttctcttttcctctgtcccctgaaattttcactctgttgcaatgtaaatcctgatttgaggtgtagctaaagaacacacctctaccacaaccacctggaagtccaagttgacatttagaatttctagattcctaagagtcctgcatcttcacatggcagcaaaggggcccaggagcatgccgggaagcaccctcgctctatccatatcttccctgaagacagttgtccttggccactccttgggctccggggtgcacacagtggcacagtctgcccccgggaggaagacagtgcaggtcctggaagaggacagggaatatggggatcctgggtccccagaagacgggctggaagtgaagggagagggctctggctgggcacatgcccgagccccacacactcactgcctcaagaagaaagcatggctggagaagggccagacaggggtcctctgggtgcccagctgaaagaaggtgcggctcagatgagccagagtaagttttgagtcctagtgatagccttgagcttatgggtaatcagggaaggcggtgtgaagcgtttcttcacaaactttctcgggcccaagctttcattgaagcattggctctaaagtctagaagtgaaatgcaaatgcttaactcctcctgggagagagggctcattgctttcattttgctttaagggccaaattgttgataaggccctggggagatgaggagagttctgatggggcagggagggggcatgaaggcccagggcacctgaagaggtgtcactgtagaagggggcagaggcagggacgccagcctccccccagcacacagtcacctcctctgaggagtcctcataagtctcccagttggcctggtgccgccctgcctcgtgggcagcgtcctcctctgcgggggctggaggtccccacgcgggcccgtgatggggcgccagtccccgccccggcccgctcctgcgcaccctcccagctcccactactccgagagagagtgttttagctccgggcagcccccgtcatttccacaccgaatcaaatgttatctgaacaatgtcttcttcctgcttccaaagcatcgccttctagaagacaggccccgtagttccatcatctctgtgttttcagacctgacccctgactgcgggaggaaggcctgggtcaaccctgccaccccgtcctgggctgcgggcctgcggtcagcatttcccgccacttaaaatgacccccagccagggggcttggggctgcgaggacggcaacgccatcggccggagaccggcggagggggcggtgcctgggaatacgccgcctcccggctgtgggtcggttatgggcagcggggaggagaggaccgagggctgcccttttacccgagtcctggggagaccttcttcagtccgtttgtttgatacgcgtgcccgccaggaaggcggctgagatgtgagtgcctcagacagaaggcacagggtgtgctgcggcgggaagacttcagagcctctgctcctcactcccttgtgctcctgagacctggctccctcctgaccccggtgtggggcctccacagacagcgcccggtggcccctggccatgcagattagctccctgcagcccggagcctgcgtccgaccaggctggtggaggaacaaggccacgtgtcccctttcctccctcaggaggctttgcagcacgggactcctctcagcccaagtccggcctttcagggcgagcatttcaggcggggtgggcgggagggccgcgtcccggtgagggggcgacacctggggctccctctgggctgccacccactgacctcccgccaggcgacccacatgggacgccacacaatctctgtttgctcctcacactcagggtctattttgttgccacctacgcctcttccacacaatgtgagtgttcagccttcagtgttctcactcaaaaataagcatttgctcagcaagccacacagcaatggcttcagcttaagcacgattcttctgaaataatacaaacttccacaaaaaaattttgtgctacaaattagatctttattatttttcaaaagatagaagagatcatcttgttctcaaacaaaaagtaaaacaataatgcccaataatatacagaagaaacacaaacaaaaaccccacagagtttgaatcacccacacaggtcatatttcatatcatattctgccagtggagttaaattctgctgctttattactggctccttccaggaaatgagtcagcgaggcattaagtcttcctccaggcagcccacctaaatcaatcctcccagagggaccaggattgtcctgcctttgacaacattcaggaaactgggtggcccatttctgtgctgggccctgtaacatggacacgttgatctctttccaagaggccatgccttatcctgtgtccccaaggaggccctatgctgaccgcagcactggccacactgagctacttgccctgtactttcctcgcccctcctctgattaggcctctctgtaactttctctgggggagtcctctaatgcccatctttttcttctcctgtatcttgtgttctcctgctcggcctgactcacagcaatgcctgtgaaagaaactggcttcctcagcaccatcattagccccattagccagccatgtctgccctggagctcaccaggagctcgtcttttcccctgtccccgctgccagccacaggctgtccgcatcacagcccccacctccctgtttagtgctacctgagattcctttctcgccatggcttcagcttcagtggagtatgggaattgcctctgattccaagagcagagaggggatgaggggactctgctcctgggaggcctggtgtgtttgtgtgtgtgtgtgtgtgtgtgtgtgtgtgtgtgtgtgtacgcatttaagatttgcttagtggacccttattttcctcaggggcacagccaactcaatttacctccttgctgaaactcccagtgaggtgaaggaaaggcgctgaggatgaccatcctccttgtttgtgggtcaggttgatgcagtccagcagagggctaacttaagcttggggaaatggacactctcatgttttagggtgatgaccagaggatgctggggctatttcgtgagccctgcttcttgagtgcccctaaccctatttcctcatgggaggttgggacaatggtattctctctctccaggatgaggtcttgctcagttgcaagaagccccaagaggaaagtcatcatgcttcttgtacctccaaccatgtcaccccaaacttccagaataactacctcatacggtcataaaagcagcctggtaggcacttggtcacctaatttaacatctgacttttgggtacagtttcctcctatgcactggtgccatcttatgcattacccatgggatacataataatgactgggcatcactatgtggttgcattacaacaacataaaggtgaccagtctccaggcacatttagtgagttttcctctgggatccaaggcctgggagcaatccagcacaggaagcctgacaaggcccagccactaggatagcttaagaagtcaccaggcacaagttggacttttatcagtagcttgaccagcagggaacccttgaaacggaaaagaaaagacatttgcacttattgaattcttgcataatcatcataaaaaccctataagttaggcattcttatccctaggaaacaatttcagtgagttttaaaaatctgctgatatcccaaggctggcagattctcttattcccccaaattatgaaaataattctgagttttaattaattaggatatctagagcacagaacataatgttcaaatattaacacatggaatctacaatgtaagaatttaaaaaacccacaaaatcaaaataatattcaaataatgatcagttaaaacttttcaaaattgaaatatcatccttaatgaaacataagtgatatacaggtatggaggataagaatacacatagataatgcactgggtcttgtattttacagtagcatgaaaaacccctaagcacttttttaaaaataaaaggtctttattgagcagctatagtgtgttagacacagtgttatgctttttccagatgtgtctcatttcattttcacaacgagcctagagagtcagtattactacccccatattatggatataagattaaagtttagagaagtggaataacttggccgaggtcatatgaatggtaaagggtagaggcctcctaagctctttttaaagttcttttcttcgtgttcactttttggaagattataaacacacagaaacatgctgctcagtattactacaaaactccaatttacttttctttctatgccaatgttaaggggaaaaacaacctttacagttattttacctttaaaaacatttatctattattacatgtttaagaacataatttaagcttctaaattggttattcttactgagagagccaaaaacaatctgtccccataaaatttgctatatttagtactttttatctatgaacagttttacttataaaacaaacaaacaaacaaacaaacaaacaaaacagtagctccagcttcattctctctcttttaactacttttaattacatcaaaaagtaatccattggctttattggttctctgtggccccaaagtgtagatgcttgccagattcttttctttggtttccttgtctcaggtaaacaatatactcccttccttggatttttagaataaaaagcaaccgaatttaggttctgttgtttgaagcattgatgctggcaatgcagcttgcatttaataggaagtgcagtgcaggttcatgtgatctcagagcaagcatagcctctgagttcttcttgcctcctaagggtgctgggcacagtacaagccctcaacaaatacttgttgaataatcagtgagtctaatccagaggtttcaaactgttcttgaaactgctcagtggacatacttcagaggtctctgcagagggagggagtgtgaagagactgagcagatggagctctgcccagcagcttgaccttcagtcagatgcagagaactgcaaagatgctgagatgacagcctgtggcttgtacttgatggaataggaagctgagctattggggtcagggtctaagatgccattgagtagcaatcttggtctcttccatgctcatcaacgtgaggcattctctctctttctctctttctttcttttttgagttggtgtcttgctctgtctcctaggcttgagtgcagtggcgggatctcggcttgaacctccacctcctcggttcaagggatcttcccatctcagcctcctgagtagctggaattataggcatgcaccaccatgaacatgagacattttctagaaatgcaatccagcatcagaaggccagttttctgctgatcttaacacaagttgcagttaaactttccaaccaggaagtggggcggaaagttagaatcacttcaaagagtccctccttgctaagttaaaattagttgtcaaacccatgccatcattgaccaccattgcagaagtttctgtcttttttattattttccttcacattaaacctgtttatctggccttgaaagtagatagcgctcagaactgctgtgatgatcacttctgctctcttaggggcatgcaggatacaagcattctgcctccattttcaaggtcagcccttcccagtttctccctgaaacggcttggattgcggcagtcagagagagaagatgccaaagttctgccaccctgtatctctctccagacaaaaagaatgaataggatgtgtaagatcggcagggtgagttggcaggcaagcaggagacccaggagagccaatggtgtagctctagtccaaaggccagcaggcttgagactcaagaagagccaatgtttttgttccagtccaaaaagaggaaaaagccaatgtcccagttggaaggcagtccagcgaaggaattctttcttccttggaaaagagtcaacttttttgttttattcaggctttcaactgataggatgaggcctacccacattaaagaaggcaattagctttactctgcccactgatttaaatgtttttctcatccaaaaacactttctgcagaaatacacggagtatgtttggccaaatatctgagcaccccatagcccaatcaagttgacacataaattaaccatcgcaggtccaaaccaggatttcatattgtctttagtattggctaatacttacttccagtccacttggtgtggggcacttagctaggtcatagggatggtaagaaacataagatacaatctctccccttgaggaattcgtgatttattgatatcggtcctctaagatgtattgtgattgacgactgttcaaagttgtggccattattttattgtaacctcacaaccatcctgtgagacaggcaagggaggtatcctccccatgatgcagatgaggaaactgagatttgaagtgaggtgagttggccaagagctcaaagctaatgtgaggcagagctgggatataaagccaggctttctgatttcacaccacttctcctgtagaacttagtccattctgccaagcatttacacttctgtctgccagttcctctgtcagcccttgacgaagggcactgtcactcacacccttctggtccctcttagcagtgccccgcatgcaagcattcggcctgcgtctattgaacagagctgctgatagtctctttctctattctacaagtgacctgtgaataagattacatgtcctgggggttattgtttattgggtagactttccattttgcaagattaaaaaagttctggaggccaggcacggtggctcatgcctataatcccagcactttgggaggcagaggcaggtggatcgactgagctcatgagttgcagaccagcctgggcaacatggcaaaaccctgtctctatcaaaaatacaaaaaaattagccgggcatggtggcacacacctgtggtctcagctactcaggaggctgaggtgggaggatcacttaagccaaggaagtcaaggctgcagtgagctgagatcacgccactgcactccagcctgggtgacagagtgagaccccatctcagaaaaaaaaaaatattctgaagatggatagtgcatatggatggtgatggcggttgcacaacaaggtaaatgtgcttaatactactgaactttacacttaaaaatcgtcaaaatgataaattttatgttatgtgtattttaccttgatttaaataaagactacaggtactggataaaccatttcttttcactattgatatagttggtccaaaaaatatagtaattaccaaccacagctgccatttagctcatcagctacaaatattttgtgttcttctcgtgctaacatagttgtggacataaagctggtggggatatgacccctgtaccttttagttagggagaccaggctaatacaaaggatcatgcaagagttaacaatatgagataaaatgtttaaggtagtaaatttaggtgttaaataagtggtataaataagaaatgcttggacatttaaaataccaaatcaacttggcatttattcagcatctagaataatgtaggaattttacaaaattttaaaagggcaaagcatataatttcctttgttttgaattttcaagtggtttccatttagattcaactttagaaatccccagttcctaggatgtgaagcagttgatggctagaatttggcctgactgggccctggaagctcctgaggtgtttgttcatcagatcatcacctaatttttgttcctgggttccttttctttatttcctggaagtagttgatcaggacgctaacaaatattcacttcatggcctctcttccgtaggataaagggaagtggaggctggacactcactcggcgaatagaagacctgtgggaacttcatccgtcctttgacatcgtggtcaactgttcaggccttggaagcagacagcttgcaggagactcaaagattttccctgtaaggggccaagtcctccaagttcaggctccctgggtggagcattttatccgagatggcagtgggctgacatatatttatcctggtacatcccatgtaaccctaggtggaactaggcaaaaaggggactggaatctgtccccggatgcagaaaatagcagagagattctttcccgatgctgtgctctggagccctccctccacggagcctgcaacatcagggagaaggtgggcttgaggccctacaggccaggcgtgcgactgcagacagagctccttgcgcgagatggacagaggctgcctgtagtccaccactatggccatgggagtgggggcatctcagtgcactggggcactgctctggaggccgccaggctggtgagcgagtgtgtccatgccctcaggacccccattcccaagtcaaacctgtagatgacataaaatgacagcaaagagactgagagactgttgatcaaagcacagaacaggttcaaataacttttccactgcatgaaagtttaattagacatttctttgttttcaacattagaagtggtgtaacatgtaagctgagcacggtggcatgcctatagtcccagctacttgagaggctgaggcaggaggatcgttgagcccaggagtttgagtgcaatctgggtaacattttttagaggtgccagttcccacctctaaaaaaaacaccaacaacaaaagaaatgatgcaacatgtaggcttacttaggaagtccagcattaatggcatagggcataaagctctattttttgttaaaaatacttcttatagagtaaaatttatttagaactgatgtccaaggacctatgcagatttatatgaatgttggaagctatagagattttgatatcatttggcttataaatccacaggaggagataatgtatggaaaacatttaaatcactgtcaattgcagagctgcctgtgatcttcttaggttatagccaagtcagcaacataattcctctaaataaaattacattgtgctcacacagtgctggattattacatttaattgaagacaaagcatgcttgctcctagtactagcagcaagcttttcctcccctcagctggtaatgatggtaggagacagagatgaagttgcctatgtatgtcatatcaattcaatagctgcctggggtcaaacacctaggggttgtacattccattactgtaaatgattgagagctggtttgtggtatggttggctttgcctaagcatttttgaagatgaacagcatgtgcagccaaagaactaatttgctaattaaggtggaacaatcattctgaatgaaatataatcagagtactccgcagtttgttaagaagtactggggaggaggggaatgtgtctcacaataaaatgagttggaattgttgagctaaatgaatttaacctgttttttgactcaggcctactcagagcctctaatgtgtgcacgtgtattgtgaatcctctagagagcttgggtggacggaaaatgaagtgctggtattgaagtaaagaggcttgaggaggctgggcacggtggctcacgcctgcaatcccagtactttggtgcaatcccagcactttgggaggctgaggtaggtggatcacttgagttcaggagttcaagacaagcctggccaacatggtgaaagctcgtctctataaaaatacaaaaattagctgggcatgatggtgggtgcctgtaatctcagctactcgggaagctacttgaacccgggagacggaggttgcagtgagctgagatcgcaccattacactccagcctgggtgacagagcaagactccgtctcaaaaaaaaaaaaaaaaggcttgaggagaaatggatttaattttaatatttggggaagacgacttctgttaaatgatacagtaagttatattttggacatcctgagtgagatacagggttgccaatgaaagtgtgggaaagagaaagctcttagcacagctacagctttactgttgcgttcattcagaacttgcatatgattttgtttgcagagaacattctgctggtagacagtgagagaagcccaccagtgttttatgcagtcataatcattccttgcagtattaacattctcaagtaaaatcaagtgtgggctcttttctatagatttccaccagggggtggtgttgtatcagattcagatacattggtacattcaaaaatttagaaatgactagaaatgaaagatggataccaggtatatagagtgtgcgtgcttcttttgaggttttggagtttatatactccaagtgcaactcttctgaattctgttttaagtatttgagaaatgtataagtttagacagactggaaacacatatgcatcatacataatctgtgagaaataaaaggttatgataaaacagcattttttaaaggaggaaataattttttaatagttaaaaataaaaatgaaggccactgttcagaataggtagaatttcagtcatttcgaagcagctttaagtgtactcctttgttcactatgcctgtggttcagatcctgtggcatttttattgtgtgttgtgggctcaccttctatgacctttgcctatttgttactctagttcagcttcactctgcgttttatatttctaaagtgcaatgctacaagagtgcaagactggaggcttcttgagaaagtggttgtggctgcatgccctgatttcattttcactaattgctaaatattgttcccagtgtctctgaaacattattcattttggtcagtagctgccaacctgggctgcaacttagaatcacctgggaagtttttaaacaatgttgatgcccaggcctgctttatgaaattagaatctttggtgggtggggcggagctgctgcatcagtgtttacttaaagctgtccacaaagttctgagagccagggctgagaaccactgagcactacttccctcccctccttctaggcccccactgctagcgtcaccattatccttcccttccttcctcgccatcttggggcatcgagctcagagggatgtgctcacttaggcaagtgtgtccttaggcacttctgggcaaggtggcctagaggaattagctgtcccaaaatagctctctagaaatactggaatcaccttgctggctatcagtcagctgctccaagacagctatctgtctttatctgaaagacaacagactgaatgtacaaatggacaatggctagaccacatataaaaatagaactctggcccacaagctgcagcaacctgcccaggaaaccaattcccttatctacaataaacaacacaggaagccagcctgctacacaagtatatcagacttgcaggaagccatattgccatctctagaaataatccagaaagataaacaataacttctgtaacaattcacacaaaatggccaggacttgattaataattgacagcatccctaatttttgcccccacctctaacttagaacaaatcagagaaaaaaaatatgcttgcccccacttctaacttaggaccaaccatataggatgctttgcttctagttaacttgcctacagtgtccccatgcctatcaggacatatgtgaagtcttctcttttttctgttgtgaagctttctcacccctctgcctacctttgaatctctgccaaatgtaagtgtgatgggctgactcccttgctatagtaaaatctaaagaaatagcctttgcatttctcatttgactggtatattagtcagggttctccagataaacagaaccagtgggacatatgtagacatatagaaagaaatttcttatgagtgttggctcacacaattatggaggctgagaaatcccatgatctgctgtctgtaagctggaggcccaggagagctgatgcagttctagtccaagcctgaatgcccgaaacccagaggagccagtggagtaagtctgaaggccacagtgctgaaatccagggacaggagaagacagatgtcctagctcaagcagagagcaaatttgtccttcctcacctttttcttctattcaggccttcaacagattggatgatgtccactcacattggtgaagataatcttctttacttagcttactgattcaaatgcttatctctcccaaagatatcctcatatatacacccagaaataatgtgttgccagctagctaggcacccttagctcagtccatttgacacataaaattaaccatcacagcttatcttcatttacttcaaagatttcaatgtttatataagttgaggtcttcctgggtaatcggtgctactgcctgagaatagactgctttattttttctttcttgttttctatttcagaacatcttttatttttttctgaacatgaagaacaactgatttccttcttaaatctctgctttcaagtgtctggcctttgtggctgagtgtctgcctgctgtgtctgtgacccagaggaacgaggctgctttgagccctgtcattgccagcgtgtgcttcttcagcaggcaaaggttatgcacaaagttttaggattttttttttaacttttgggattttatttgcttaggaagaaaaaaaaaagtttaacagaaaggccatagcccaggtggacacagttgtatagaagaaaggctatttttaaaaatgacatatattcttccttttattgaataatgcattcaaatcaactgatatttgaaccggtttttctcaatcaattaaaagcttttagaaaaaaggaagaaaaggatggtggaacatgtgtccactgggagttgtagttcttagaaacctgttccaggactttcgtaacttgtcaaatatttgaaataaatgtagcattttttttatttctctcgtttttcttcttaagggtgtgaatgatggagacacatttgaaacctgcttcctcaggatatcattcactcaagaaaagccaattgagatctttaagtggtccctttcttcttgaaaaatctcagcagtttgccacaaggcctgggggttttattattctaagtaactttgctgccaataaatcacagccctaagtagccaaagggaatgcattagccagatctcttataaatataaccaatgcttcttcaattattagcagaacaattgacttccatctactcaaggcacctgtcaacctggcctgcagccatgattcccacaattccacctcccagagcctgttccccttgaattataattttttttatactggtgcacattctatggtatgagcccaggacccaatttttcatgtatcccggtatttctcttccttgcagatccaagtcgtctgtcaatggaactcaaccagtgtggttgaaactccacatggtctttttgctctgcccaggactcctttcctgggaaatctgctcagacctggaagattcactgtgtgggcagtatccctcaggccctacctctctggttacagcttattggagcagaggaaactgtcaggtttaggccccattgcaggtaacagaaaccccctaaatatttgcttaaacaaggtggtcatgtatttcactcacataaaagaagcctagatacaggcagtttagggctgttgtgaggtctccaatggtcatcagtgatccaggctccttccagctcatactatgctatttcaagggtgtggcccttgtgctcacatccaagatggcagtcagagctccagcacatcattatatccactctccaaggacagttcccagaaggttcacgtaacacctttgcttgtatttcacttcataggatttagcctcagggttacactgagattcaagggaagccgggaatgtagtcttttgtcttggtggcaatgtaaaagtcaaggttttagtaggctctgcaaaagtatcaaactataaattgagttaggtcagtgtttgggctctgaaactgaaaccccagaatatggcacattgacatgctgaactgaagaagtctcaaggtctgtctgaccttctctaccccaatcctgtctctcccaaagtacaggatgcagctgttctctgaagttccattatctgcctgaagtccaaaccaccaaagaaaaaaatcagttacctctggtaccttccctgagttttcatgaactgaactcatatgacaggaagaaagactgaagtctgtcaacacacctggacagacttctgtcccaaaccattgtctgctaagcagacccaaccaactttgtcccaggccattatatgttctttaaacccactgaattcccctaaaaatcatttacaactcccctaaaatcatccacacttccccatcttcctttcccctaagaagaagggtatagaaccatctgtaccccattggatcatggggactcactctaattcacccttgtgcatgttaagaaatttgtatgccttttctcctattaatctgcctttgatcagttgattttcagtgaacttttagagggtgaagaggaaaatttcccttggcccctacactagtcagattaagactttgtactaagaatttcctgttgatggtaggctctggagacatgtagactggggcttggcaatccaggttgtttaggtttacacagtggaagccaggcaagagagaagaagaggagaaaaggcagagatggaagcaccagggcccacgtactgctggggaagcaacgagaatgaccttggttctgatccagccctatttcttatcttctgtctcactgaacagtcgattctatattcctcagaaaccccacatttaaaaaaaatgcttttaaaacaattattgttttaagaaagtaaaaaaaagtgggagctgaagaatttcaggttcccaacaaagtagttgctttttctgtaataatttcaataataagaatgcttttgatagctgtagagtaaaatctaaacatcacagatcaaatccagcatttagcaacttttgcttaaaaatattgtcccttcttttcctatcactaatgtgatattttacaagtccttttttcctttattgttataacccattgttaagataaataaggtcaaagctacccaaacaaagcctttgcattgcttaggcaacagttttttgtttttgttttgttttgttttttcaattggtgctagcttctaaatgtattgttagttcctagtcaagatcttgttataaccaatggtgacctcagtaatgcagattattttctttaattaatagaactgagttatggccaatttgtgtggcaaaactcatattttaggagtaacatctgtatttagtttcttgttcatggattctattgggggaatattttatcataatcctcctttttccttgagcccattaagtggattctttcctttcaaccaaaaaccctgtataagtcaattgataaaaaacaagtggatcactgtgatggaaaagcagagttcaactatccactagaccaaaggtcagcaaactgcttctgtaaagagcccaatggtaaatatttaaggctttgcaggctacacggtctctgttgcaaccactcaattcctcaactttaccattgtagtctgagagtggtcatagctaatgcataaacaaatgatcatggtgtgtttcaataaaactttatttaaaaaaacaggcagtgtaccatatttggcctgaggactatagttcaccttatattagacaataagatctgtgtgctcagggagatgtctgatttagcactttatagccagctcaggcaccaagcctggtacttgataaacatttattgagtgactaggtaagtgaactattaatgcaacatcaatggatagattatcccaatttaaatttgatttttttaaaaaagcaagccccattcaacaagctcttgttttggcctgctgattgattttccttaaaatgtaaaaatctatctactactaaaatttcacagcttgaatataccattgagaacacattcatggcctagattctcaggcagctgaattatctaaccagctagaaggaacaggctgtagaaaactttcttcggagcaaagccagcatgtgtatgccttcacccaggtctgcatatcttcctggcattactctactaagacatgaagcagggtacatgaagcaagggccatgaagcaaggtaagggtgcctctggtaaaggagcagctgaaagccatgtctcttccctgtttttatgccttctgcagcctccaggcctgttgtacctaggatttgggtcctgccacaagagcaacaagataatagattttttttctttatttcttctaaaataagaattgggatacatgtgcagaacttgcaggttcgttacagaggtatatgtgtgccatggtggtttgctgcacctattgacctgtcctctaagttctctcccttcaacccccaccccccaacaggcccctctctgtgtccatgtgttctcaatgttcaactcccacttatgagtgagaatatgcagtgtttggttttctgttcctgtgttagtttgctgaggatgaaggcttctagctttatacatttccctgcaaagaacatgatctctttcctttttatgactgcatagtattccatggtgtgtatgtaccacattttatttatccagcctatcattgatgggcatttgggttggttccatgtctttgctattgtaaatagtgctgcaataaacatacatgtgcatgtgtctttatagtagaatgatttatattcctttgggtatatacccaataatggggttgctgggtcaaatggtatttctggttctagatccttaaggaatcaccatactgtcttccataatggctgaactaatttacattcccaccaatagtgtaaaagcgttcctatttctccacagcctcaccagcatctgttgctccctgactttttaataattgccattctaactggcgtgagatggtatcttactgtggttttgatgtgcatttctctagtgaccagtgatgagtttttttcatgtttgttggccacataaatgtcttcttttgagaagtgtctgttaatatcctttgtccactttttgatggggttgtttggctttttcttgtaaatatgtttaagttcctcataaattctggatattagacctttgtcagatgggtagattgcaaaaatattctcccattctgtaggttgcctgttcactctgatgatagtttcttttgctgtgcagaagcgctttagtttaattggatcccatttgtcagttatggctttcgttgcaattgcttttggagttttagtcatgaagtctttgcccatgcctatgtcctgaatgatattggctaggttttcttctagggtttttatggttttgggtttcatatttaagtctttaatccatcttgagttaatgtttgtatagggtgtaaggaaggggtccagtttcagttttctccatatggctagccagttttcccagcaccatttactgaataggagatcctttcccattgcttgtttttgtcaggtttgtcaaagatcagatggtgatgtgtggtgttatttctgaggtctctgttctgctcccttggtctatatgtctgttttggtaccagtaccatgctgttttggttactgtagccttgtagcatagtttgaagtcaggtagcatgatgcctccagctttgttctttctgtttaggattgtcttggctatacggggtcttctttgattccatataaaatttaaagtagttttttcaaattctgtgaagaatgtcaatagtagttttgtgggaatagcattgaatctataaattactttgggatctatggccattttcacgatattgattcttcctatccgtgagcatggaatgtttttccattcttttgtgtcctctcttatttccttgagcagaggtttgtagttctccttgaagaggtcctcacatcccttgttagctgtattcctagatattttattatctttgtagtgattgtgaatgagagttccttcatgatttggctctttgcttgcctgttgttggtgtaaaggaatgcttgtgacttttgcgcattggttttgtatcctgcaactttgctgaagtggcttatcagttcaagaagcttttgggctgagatgatggggttttctaatatataaaatcatgccatctgcaaacagagacaacttgacttcctctcttcctatttgaataccctttatttctctctcttgcctgattttactggccagaacttccaatactatattgaataggagtggtgagagaggacattcttatcttgtaccagttttcaaagggaatgcttctagcttttgcccagtcaatatgatattggctgtgggtttgtcataaatagcccttattattttgagatatgttccatcaatacctagtttattgagagtttttaacatgaagcgatgttgaatcttatcaaaggtcttttctgcatctattgatgcaggggttttgtctttagttctgtttatgtgatggattacatttattgatttgcacatgttgaaccagccttgcgtcccagggatgaagccaacttgactggggtggataagttttttgatgtgctactggatttggtttgccaatatcttattgaggattttcgcattgatgttcatcagggatattggcctgaagttttctttttttattgtgtcttttcctggtttggtatcaggatgatgcttgcttcataaaatgagttagggaggagtccttccctttcagttgtttggaatagtttcaggatgaatggtatcagctcctctttgtatttctagtaaaattcagctgtgaatccatctgatcctgggcttttttgggttggtaggctattaattactgcctcaatttcagagcttgttattggtctattcagggatttgacttcttcctggtttagtcttggtagggtgtatgc

SEQ ID NO: 1214 - DNA, 1836 bp, Homo sapiens
tctgtctctcagggcatgagaccagccaggcactgggaaacaaggtttggtgccagagattttggtggcttccaagactgctttttcagagacaggctcatggacacagcacggattgcagttgtcggggcaggtgtggtggggctctccacggctgtgtgcatctccaaactggtgccccgatgctccgttaccatcatttcagacaagtttactccagataccaccagtgatgtggcagccggaatgcttattcctcacacttatccagatacacccattcacacgcagaagcagtggttcagagaaacctttaatcacctctttgcaattgccaattctgcagaagctggagatgctggtgttcatttggtatcaggttggcagatatttcagagcactccgactgaagaagtgccattctgggctgacgtggttctgggatttcgaaagatgactgaggctgagctgaagaaattcccccagtatgtgtttggtcaggcttttacaaccctgaaatgtgaatgccctgcctacctcccgtggttggagaaaagattagctccctgcagcccggagcctgcgtccgaccaggctggtggaggaacaaggccacgtgtcccctttcctccctcaggaggctttgcagcacgggactcctctcagcccaagtccggcctttcagggcgagcatttcaggcggggataaagggaagtggaggctggacactcactcggcgaatagaagacctgtgggaacttcatccgtcctttgacatcgtggtcaactgttcaggccttggaagcagacagcttgcaggagactcaaagattttccctgtaaggggccaagtcctccaagttcaggctccctgggtggagcattttatccgagatggcagtgggctgacatatatttatcctggtacatcccatgtaaccctaggtggaactaggcaaaaaggggactggaatctgtccccggatgcagaaaatagcagagagattctttcccgatgctgtgctctggagccctccctccacggagcctgcaacatcagggagaaggtgggcttgaggccctacaggccaggcgtgcgactgcagacagagctccttgcgcgagatggacagaggctgcctgtagtccaccactatggccatgggagtgggggcatctcagtgcactggggcactgctctggaggccgccaggctggtgagcgagtgtgtccatgccctcaggacccccattcccaagtcaaacctgtagatgacataaaatgacagcaaagagactgagagactgttgatcaaagcacagaacaggttcaaataacttttccactgcatgaaagtttaattagacatttctttgttttcaacattagaagtggtgtaacatgtaagctgagcacggtggcatgcctatagtcccagctacttgagaggctgaggcaggaggatcgttgagcccaggagtttgagtgcaatctgggtaacattttttagaggtgccagttcccacctctaaaaaaaacaccaacaacaaaagaaatgatgcaacatgtaggcttacttaggaagtccagcattaatggcatagggcataaagctctattttttgttaaaaatacttcttatagagtaaaatttatttagaactgatgtccaaggacctatgcagatttatatgaatgttggaagctatagagattttgatatcatttggcttataaatccacaggaggagataatgtatggaaaacatttaaatcactgtcaattgcagagctgcctgtgatcttcttaggttatagccaagtcagcaacataa

SEQ ID NO: 1215 - protein, 416 aa, Homo sapiens
MRPARHWETRFGARDFGGFQDCFFRDRLMDTARIAVVGAGVVGLSTAVCISKLVPRCSVTIISDKFTPDTTSDVAAGMLIPHTYPDTPIHTQKQWFRETFNHLFAIANSAEAGDAGVHLVSGWQIFQSTPTEEVPFWADVVLGFRKMTEAELKKFPQYVFGQAFTTLKCECPAYLPWLEKRLAPCSPEPASDQAGGGWRVPFPPSGGFAARDSSQPKSGLSGRAFQAGIKGSGGWTLTRRIEDLWELHPSFDIVVNCSGLGSRQLAGDSKIFPVRGQVLQVQAPWVEHFIRDGSGLTYIYPGTSHVTLGGTRQKGDWNLSPDAENSREILSRCCALEPSLHGACNIREKVGLRPYRPGVRLQTELLARDGQRLPVVHHYGHGSGGISVHWGTALEAARLVSECVHALRTPIPKSNL

SEQ ID NO: 1216 - DNA, 1417 bp, Homo sapiens
gctcatggacacagcacggattgcagttgtcggggcaggtgtggtggggctctccacggctgtgtgcatctccaaactggtgccccgatgctccgttaccatcatttcagacaagtttactccagataccaccagtgatgtggcagccggaatgcttattcctcacacttatccagatacacccattcacacgcagaagcagtggttcagagaaacctttaatcacctctttgcaattgccaattctgcagaagctggagatgctggtgttcatttggtatcagggataaagggaagtggaggctggacactcactcggcgaatagaagacctgtgggaacttcatccgtcctttgacatcgtggtcaactgttcaggccttggaagcagacagcttgcaggagactcaaagattttccctgtaaggggccaagtcctccaagttcaggctccctgggtggagcattttatccgagatggcagtgggctgacatatatttatcctggtacatcccatgtaaccctaggtggaactaggcaaaaaggggactggaatctgtccccggatgcagaaaatagcagagagattctttcccgatgctgtgctctggagccctccctccacggagcctgcaacatcagggagaaggtgggcttgaggccctacaggccaggcgtgcgactgcagacagagctccttgcgcgagatggacagaggctgcctgtagtccaccactatggccatgggagtgggggcatctcagtgcactggggcactgctctggaggccgccaggctggtgagcgagtgtgtccatgccctcaggacccccattcccaagtcaaacctgtagatgacataaaatgacagcaaagagactgagagactgttgatcaaagcacagaacaggttcaaataacttttccactgcatgaaagtttaattagacatttctttgttttcaacattagaagtggtgtaacatgtaagctgagcacggtggcatgcctatagtcccagctacttgagaggctgaggcaggaggatcgttgagcccaggagtttgagtgcaatctgggtaacattttttagaggtgccagttcccacctctaaaaaaaacaccaacaacaaaagaaatgatgcaacatgtaggcttacttaggaagtccagcattaatggcatagggcataaagctctattttttgttaaaaatacttcttatagagtaaaatttatttagaactgatgtccaaggacctatgcagatttatatgaatgttggaagctatagagattttgatatcatttggcttataaatccacaggaggagataatgtatggaaaacatttaaatcactgtcaattgcagagctgcctgtgatcttcttaggttatagccaagtcagcaacataa

SEQ ID NO: 1217 - protein, 282 aa, Homo sapiens
MDTARIAVVGAGVVGLSTAVCISKLVPRCSVTIISDKFTPDTTSDVAAGMLIPHTYPDTPIHTQKQWFRETFNHLFAIANSAEAGDAGVHLVSGIKGSGGWTLTRRIEDLWELHPSFDIVVNCSGLGSRQLAGDSKIFPVRGQVLQVQAPWVEHFIRDGSGLTYIYPGTSHVTLGGTRQKGDWNLSPDAENSREILSRCCALEPSLHGACNIREKVGLRPYRPGVRLQTELLARDGQRLPVVHHYGHGSGGISVHWGTALEAARLVSECVHALRTPIPKSNL

SEQ ID NO: 1218 - DNA, 1512 bp, Homo sapiens
tctgtctctcagggcatgagaccagccaggcactgggaaacaaggtttggtgccagagattttggtggcttccaagactgctttttcagagacaggctcatggacacagcacggattgcagttgtcggggcaggtgtggtggggctctccacggctgtgtgcatctccaaactggtgccccgatgctccgttaccatcatttcagacaagtttactccagataccaccagtgatgtggcagccggaatgcttattcctcacacttatccagatacacccattcacacgcagaagcagtggttcagagaaacctttaatcacctctttgcaattgccaattctgcagaagctggagatgctggtgttcatttggtatcagggataaagggaagtggaggctggacactcactcggcgaatagaagacctgtgggaacttcatccgtcctttgacatcgtggtcaactgttcaggccttggaagcagacagcttgcaggagactcaaagattttccctgtaaggggccaagtcctccaagttcaggctccctgggtggagcattttatccgagatggcagtgggctgacatatatttatcctggtacatcccatgtaaccctaggtggaactaggcaaaaaggggactggaatctgtccccggatgcagaaaatagcagagagattctttcccgatgctgtgctctggagccctccctccacggagcctgcaacatcagggagaaggtgggcttgaggccctacaggccaggcgtgcgactgcagacagagctccttgcgcgagatggacagaggctgcctgtagtccaccactatggccatgggagtgggggcatctcagtgcactggggcactgctctggaggccgccaggctggtgagcgagtgtgtccatgccctcaggacccccattcccaagtcaaacctgtagatgacataaaatgacagcaaagagactgagagactgttgatcaaagcacagaacaggttcaaataacttttccactgcatgaaagtttaattagacatttctttgttttcaacattagaagtggtgtaacatgtaagctgagcacggtggcatgcctatagtcccagctacttgagaggctgaggcaggaggatcgttgagcccaggagtttgagtgcaatctgggtaacattttttagaggtgccagttcccacctctaaaaaaaacaccaacaacaaaagaaatgatgcaacatgtaggcttacttaggaagtccagcattaatggcatagggcataaagctctattttttgttaaaaatacttcttatagagtaaaatttatttagaactgatgtccaaggacctatgcagatttatatgaatgttggaagctatagagattttgatatcatttggcttataaatccacaggaggagataatgtatggaaaacatttaaatcactgtcaattgcagagctgcctgtgatcttcttaggttatagccaagtcagcaacataa

SEQ ID NO: 1219 - protein, 310 aa, Homo sapiens
MRPARHWETRFGARDFGGFQDCFFRDRLMDTARIAVVGAGVVGLSTAVCISKLVPRCSVTIISDKFTPDTTSDVAAGMLIPHTYPDTPIHTQKQWFRETFNHLFAIANSAEAGDAGVHLVSGIKGSGGWTLTRRIEDLWELHPSFDIVVNCSGLGSRQLAGDSKIFPVRGQVLQVQAPWVEHFIRDGSGLTYIYPGTSHVTLGGTRQKGDWNLSPDAENSREILSRCCALEPSLHGACNIREKVGLRPYRPGVRLQTELLARDGQRLPVVHHYGHGSGGISVHWGTALEAARLVSECVHALRTPIPKSNL

SEQ ID NO: 1220 - DNA, 1689 bp, Homo sapiens
tctgtctctcagggcatgagaccagccaggcactgggaaacaaggtttggtgccagagattttggtggcttccaagactgctttttcagagacaggctcatggacacagcacggattgcagttgtcggggcaggtgtggtggggctctccacggctgtgtgcatctccaaactggtgccccgatgctccgttaccatcatttcagacaagtttactccagataccaccagtgatgtggcagccggaatgcttattcctcacacttatccagatacacccattcacacgcagaagcagtggttcagagaaacctttaatcacctctttgcaattgccaattctgcagaagctggagatgctggtgttcatttggtatcaggttggcagatatttcagagcactccgactgaagaagtgccattctgggctgacgtggttctgggatttcgaaagatgactgaggctgagctgaagaaattcccccagtatgtgtttggtcaggcttttacaaccctgaaatgtgaatgccctgcctacctcccgtggttggagaaaaggataaagggaagtggaggctggacactcactcggcgaatagaagacctgtgggaacttcatccgtcctttgacatcgtggtcaactgttcaggccttggaagcagacagcttgcaggagactcaaagattttccctgtaaggggccaagtcctccaagttcaggctccctgggtggagcattttatccgagatggcagtgggctgacatatatttatcctggtacatcccatgtaaccctaggtggaactaggcaaaaaggggactggaatctgtccccggatgcagaaaatagcagagagattctttcccgatgctgtgctctggagccctccctccacggagcctgcaacatcagggagaaggtgggcttgaggccctacaggccaggcgtgcgactgcagacagagctccttgcgcgagatggacagaggctgcctgtagtccaccactatggccatgggagtgggggcatctcagtgcactggggcactgctctggaggccgccaggctggtgagcgagtgtgtccatgccctcaggacccccattcccaagtcaaacctgtagatgacataaaatgacagcaaagagactgagagactgttgatcaaagcacagaacaggttcaaataacttttccactgcatgaaagtttaattagacatttctttgttttcaacattagaagtggtgtaacatgtaagctgagcacggtggcatgcctatagtcccagctacttgagaggctgaggcaggaggatcgttgagcccaggagtttgagtgcaatctgggtaacattttttagaggtgccagttcccacctctaaaaaaaacaccaacaacaaaagaaatgatgcaacatgtaggcttacttaggaagtccagcattaatggcatagggcataaagctctattttttgttaaaaatacttcttatagagtaaaatttatttagaactgatgtccaaggacctatgcagatttatatgaatgttggaagctatagagattttgatatcatttggcttataaatccacaggaggagataatgtatggaaaacatttaaatcactgtcaattgcagagctgcctgtgatcttcttaggttatagccaagtcagcaacataa

SEQ ID NO: 1221 - protein, 369 aa, Homo sapiens
MRPARHWETRFGARDFGGFQDCFFRDRLMDTARIAVVGAGVVGLSTAVCISKLVPRCSVTIISDKFTPDTTSDVAAGMLIPHTYPDTPIHTQKQWFRETFNHLFAIANSAEAGDAGVHLVSGWQIFQSTPTEEVPFWADVVLGFRKMTEAELKKFPQYVFGQAFTTLKCECPAYLPWLEKRIKGSGGWTLTRRIEDLWELHPSFDIVVNCSGLGSRQLAGDSKIFPVRGQVLQVQAPWVEHFIRDGSGLTYIYPGTSHVTLGGTRQKGDWNLSPDAENSREILSRCCALEPSLHGACNIREKVGLRPYRPGVRLQTELLARDGQRLPVVHHYGHGSGGISVHWGTALEAARLVSECVHALRTPIPKSNL

SEQ ID NO: 1222 - DNA, 1594 bp, Homo sapiens
gctcatggacacagcacggattgcagttgtcggggcaggtgtggtggggctctccacggctgtgtgcatctccaaactggtgccccgatgctccgttaccatcatttcagacaagtttactccagataccaccagtgatgtggcagccggaatgcttattcctcacacttatccagatacacccattcacacgcagaagcagtggttcagagaaacctttaatcacctctttgcaattgccaattctgcagaagctggagatgctggtgttcatttggtatcaggttggcagatatttcagagcactccgactgaagaagtgccattctgggctgacgtggttctgggatttcgaaagatgactgaggctgagctgaagaaattcccccagtatgtgtttggtcaggcttttacaaccctgaaatgtgaatgccctgcctacctcccgtggttggagaaaaggataaagggaagtggaggctggacactcactcggcgaatagaagacctgtgggaacttcatccgtcctttgacatcgtggtcaactgttcaggccttggaagcagacagcttgcaggagactcaaagattttccctgtaaggggccaagtcctccaagttcaggctccctgggtggagcattttatccgagatggcagtgggctgacatatatttatcctggtacatcccatgtaaccctaggtggaactaggcaaaaaggggactggaatctgtccccggatgcagaaaatagcagagagattctttcccgatgctgtgctctggagccctccctccacggagcctgcaacatcagggagaaggtgggcttgaggccctacaggccaggcgtgcgactgcagacagagctccttgcgcgagatggacagaggctgcctgtagtccaccactatggccatgggagtgggggcatctcagtgcactggggcactgctctggaggccgccaggctggtgagcgagtgtgtccatgccctcaggacccccattcccaagtcaaacctgtagatgacataaaatgacagcaaagagactgagagactgttgatcaaagcacagaacaggttcaaataacttttccactgcatgaaagtttaattagacatttctttgttttcaacattagaagtggtgtaacatgtaagctgagcacggtggcatgcctatagtcccagctacttgagaggctgaggcaggaggatcgttgagcccaggagtttgagtgcaatctgggtaacattttttagaggtgccagttcccacctctaaaaaaaacaccaacaacaaaagaaatgatgcaacatgtaggcttacttaggaagtccagcattaatggcatagggcataaagctctattttttgttaaaaatacttcttatagagtaaaatttatttagaactgatgtccaaggacctatgcagatttatatgaatgttggaagctatagagattttgatatcatttggcttataaatccacaggaggagataatgtatggaaaacatttaaatcactgtcaattgcagagctgcctgtgatcttcttaggttatagccaagtcagcaacataa

SEQ ID NO: 1223 - protein, 341 aa, Homo sapiens
MDTARIAVVGAGVVGLSTAVCISKLVPRCSVTIISDKFTPDTTSDVAAGMLIPHTYPDTPIHTQKQWFRETFNHLFAIANSAEAGDAGVHLVSGWQIFQSTPTEEVPFWADVVLGFRKMTEAELKKFPQYVFGQAFTTLKCECPAYLPWLEKRIKGSGGWTLTRRIEDLWELHPSFDIVVNCSGLGSRQLAGDSKIFPVRGQVLQVQAPWVEHFIRDGSGLTYIYPGTSHVTLGGTRQKGDWNLSPDAENSREILSRCCALEPSLHGACNIREKVGLRPYRPGVRLQTELLARDGQRLPVVHHYGHGSGGISVHWGTALEAARLVSECVHALRTPIPKSNL

SEQ ID NO: 1224 - DNA, 130763 bp, Mus musculus
  misc_feature (1)...(130763): n = A,T,C or G
tctgatgccttcttctgatgtgtctgaagacagtgacggtgtcctcatacacataaaataaatcaaccttaaaaataaacacacagataaaatattttaaaaaaaaaccataaccaactaccatgatcataccccaaacagctaatgtcacccctaatgtgagaaacacctttgagttgtttcctgaactgccagaaaaacgcagacacggcagtgcagttatttgaaatgtgttagtaggcagatagggcccttctgtttgattggcatgtctaaagtacactttactctctgggcatcctttccctctttctccctaactgcacctttgctgaggaaaccacactacatcctttgactttcctgtattcctgacctggacgcttaggacagcactcagttctctcccttgtctcttggatcatctggaaattttacatttaccctggatccccgatcagatttagtgtcaaatcttcttcatctgtctgtcccttttttatattgtcacagcttactgatgcttatggtgacaatttcatgttgctggcgttagttagaagatttcttgaaagcaaagtttcctttattagcttgctagtgtaaataatcattttgaaatactgcataaaacttccctgttactatactataatttactaaatttccccttagtgtgcgatgccaacgttataatttatgaatttttgttattctgagaaacaccataatagttactctttttacacacagttatttgcatcttatgaattatttacttgggagcatttgacaaatggagtacttcgctgagggtgcattgcctttctggagagtggcttctgaggctggagatgtggctctgttggtttgcttccctggcatgcacaaggcccaaggttcaaatccccagcacagcataagccaggtctcagagtgcatgtgtgtaatctttgtacaagaggcaaagaaagaacagtttaaggtcatctttggtcatgtaatgagttctagggcagcctgggctgtatgagaccctgttcaaacaaacaaacaaacaaacaaacaaacaaacaaaatagtgctttgtatttctgctgccaccagttatatagatatgctgactcctcccaacctgtgctcaatcaatggactttacgagcctttcagattagatggttttgagagaaaaagcctgtctggggccaataacaggtgtgaagagggacagagccaggtacggtggtacacacctcttatctaagccctggggaggcagaatcaggaggatttctttgggctacaaagggagtgccaggcaagccagggctttataccaagactttatcccaaaaatacaattaaacaaacaacaacaacagaaaacaaatgtaccagcgtgctcactttaccagtgaagtcagactgctcacaagggagctcctgtagggatcttgctgtctggagagctggccatggaaggcagcatcactgtaaaatcagggcctagaaagacagggctcagaggttaagagcagtggctgctcttgcagaactgggtttggttcccagcatctttgtggctgctcacaactgcctggaactccaattccaggggatctggtaccctcttctggcctctgctggtgacagtcactcacacagtgcaagcaaaacactcatacacataaaatgaaaataataaatctttaaaaaaggaagaggaagggaggaggagctggaggaagagggggaggaggaggagtcaccagtggtctggcatgctaaggagcaggtgtaacgagtgggatcctctgagaacagcttctccctcagtcagcctgacttgcctgtgtctgtgttctatgttccctcagcccaaacaagttgtttctaggagccaaatatggtggttgcctggatctcagcactcagctgaggcaggagattcagagtttaaggaagatcctggagagagggaggggagaagggagatggggtgtgagttcaccttctctgtggccatgatataaaatggcttcgtcttcagggctgcagctctgtagtcagtcctgttgtctgccatcctttggagggctcatcacacatgcaacttcacaggctttagcttgaggcttggagctcagtgcagaatgcccttgcttatcactggctcactgccacttaattggggtctagacctgaatgaagccagcttgtccccaaggtgccatttctatgtatgcatccatggtcttatcaggttctcattcttttgttgttgttgttgtttggttggttagttgtttttggttttgtttttgtttttcaagatagggtttttctctgtgtagtcctggctgtcctggaactcactctgtagaccaggttgacctcaaactcagagatctgcccacctctgcctccaaagtgctgggatcaaaggtgtgggccatcatcacctggctggctcccatttttttttaattaggtattttcttgatttacatttcaaatgctatcccaaaagttccccatacccccacccactcccacttcttggccctggtattcccctgtactggggcatataaagtttgcaagaccaaggggcctctcttcccaatgatggccgactaggccatcttctgctacatatgcagctagagattcttccttatccagcagccaccaattgcccactgctccccagccgaggtagccttgtgacctcatctgctggccatgtcgtgggctaagcctttctccagtcgcgcatgcacgcagtcatggctgctctgagttatctgtacagctctccttttgtgtctagttgttttttttttcttattattatgtatatgagcacactgtagctgtctgtcttcagacacaccagaagagggcactggatcccatttcagatggttgtgagcatccttctcttgaaccttagactcctgagaaatgggcatctggttccttctacctcctcctctgagatgacacctaaacactgggatgggggaatgtgatccagatgtcccgactagggctcaccactcagcaatctgtattttctctgtgtgttgaccacttgtgtgtccctgggctaagagttcccatccttcaaggtctcatggtgtgccatatattcctttgttgttattgtttaaagatttattttattttatgtgtaagagtgcactgccagtgttttcagacagaagagggcatcagatcccattatagatggttgtgagccaccatgtggtttctgggaattgaactcaggacctctggaagagcagccagtgctcctaacctctgagccatctccccagcaccccccatgctcccccatctattactttagtcacttgatcattgaataccccagcactgcacagcttgcgctgagaacattgtcttcaaagagcgtatattccactgggttgacagcacacacctccctttaatcccagcactggggaagtagaggctgggagtttatcaggactctgagactgatctgcagagtgaaggccaggccagccaaaggctacatagcaagaaacaaaacccaaaacgatagaaatagaaataggaggaagttggcttccagaatggggaaagaacaccacagaggagtgctaagttgctgtgagactttaagaggatatcccctgtgtcttgaaccttagactcctgagaaatgggcatctggtatgttggtcgctgagcctaatgttagctcctaatgagacaggaatgagtttgctcttacatcttgctgtttaaaggcaataggacttcctagagtatgggacttttcctatgtctctgacattctgcagccccagccattggcatggtaatttaggctaaggcagagccaggtgacaagactctggatcacgtgacacaggtccggatgacagaagcagctgctgatattctggcctgcttgtccacagtgaccggctggccctcctgcaggtcaggaggatcctgcagcagctgggcctggacagcacgtgcgaagacagtattgtggtgaaggaggtgtgtggggctgtgtctcggagggccgcccagatgtgtggtgccggcatggctgccatcgtggagaagaggagagaagaccaaggcctccagcacttcaaggtcaccgtgggcgtggatggcacactgtacaagctgcacccgcagtgagtccctgagacaagcttacagcttcttttctttgtcctttgggtgacatgacacacattttggggtttggtttctgcaaatatagccttttaaatatctttacatctattttgtatatacatacatatgtatatgtatgtatgtacatatgcataggcattagttctcttctatcagtacatgggacccacccaggaattgaactcaggtcatcaggcctggtggcaagcacctcttagccatctcaccagctccaagtttctctctctctctctctctctctctctctctctctttggtttttcgagacagggtttctctttatagccctggctgtcctggaactcactttgtagaccaggctggccttgaactcagaaattcgcctgcctctgcctccggagtgctgggattaaaggagtgcaccaccacgcccggctttctctctctttttaagatttatttattatatttaagtacagctgtcttcagacacaccagaagagggcacctgatctcattacagatggttgtgagccaccatgtggttgctgggatttgaactcaggacctctggaagagaagtcagtgcttttaaccactgagccatctctccagccccctctttctttctttctttctttctttctttctttctttctttctttctttctttctctctttctctctttctctctttctctttctctctctttctctctctctctttctctctttctctctctttctctctttctctctctttctctctttctctctctttctctctctttctctctttctctctttctctctctctttctctctttctctctctttctctctctctctctttctctctttctctctttctctctctctttctctctttctctctttctctctctttctctctttctctctctttctctctttctctctctttctctctttctctctctttctctctttctctctctttctctctctttctctctctctctctctctctctctctttctctctctctctctttctctctctctctctcttttctttctttctttcttttctttctttctttctttctttctttctgtctgtctgtctgtctgtctgtctgtctgtctttctttctttctttctttctttctttctttttgtttttcaagacagggtttctctgtatagccctggctgtcctggagctcactttgtagaccaggctggcctcgaactcagaaatccgccctgtctctgcctcccaagtgctgggattaaaggcgtgtgccaccatgcccagcttcagccccctctttcttgaactaagatttaaacaaaggctacaaagaaaccataagagctggcacctcacagcagaggtgatacacacctttgatcccagcacatgagaaacagaggcaggcggagctcttaaatttgagtccagcctggtctacagagtgagttcagaacagtcagggctacacagaaaaaccctgcctcataaaacaaagacaaaacaaaaggctctgacaaacagtttgatgttctcccacccccaacaaaagccctaaaactagcaatggagtctccttagattggtcctgtgagaatcctacagctagcaccacacttgactcatgggagtggggttttcgcctgaggctggggaggaaaacttggtcacagtggtataatccaccaatcccactacaagagctgatatcctgtctttctctttatcccagcttctcccggatactgcaggagacggtgaaagagctggcccctcagtgtgatgtgacatttatgttgtcagaagacggcagcgggaagggagcagctctgatcacagctgtagccaagaggttacagcagccacggaaggacatctaggtggcccagccgggtgatgaccagggaccaccagacgacctcctggctcaccttcctctctccgtactctaagcatcctggtgcttgcttggcagtgacactgggtggcacctccatttggcatattttagccaaagatgggctgactttcaaaatcaaaggatctggccccaaagatcccccttttggcaagtcacttgagctgtgagcgttcagtagtatcaggtcttgggttgctggagtgtccctttcaggccttatgctacctctggtgggagattgggtctgaacccttgagagggagaaaggcttagtgaactaggggatctaggttaacatggcctcacttgtcatgttgactttataggcaccagggaagccagggcattggcccctgcatctctgagtgtggaggagcccactgccctggagccaggaggaatctcacccactcagggcgctctgtgagcatctggggtgtcacccccccatgtttgtatcatggggcgggacaccatcccaggtactgtttatcattcatgtgacacagtaggtgtcgctgttttctgcatttctttcaaggactgttaggtatacaaatattgtccatgaataaaagaaacttgagtttccaggaaccttgaggtattaagctttctcctgagaggcttgttagcatctccatgtcccatcacaggagaataagggattgtagagtccagtccagactccctgcccacagaagaagatctatgggactaattatccaaatttcacctgattgaagggagggacttcccaagactgagtagtgaccatgtgacctgtgaccaagtgcttgctcttggactggtgtcagcctggagttgtatgcgtgtgcatacaaatatgtccatgtgcaggtgtgtgtacatatgtgcacacatgcagatatgtgttcatgtgtttatttatgtgtgtgcacatgtagatgtgtattcatggataggcatgtatgcatgcatgtagatatatgttcatatgtttatttgtgtgtgcgcacatgtagatgtgtattcagggataggcatgtgtgtatgtgtgtgtacatatgtggatgtgtacatgtgtgtatttgtgtatgaacacatataggtgtgtgtattcatgtgtatgtgtgtgttgaaagacccccatttcggggagaccctcgctcaagtcccgggatgagccgatgccccaataactcgagagaaactattcttggtgcaatatcgcatgaagtttattcagaaatcagcatgctgaggccgagctcgtaacccgcacaggggcagaggagatcaacccccagcagttgcagtcaagggtttttaaagaataaactgcaaagtgaggggaggataggaccgcaaagaatggggaagctgagtaaacatcataaaaatggggatggtggattacagctcatctctcacgatgaaggcaaaagaacaaagaactccatgctgggcttcgtttctaggcgtctaagaaacacattgagttggggtcttacatggtgagtatgcacatgtgcatggagaccaagggataagctctatgtcgccctcagaaatgccttccatctccttagggtccatcagtgggatctggggcccactggttaggctaggctggctgtccagcaagtccctggcatcctcctggctcctcctcccaccaatagaattgcaggcacaccaatcacaccaggcaggtatccttatctgtggctgcgactcagcccaaatgttaggagacagcactttcctatctccatagccccagagtcctttctcctcctctgcctctctttctccatggagcagggtcctccggtccaccggtattccctaatcctacctaccaaaatagcctggagcagatgtgtcccttactttctctccaggagccatgtctttcccttcactcccaacttgtcactgaaatgcccgtgctttctgtcctgtcccctgactctgtggactccttatctggtttgggagattgtaagcttgttgccagacatatcttttttttttttttaattaattctttcttgagacatgttttctgtgtagtcctggctatcctggaacttactctgtaaaccaagctgacctcgaactcacagagatctgcctgcctctgcctctcaagtgctgagattcaaggtgccaccaccaacagtctagatgtatctttttttttaattgtcagaagaaacccaggaccatataaccttgtttaaatatttactgaggaggaatatggcttttaaagtggagctttctaagaagttttcctggggtgggggtgcggtgagaaaatgacagctcattctcgtgagaaacagagtgagaagactattgcatggtccaggttgatttgactgtttgacacactgcttcaaccccatgttgtcactgggtgccccttcctgagaggatggctccctgtgccaggggtggtcacatgctgaggcagtctgtggtggcagacagaaccagagagacaggtcccagagagggggctaggaacagatgagggagctgaaggggcctctgcaatgctttctggaccagtcagtgaacatgtagttctgtaaacaggtcctagatggcaccatcaaccttttctgtggtttaaagctatgcctctctggagaagtgttataggacttgttaaatttatttttgtattttgtatttataatgtttctttggggggaaaatctcttcctttccccactatttcctttcctcctttcaaaaattttattttgtgtgtatgaatgttttgcccacatgtgtgtctgtgccctgtgtgcatgcctggtgcccacaaggccaaaagagagcatcagatcccctgaatccggacttacagatggttgtgagctgccatgtgggtcctgggaatgaaatctgtgtcctatgcaggagcagcactgctcttaaccagagctatctttctagccccttccttgggtttctaagttttcatgtgtgcacatatatgcacatgtatgcacatgtatgcgtgtgtgtgtgtgtgtgtgtgtgtgtgtgtgtgtgtgtgtgtgtgtgtataggctgaaagatgattccatctttctggaatcagttctctcttctaccacgtgggttctgggattgaactcagagtcaactcggtggtgagcacgcctaacggctgagctccctcatgggcacttcctgtaagtctttttgagacagtcaaggttgccctggaattgtgtttgcctcctgatggttcttctcccaaccttactgggccctgaagaaatctcactaggttttatctttttttttccaatttatttatttatttttattttacatacattggtgttttacctgcacatgtgatagagtaggatcccccagtgtaggagttacagacagctgtgaaccaccgtgtggttgctgggaattaacctgtgtcctctggaagagcagccagtgctctaactgctgagccagctccccagcccactaggtttcatcttaattagctgggaacctggctgttcttgtaacctctcctcagttcttcctgggtaccacatcctcagctctctatcccacttccctctgagtctgcagcatccttttgggatagatgatctggctcacaggtttagcctgctgtaccaccgtggtctctcagcatgtgtaagcaggtttgaggaggttatccaaccttcttgcctagctctgaaaaggagtccctaggtatctaggtccctttagccactgtaaccagttgatgacatcatagagtttgaggcagaacaggaactccagagagggcaaacatccattctgtgactgcaggagtccctgaaacacctgggaccatggagggcccccctcttctcaaggcttgctaggttagaccagtaactacatcaaggtaaagtgtcttcgggggaagctcatagtctgtcttctttagacaataagctgtggatggagctccattggtagagaacctgcctagcatggtcaaaggtgtgggtttggtccctagcactgcataaactcagaatggcgctactgatcctcaaattccggccctcgggaggagaattcaggtcatttttggttataaatgagttaaaaaccagcctcaatacatttaatcccattccatatacaatgaaaacagccttggccttgtggagccagaagtaggtagatctctgtgaatttgaggccagcctggactatgtaatgaggttcagtctcagcaatcaaagaaaagagtgttcttttctacattttagagccctgtacttcctttttcttggtgcctcttatagagtgagctgataggtaaaaatgtgagaagtaggtttctccatccctgcttttccagaacacgtggcctgattcattgtcccgttcagaaacaatttgcttctggccacgggcaagaggggatctcattgggaatgaggactgggttctcctcctcctccgtgctcctggtggtcaccagagccagctctggcagtgggcagtgggcggtggtcagtgggcagtgggcagccctcgttctctgaagaaaccgatacgtgaagggagcctctcaagtgaatgaactcactgcttctgactgactctctccattcatctgtctcacctggtgagacccaagctttacacacacagtaggtcctctattaggtgatggctcaattggtgcggagactcaaggtaatatgctgcccattgtgcccacgtgttagagttcacaggaaagagaaaggtaagtttgtatctataaggcaacagaggaaagaaggaccaagtggcggcagactgtagcttccttcctttagatcctaggagtgtgtgttcctgtgctcatgtacaccatgggccattgggggtaagggcctgaaatgtatcttgtctgagaaaagtgttaagggtatgaaatgcataggattactgagggtgttataaaatggctcttaagtagcgctaagactgaggaggcatgcctgtaattctaatacttgcgaggctgaggcaagggccacaagttcaagattcgtctgggccacatagagagtctagcctagactacatagtaaggctagcctagactacatagtgaatgtctgtctcaaacccctactatacctgcccaaaaggaggaagtggtaacagtcatacatataagtattaattcattatataacaagcaccaacagaaccaaatagtaatcataatgttgaagccctcctgggtataaacctcattttgagacatttacaacaatctcaataaaaatatctctatagcttctgggccagtgtgatggctcagtgggttaaggcacttgtggctaagcttggcaacctgaacatgggagaagagaactgactcccaaaagttgtcctctgacctccacacgcacgaggggacgcgtgctacccacccctttaacataaaaacaaaatttaaaagaagtctgtggttgctattgacgatgaaggcacaggtgccactgaccctactgtggctctcgctcctagagacatttagaagttcctctttgtctatgatagttcataatgtaagacatttcccactagacctctcgctagtggccagggcttttcatttctgcaggctgtgaggaatgtatgctattttattcaaatagcttcaacctccgtcttcgtgtcttcctgacgctcttaccatcctgatgctggatcttctgcttctgccttccctgctgttgaacgttaaattcgtgtatttatcttgccttcctgtccacttactaggggggcagtagaatctcccagctaagcagcctctgccccggtcttaaatctaaccagtggttatctatctatcccaggtttgatcttctgtagtctaaactttatcttttacaatattaataattctttaaaaatttcatccagtatattttgatcctattcattcaaaccaggagttcatgagcacagtggtcctgtaaacagaatcttttaaagaaaaaaaaaaaaccagtttctgaagccaagggtagtggttcacatctgtatctcagcacatggaaaacggagtcaggggactcaggtgttcaaagccagcctcaggtaaagagtgagtttgacaccagcctgggcgacctgagactctgtctcagagagagagagagagagagagagagagagagagagagagatttaaaaagaaattaaaatttgaagtctattttattattctgtattttcatattctaacaaagaaagtaaaccttaccaaaatatggttccgtgtttttattatttttcaatgaacaatttcacgtttttattagttctccgtgacctattttatgtatttctagttcttcctctgacttcagctcttactttgcatatataccttccccccaccccccgctctgtccagtgtctctgccatccctctttgacaccctcggttggtctcctgtgctgtttgtgctggaagtcacatttcccagtttgttgacattcttttcgggtagctttcttcctcggacgtctggtgacttttgtcctgtaagcttttcacccacgggtcacccactgctgtatcctggaatgttctgggttggggccactttagtctgagtcattctgatgaaatgagaaaggaggtaaccttgaaagcagagtcctgggcacccaagtccttagggaagccctctggtcaacccacccagcctggtctactgggcgtgaattagagccatgtgggaggaagaaccttcaactgagaatctgcttctatcgggtgggctggtaggcaggtcctcaggatgttgtcttgattaacgattgacgtgaggacccagctcattgtgggcagtgccacccctgggctggtggtctttggttgtataagaatgccagtcgagcaagccctgaggagcaagccaggatgcagcatccttctgaggtctcttcagttcccgccttgacttcctgctgacttccctcgattggggtggtgacggacggtgtcctgaatgtaagccagataagcctttgcctcctcaccccaagtcactttaggtcatagtgtctatcacagtgatacaaagccaactgggacaagcctcgggacccctgggcaggcttttaggagttggccttcagtgtgtttggaatcagtagccatgggagcgtatatcagtgtcgaggctgcccactccgaggggctggtgagtgagtgagctaggctctgcgagcccactagctttctcagctccttgcttaccagagcctcgttgtgcttagaacccactgacacctgtgttggtcttgaagcctggaggttctctcaacagtaaaggggcgggcagcaattgtcttgggcccttcttacagagatgcagagttaattcatggtggggatgatgctagaccattactgtctactgagcagaggataccccccccccagcccagaagcaaaatttcaatctacctccatgtcttttacctacagaaaagactattttgtggggtgcagttggtacacagagaggggactttattttacacattgtccttggcttgacaataagccttactatcacaccccacacacacacacacctgcacatgtgtagcagatgtgcagcttggtcccccaacaaccgttgtgagcactgaccctgcctctgtgcttgcctgtggattcgttccccgaactgggctgccttgcctggcctcagtgggagaggatgtgcctagccctgcagtgacttgatgtgccagggtggggtaatacctagaggggactcccctttctcagatgaggaggggaggagggatgaggggaggacctatgtaagggggcactgggaggaagagggggactgatactgggatgtaaagtgcagctttaaagtgaatttttaaaaagtttttaaaacttctacttttcttaacagaacagcatggctaaccattaggatgcgtgctaatttttttttttttttttgcattttatataaccccttataagtagagacataaccctggtttctaggtacctcagtactgatgaaaatcatctacgttatagtaactgtagagaggaatagtgggcactctggggtgagcctggcatgggcttgaagcagaggacaaaggacagttccccgggaagccaacaggtcattcattcacgccccaggtcagactcagcatcttcttggatccaactgccagtctcacacccagaacacccgtcactcacataacggctgccttgaatgttctgcctttaatctgctttgtttgaaattctgtgagggccctgtggctctgatctggccatcttctgacttctcacagcctttccctccagagccggaacgcaactgatgctaaaacagatcagaaatccgccttctctgtccaagaccaatgaagcgacgtagtcggtctctggccttgattctgctctgtcctcggtctctgcgtgtgcttctgagctcagggagtgcctgaggctaaggcgctggactgccctgggatgaaagcttggatctgaactgttagacagtgtctgggattgtgcacaaaagagaattgaattgtagatcagctgggaaaccagtgagacagcccagcggcccttggcctccagggctggacgcctgtgggagcacatagctggcatttctgttaagagtgagatttggaagtctttttgcttcctctgtgaagtgcttggattcaatgacttgaggtaggatgggagattttgggtttgcttcgtttgggtgaaagcaaagcagatttggcttgagtggtcgaggacctggggagaggagggctctgtctggcgctcagtgaagctctgagaccaggtggtcaacttttggcaacagcaagaacgtggaagaagccgtgactacggctttggaagaggggttcctactggactttccagacaccatcttgatttgagaagtctccaggcagcatttcatagtaagttctgaggtctgcctctggccagggctgtgtcagggacactaaagtcagtggttctcaacctgtgggtctcgaggcctcttcaggagttgcatatcagataccctgcaggtatttacatgatggtccttaacagtagcaaaatgacagttatgaagtagccatgaaaacgattttatggttgggggtcaccacgacctgtattaaagggccgcagccttaggaaggttgagaactgttgccttagggggtggcatctcctccggagggtggcacccagagagtccccacaggagctgctgctgggatggtgacgctgagagggaggcctgccctgggattcttacagagctgcaggcaggctctctctgatatgagatactcgtctctccacctcgggctcatgtctcagacgacatccaggcaggtccagtgagatggccacgtgggtaagcgtgcttgcagccaagcctgacgacctgagtttgatccctggagcccactcccacaagttgtcttttgactttcacgtgtgcactatgcgcaagtgtgttcacgtgtatacacacatacacacacacacacacacacacacacacacacacacacacacacacacaaatgccaaagaaaattcagtttacaaactctccttaaggccaggttctgattccagcactggagagagtcagaggtaggcagacctttctgagttcaaggccagtggtctacatagtgagttccaggacagccagggctacacagagagaccttgtcttggtcttgaaaagacatttccttgacttacacttgcatgctatcctgacatctctttattatattctattgtttatgttctgtgtctgctctgcagatgtaggggtcagaagacaatttgaatacatcctctctttccaccgtgtgcgttctgagctccttatctactgagccattttgccagccctagagagaactattttttttttcacttcaggcactgacttttaaaaaaaatatatttttattaggtattttcctcatttacatttccaatgctatcccaaaagtcccccatacccctcccccactcctctacccacccactcccactttttggccctggcattcccctgtactggggcatataaagtttgcaagtccaatgggcctctctttccagtgatggccgactagaccatctgagaactattttttaagatttttagaaaatttttatgtgtttgggtattttgccttcaaatatgtctatataccacatgtgtgcagtatctgtgcaggtcagaagagaatatattttgccttttgtttttttgttttgttttgttttgttttgttttgttttgttttgaatcaaggctcacctggcccctgctcaaagaaaggcctctgaggaaaactctggcccagttccagctgcctcctccaggaagccttgcaggattagcttgggggtccctagtctcttcaggacagctgccacttgcagctggtccctgtgacttgtgggatttcttagcatctctctttcaggctgtaagctttatgaaaacttgactttagaaaagcagagaacagccaggtgtggtggcgcatacctttaatcccagcacttgggaggcagaggcaggcggatttctgagttcgaggccagcctggtctacagagtgagttccagggcagctaggactacacagagaaaccttgtctcgaaaaaaaaaaaaaaaaaaaagcagagaagtagggtggctgggggaagaacagggtcacccccagaccagtgtagaacagaatgagataacaatagcccttatccccactgagcaggggagagcaagacagattcgggaaggaggggtctgaagcactctctagcacacctagttctcctgacgccctgagtgctctcttcctgaccacggcttcacaggctccattgtgtccattaacatggacacttaaaaaaaaatctttgtgtgagtggtgcaaatgggggtcacacatgtccaggccatgggggacagaggacaatcttagcccccatcttctatctcctttgtcactgtgtactgcaggccaggtggcccagggacttctgggtcttctcatatcttgatttccatccctctgtggaaacactgtgatgggagacggtcactattgtgtgggtcttttacatgggctctagggatcccaacctggtcctaacgcttatgtgataactgctctacccacttagccacctcccagcccaaacctgaacattccgtgctttggtagctggggacgtggcttgattggtagagtgcttgcctccatgcacaaagccctcgtatgtttgttgtccagcacataggaggtagaggcgggggggggggggcggggggaacctaagttcaaggtcatcctgatggcataagtgagttcagggccacactgattgtcttgtcactgatacagtgcagtgaagagacaccatgaccaaggaaacacttataaaagaaaacatttaattggggtcggcttacattttcaggtataagtccattattagcatggcagaaggcatggcagcgtgcaggcatggtgctagagaatgagccgagagcattacatcctgatctgaaagagagagagagagagagagagagagagagagagagagcaagtacttgggcctggcatgggcttttgaaatctctaagacacccccagtgacatcttttctccaataaggtcacaactcctaatccttctaatcctttcaaatagcatcactccctggtgaccaagcattcaactatatgagcctctggggtctgctctcattcaaaccagcatattccgctccctggcccccataggcttgtagccataacacaatgaaaaatgcattcagtctaactttaaaagtctctctagtctatcacagtctcaaccaggttggaaagctccaagttcaaagtctttcccgagactcatggtgatctcttaactgtcatccccagtaaaatcaaaataaaaaagcagagcacgtacttccgacatacagtggcacagaatacacattaccattctgaaagggaggaaagggagaagcacggaccgaaaaaacgcagctggcaaacttcaaactctgtgtctccatgttggacgttaaagcactttcagcttcgttgactagactacttctctgtcttgggctattttcactccgttagcagattttgttggcaggtatctcctgactctggcatctccaacatcttgggatctccaaggcgacccaggcttcaccttgacagcttcccgcaatggcctctctgggtctccatatagagactctcctgacacatgactggcctccagggattctccttgctcttggggggagattctgtgaccctttcttgtctttgactctaaagtcagaatcacatgggcaaagctgccaagttctgctgcttgctggggctggaacctggacctcttgttctatttcatcttcgccagttgttgtgtctggccagcagaccacaacctgggttctagcctggaaaggcattttagaaacttggaagagaagaggggctaggtggcgagagaaagaaatgtagccaagacagttactctgatcaaggctcaaattttattgttgcaacactagttatgaaggaagggggaggggacccgattcccgccgaataatctctggtccagtagaaaggtgcacgtgtgtagctccgcaggttccagcagtgggcgtggcagaacgaatgagcaggaagctccacccctgagcaagcaggtttcaggctgggggaggggagactacatttcctcccttttattaacaaaattttaaaaaagaaaaagctggcctgagggggaaataccaatgtattaagtgaccaattgctctttaatagctttttccactagctgtaaggctagcaatccttctgaggttagggatctaggggaagtgggggatgtgctctgaattaactttgctaggtaatttagaatataggaatctctaacattggactgaatattagaccagtctaagattgagttagaatgacaggtcacactgaagaaaagagaaaaatcattatgactctattaaatgactaatttactaagtctgaatatacagtctctgatgtactattgccataaagttaaaaggctagaagctagtctaaactggaaaaaatgacaagtaaggatggatctaaaacatgaatttaatttagttttttagtcaattcaatcaggacatgagtcaacttacctaccagctcgtcacacgaatttactaatatgcttctgcagcgttctgtggagaaaacctgtttttcccttttctaataaggtagctgttttaggatcaatctataagccaataagtagatccctttaagatactataaagcatttattaaactctatgacattaaaatattaaattttgaaaataaaggcaagacttaaatagtgtgcatgggaatgcactaaatagtatgcacggggatacaatttctttcttttttgtcttttaagaagttaaagttttaaaatttcacaatacctaaacttttgaattaataactagttgacaaaatattttaaatacttggctgtaaaggggcagtgactaattgcacttttaatcaattttcttaaggagcagttgtaactagaaggcttgcaaagttattaagagtcacatgtgcataatttatttatttattaactagaaatatgcataagcaattgtaaatttgagaattaatagtatctgagggatgaacaatttaagcaattgcgagctcagagatatggcattgattattaatatacaaattaaggtttgattgttcagtattttaaaacaccatctacagcacacaactagatcatctgtgctggaacaggggaaactgtgtgtcttaagacttcgccccacagaagctagttgggcccacgtgggccaacgatcggctgggaggatgagaaaaatgactttacaataatgttttttctggccaaagaattgttttgggcacaaccaatttttaattaccaattaataacaattataaaagctttctttattttttgtagaaacttttgtagtaaactaaaaccctaagtaataaaaggatattgtctctgaatcttttgggtgagagcaaggatttaaggtaaactttaagaagcattagttaataaaatacttttcacttaggaaacaatatacactgaaagattaaaactcttggcttcttgtatagaagcagaaacaataaaaatttttcttacataatgtaaagttacattagccatacctagaggcagaattttctagtgattacagttcactagaagcaaaactctttgaatttaagcattattttaaacatctgaatagatctgcaacactgttaaaaagaaattctcttgaacacagggaaaaaactttctcaggcactgtttgcaaaacaaaagaaaggccacaagccgctctggggctgcccagagccatgtattgactcaaacgtaaaatactttttaatctgagcatcttggccctcctgtaataaggaccgattttagaggaacaatttaaccgtctatgcctctaatttttgatactctttcttaagatgacttacagttaaaacgttctttacaactttagtgttgtgaaaaaattgcccgtactgcagtttcctgtcaggcagcaactataaccaaactgtttgtctaatttattcataaagacaaacataactagataactttgtcacagttttgtatgaagtgagctgtatgagcgctcttataagatgattactcttgtaattatcttaattacagtatacaggtgaattaaagatcttaaatttgaaatcaaactgcaagctgcagtcaatggaacaatggcagttttaaccataatttttaagttttttgtgcaagattaggataatacctatacccttgggaaagcaaaacccaagtttaaaacaatttattatctttaaaatcaatattataagcattactatcatattacgaagtttggatgtcaattaatatctatgaatacctattaaagcaagctttaatgttttaataaaaagacattgctttaaatcttatcttaaattttactatttaggatacgaaccacattaattattacctaaactagaaatatctttagagacccagcctcttggcctgctttatgccacgtgtcggaaggactctaaacttgagttatcaaatttaacactaaccatctgtagcaatgtaacaattattaatcttaaccaacaacttatgagctgattgtgaaaacactcagagcacattaccaataaaaaagaaccaaatgaagcagttacatttagaccaatcagagaataataatttttgtggctacaatcatagaattaaaaaaaaaactttaccattgtcaaacacattagtcacaaaccatttattagcttttttactctgaaacttagaggctgtgcactcgcccttattttttaaaacaaacagtttttccagcaggggccctcccgccatgtgtctgattcctggctgaaacacgtggcagctctcggctttgcagataaagttttttataccatctttattatccaacataaaacatagaacattcattcatacagactggacacgaacatacatgaattgaacacgagaacagattggtgcaccggacattagacaagacacaaaagggaacagagtactcctgctaaaaggcccagagagaaatttctctctgctttttgggacattttcctcccttatgatgcattttttattaactggggcaatcccagttaataatctccgaaagcaatctccgaagctacggcctaccgcctgttacccagctcctcactgctgaacctaagtgaaccagcgctcgggtttaacgctgtctcagcttagcccataccttctccggtatgaatttcctttatcctttattttatggagctccgaaccagcagcgtctcttccaaaaatcctttgccgtttttcagccccacgttgggcgccaattgttgtgtctggccagcagaccacaacctgggttctagcctaaaaaggcattttagaaacctggaagagaagaggggctaggtggcgagagaaagaaatgtagccaagacagttactctgatcaaggctcaaattttattgttgcgacactagttatgaaggaagggggaggggacccgattcccgccgaataatctctggtccagtagaaaggtgcacgtgtgtggctccgcaggttccagcagtgggcgtggcagaacaaatgagcaggaagctccacccctgagcaagcaggtttcaggctgggggaggggagactacagccagtgttctgctattgatgtctccttcactgcctaagctttccctaattccttttcacaggttagctgggcggggtcttgcctgaggtcaccacgccctttattctatttacatccattgggcttttcattaaactttatttccttgctcactggacttggctccattacatttcctggtggtccttttctcctcaaaccggacactttgtattttcttttgtccaccttgctccttttcatagtgaccactgataaccacatgacagaatcaacactaggctgtgttgaaatttcctctgccaataccattcatccaacacacacacacacacacacacacacacacacacacacacacagcctggttcaattttgcctcaggtagatttttaggacaagggcaaaaagcatcttcatctttggccaaaatatcacaagaccattaatattctttccctctgaaacctcttgagctgggcccacaatgctctactggttttgttcctactagaatgccctgccccttacaaagtgttcagctacttttctagtccaaagtctcaatgacttctgtattcatccaacaaacagcatggtcaggcctgtcacagcaatactccactccctggtaccaacttctgtcttggtcaccactctattgctgtgaagagacgagaccaagataactcttataaaataaagcatttaactgggggcttgtttgcagtttgaggcttagtccattatcattgaaagcaaaaagaaataaaaacagaaaggacatgactgtcctagatatagtggtggagaaagttttactgtagatcaaaggcagaggcaggaacatctgggagggtccagagtgggcatgaccaggctgggctgggtcatgtggaaagagggagaggaataaggagagggagacacagggaccaggtgcatcagccaaaagagcaaaggtaccaaaggagctggtagctaaaatggctggcttatataaagaagagcctccggggggaagggcagcccaacctctggagtttggggatggatagggaatggggtgtgccacctatactctgtaacaggtaggggctgagggatactaggagaacatggcaactcaagccatttgtcccagggtttgagacttaacagcagggagtatggtggcagcagacagggatggtgctggagaagttgccaaggacactaacttgatccataagcacagagagaggcaggaggggaggaagggaggaagggaggaagaaaggaagggaggaagggagggannnnnnnnnnnnnnnnnnnnnnnnnnnnnnnnnnnnnnnnnnnagagagagagagagagagagagagagagagaagagagagcctgggcctgtcttgcacttttgaaaccttaagcccacccccagtgacacaattcctccaaaaaggccacacgacctaatctttctaatcctttcaaacagtgccactcccagtgactgagcattcaaatacatgaggctatcagggacattattcaaagcaccaaactgggctacagacaaatacaaataacacctcagtctttatttgctctgagcttctcaccagctctgagcctcagaaggaggctcaaccttagaaggaagaattagagaggaagggactgagttcttccataaacaggtgaattgatttctttgagctccagctttcccatgggagaatgatccttgggtccccatggtattgggaagcttccaggcagccatagaagccatccttagtgcagtccctggcatcccttattgtcaccttcatggctaatataatcatcaccattgtccctactctcttatccaagatttctgtgaggctccagtaggacagacttcctggtgactatccgggtatagtggatatgttatatggtctactctcagaatgtaaggacattaagatccaaaggggacaaagggcaaggcccacatgatagccaggactgatgctttcctattcatgggatattgagtgcctcaacctgactctcctgtctctttctgttctcaggactccaacccaccagctagagaccgttcctcagacacctgagaaggtagaactcaccctatcccacgtatttttccatcaagaatcctgtcacccagcaaggatggcaaatgctgtcctttggggaaaatgggagtgaactcaagtgagggctgtcagaggtgactcaggttctcctaaggcaagtgcacggggacctgggctctcactgtacaccacagtgggttttaaaagttcccgtgacctttcaccctcaggcagcttcctgggttcagtaagatgaatggagagaaacctaaaccgcagccttttaacccaagcattccactgaggctgcctagagagtgacactttcccagagcgacagagtaatttgaaagggacttctctcactctggctaagtatctggcatgatgaggctattgccattttttatatgaattttgaagtgtggatactgtactgacattgatcacaagtgaacaacctgagaactccccccaccccccatacacacacacatgttttagttagagtttctattgctgtgaagagacaccatgaccaaggcaactcttataaggacaacatgtaattggggctggcttacaggttcagaggttcagtccattatcatcaaggcgggaacatggcagcatccaggcaggcatggtgctggagaaggagctgagagttcgacatcttgatccacgggcagcaggagactgtgtgccacactgggctgagcttgagcatagaagacctcaaagcccacccccacagtgacacacttcctccagtaaggccatagctactccaacaaagccacacttcctagtagcgccactctctatggggcaagcattcaaatacaagtctatggggggccattcctattcaaaccaaccacatcccagtacccatttgctcttttttttttttttttggtatgtgttgtatgtgtatgtttctgtgtgtgtaggtgcacatctgtgtgtgtgtgtgtgtgtgtatgtgtgcatgtgtgtgtgggcccaaagacaacctcaggtattattcctcaggagcatctgccttatgttttgagacagtttctccctgagacctgagctcaccaatcaggcgaggcaggccggtcagtagctccaaggatctacctgcttctgcctctccagatctgacattgcaagtggctatttttccttgagtcccagagatcaaactgatgtcatctgtttgcaagacaaaacgtttttaccaactgtctccttagctgttctcctagctgacttcagagatagtatctcactatgtaatctgagctgttctcagatccaccatcctcctgcctctgcctccttgctggtatggtatggcctggtttgtctttccccgccaggtcagtgtcttaatatttttcccgttattgtgaaagacaacactgacaaaggcaacctcaagggaaaatggttcattctggctcacggttcaggcaagggcatccgtagcaggatcctgatgcagctgatcacatcccatctacaatcaggaagcagaaggcaagaagggcatgtttctcttagcttcatcgctccgttttatacagtccaggatccacaccaggtcctgccctcagttcagatgggtcttcctgcatcagttcatttatgatcgtcccccacaggcatgcccagaagcccatctctcaggtgcttctgggtacctccaacttgacaattaacactcagtatctgcactgacgcagcgctgtagagggacaaaatgacaaagaccacgacagtgagtggcaagtcggggtggcacagacctataacctcagacaatcgcaaagctgaggggagggggctgaggagactcaaggactgtgctgggttacagaacaaatccaagggtagtttagggggaccctgtcttaaacatttaaatgaatgaatgaatgaatgaatgaagcttggggatatagctcagttgtggagaatctttctagctggttgaggtcctgggttcaatctgttgttagtacctgacagagttggagagttggggtgaacagaagatcagcagggcatggaggggcgtggcaagccagagacaggcttccagccccctatcagatctcagtcttgcaatgtaacacctgtctgagcttgggaaacggtctgagctctgggaagactgcacaagggttgctgtgaaggaatgcttcagctctctgcattaattggtgagagcaggtttccaacccaagggaagccaagctggcaaggaacgaggagcccggtcaccagcaaacctagaatggaccatgggctttggtgtaactggcacaatgagaaatcacaatgagaagcctcagactcagatcccgatcccagaaacgaaacttcacatctgaaacccacaatggtgccggggccggattttttgggacaacacacgcttggcttagacagttgtttttgattctgttggatggaaggaagacatttctagacaccctcacagtcccagagaggaccctgggcttgcagggcacttgaagtgatggagaatgtccacacccagcaggaactgcccatacagatggcccaagctgccagtacggcaggccacagacacactcctcatttctgcctagcctccggactcagcaatctcctatgggagacctactgtcacggaggagcctccaacagatgcccagagctccttcccctccccccgctcatctcctgggtaacagttggtggttagcagaggatgaaagagaaccaagcatcatcatctagcttctccgtcagctgaaccaatgggatggggagcaccacttctctctaggatgctgcatggtccaggacaggctggggagactagccctgtgccggaaaggcagtcaggtgtgtgtgtctgtctgtctgtctataagcctgtctagttgagagaggagggcattttctcacaatgacaaagctaaaccagacatgatgctggatgtagtggcttgtgcctgtaatcccagcactttggaggctgaggcaggagaattgtcctgagtttgatgctagtatggtttacatagtaagttctaggccagtctggactacagagtaaaatactcaaaaacaaaaacaaaacaaaaaacaacaaaaactcatacattatgcccagtgtggtggcaccctagtcttggtactgggagtctaaggcacaagaattaccatgagatctgggctagcacatgctcatgagtttggctccatccctgctctgagccgggtcagctactaggtctcatcagcacaggctgccgtagcctttgaggtcacagcactatctctgtacagaaagctgaagtgaggaccagacaaagccttctctgagtgccgatctgtaaaacattcttagactctcagctcctagctcatgcattttaataattttgaggttatatgcattaaaggccagaagaggccagatacgtggtcttgggctggagaatgtactgctgatggcttaagcttcatcaggggatgatgggcatttccttttatgtgtgtgtgtgtgtgcacgtgtgtgtgcatgtgtatgcacattggggtagagtacaggtacatgtatacccacagaggctagaggagaatggtgggtgccctgttctgtcaccctctgccttactcccatgagatgcatctctcactgaacctagaacaaggttgggtgccagcatggggcagggctctgccttatccctcctcccctcctctgtttgctcctgtcaactctgctcactcagtccctgcttgctctggcccaaagatttctttattattatacataagtacactgtagctgacttcagacacaccagaagagagcgtcagatcttattaccagtggttgctgggatttgaacttaggacctttgaaagaacagtcagtgttcttacccactgaaccatcttgccagccctgaaatttaactttggtgattaaataaatcaatattgtcattatatggtccagctcctaaaagttacagttaagatgtaaaataatagttgagagttatttatgcatttggcagtgttgaggatcgaacctagagcctttggtgcctataaggcacgttctgccactgatctacactcttgcatcctattgggtaaaatgtagaaactcataaaggggctggagagatggctcagcagttaaaagcattggctgcagaggacccaggttctctccccagcacccaaagaaagggtggctcacaactgtctgtaactccagtctcagggaacccaacaccctctcatagtcttccctgacatttcttccatgtgcagacatacatgcaggcaaaacctccatacaaatgaaaacagaccgggcagtagtggcataagcctttaatcctagcactcgggaggcagaggcagctggatctctctgagttcaaggccaacctggtctacagagcaagttccaggatagccagggctacacagagaaaccctgtctccaaaaacaaacaaacaaacaaacaaacaactcaaagttccttcactgccttgaagtgtacctgagtaggctgtgcctccacttaggtttttcactgttcttccagtcagtccacaaataacaaggaacattcccgaggtatgagccagacaccagtaccgtttatgaacaagccttcggctccgtgatcgtgcccatttcatagctgatggaattgcagctccattgagaagccttcccaggcagggtgtgatggagaatgcctttattcccaaaactcaggaggcagaggcaggtgaatctctgagagttttaggacagcctggtctacatagttctaggatagccagggctacatagtgagactctccctgttaagttggggtgtcagtacctaagaaatacagttcctgatactcctcagcaccctaaagaatacaaatgccaattccattccctttcttatagaaatcttcagctggagggactaagcagaaatatctaatcaaaatctgatgctgtaaacaaatttcaagaatgaaaatcagtcagttttgattgtgcctgtgtgccacgctccagcagaactgtccactgccaatctttgccacttgggccagctgcctgacattgaacccgtatttgaaagcctgggttcttgacttccctagttggagtaggaggggactcttttgaggcagcttcagccttgcagttgttagacaaagcacagaacagtcggaagctgttatgtctcctagagatgggacaaaggggtcatcagtcttgacttattggataggattcacctctcagcttcactggtgtcaaagggacaaactgtatacacttaaggtattacatgtacacacacatacagacacagagtatacacttaaggtattacatgtacacacacatacagacacagacatgtacacacacatacagacacagacatgtacacacacacagagacacacaccacacacatacacacaggtacacagacacacactatacacacatacagacacacacactacacatagacacactacacacatacataaccacaccatatacagacacacatacactccacacacacatattcaaaccacactgtgcgcatgcgtgtacacacacacacacacacacacactgaaattattaccccagtcaagctaagttacataggcattgtcttagtcattccttttccccccagtaagtaccaccttagtaaattttaattactcagtatatttaatcctcaccatactaaaaaaaagggggggggatagaatgattttcagtattccatggaaaaaagagtaaatttaaaaatattttagggccagtgagatggcttagtaggtgatggcgcttgctgccaagtctgaatccctgagttcaatccccagaacccacatggtggaaccggaaactcaactactgcaggttgtcctctgacctcccatgctccaggtggcgcacatgcgcacgtgcacacaaacagaaccaatgtaaaacaaaaaacaccgtagcatgtctctctttctgtgctgttgatatgtaggtatctggtgagaaacgcaaagaaggagacatagctaaagtgatggatgttatttccacaggagtgtaatttcaagttcttcaaaaccccttgcttgtatctttgggctttaaagtgagcacaatgcatcgtttttagaattgacagtctacataccatattttaagctagacaggcaagggcagacagaaaccaggatgaaggtcacacttctgaaaagatggcctttggaaggtgccttggttcctccccaggtctgctaatcacctcccggaagcccatggcttctacctctagcccagagcccaggcagtgcttccaggagaatgctctgctggaaaactgtatgcttgggcttagggctttatctgggctaatggattcttctagaaactgtacactatctggggtcagtcctcagtatcagggtattgacctctccagctggtgagaagagaacggtagtgccgagattctaaccagcctttttgctgaactttaacctttctctaggatcagaaaaccccgcttctgaggacagaagacctctggaaaaacagtgtagccatcacctctacactatgggacagaactgccagcgaggacaggtaaccgcctgcctccccataccccaggatcttacatatcccaggctggccccaacttccatgtagccagagaggacctagaatccttctgctctgctatccacctcgaaagtgttgggatgacaggcatacactaccatacccagtctacatggggttggggattaagcccagggcctcttgcgtgctaggcaagccctctgtcaactgagtcatgtgcccagctttccccagcctctgagagggtcctatataccatgccagactcagcctattccctcaggatgttgcctgaggtccagctcagagctaaggcatagcaagaacatcacagggtgggctggagccttccatctggcctctggctctcagtacaggttaatttctcaatcagacctgtggtttctacccacagggagcctaccaacctcgtagttagttgcttcttgtaaagctatactacacagtcctgtgcatggactataagcaagaatctggctttgctctctaaagaaagccccttgggctgaattccccccaaatgctttgcctattctgacattgaagaatgtcttcctgaacactggagcacacctcagaaaacgtgactagcacagagtgtattcctgtgagtggctggctcttttgaaactcatcttgctgcacacaggcctcaggacagagagtcgtagttgtctctcttaaggggtgggggaactcatgtgcctcgtgggtgtaaacccaaggacaaaagcaggcctggcacttgttacatgatctgagggccacgactccctcagatctaggagtaatgaatgggctgatcagcccttgggggacatgtttatcctaactaaagctttaagaatcagggaaagtgggagctgctgagatggcacagcggttaaagagcactgactgctcttcctgaggtcctgagttcaattcccagtaaccacatggtggctcacaaacatgtgtagtgagatctgatgccctcttctggtgtgtctgaagacagctatagtgtactcataacataaaataaatctttaaaaaaaaagattcacggagaacaagctttagggtgctgaccagagatgaggggtttaggcatggaagagcccaagaagtgttccaccgtttgtccttgaaaagtctggcccagatgtgttttccttccctcggaggcttccggaacgctgaacttgtgacttcttccctccccgaatttattttttcttcaagacaaggtctcactatgctagcttaggctggcctggagcctcaatctcctgtctccacctcccgagcagtagaattcccgcagcaagcttatgggatgctagggaattgaacccagagcatcacgagtactgagcaagcaccctatcaactgagccacactgcagctcctgcgtcctctaactcctgagtagaagcctaagcacctgtgtgggttacaggggaacatgggagtcacaaaggacaccaagatgaaggcccccgtagctccggacctctgaaggcaccccacccgcacccccacccctcctttccctctattcctcaagcagcgtgaaaaatagtgcctcctgctctgggaaaggaagagggtttccaaaccacgagctttatttgggatgtcactgccccctcctccctgctcccttcctgtgccctgtctggctttgccagccccaggcagaatgccaccaagagtttataaagcagtccaggcctgcccctggcgaggtgacacaaagcagccagtgtcgcaggcaccatgtggcagtcaggaggcttggacgcttgtctggaatgcagtgtcaatccatgggtctagccttggtctccgtggtgtccagagagacacgtgggtcccaagctctctcaagatttaaggttgaggaccaggcattagaagtccggtatatccctcaggcagcccgagaggagcttcagttgttaccaacctctgttagatgatgagctattctgaggctgttcccactgcacacgcaatcccagctcgtctctgcatttacggttcctgtatccgtgaattcctccagcagtgggttgaatttctaagaaaaaaatattacatctgtcgtggatggtacagacttttttgccatgccttaagtgacgctttagcacggcttctagccctgtggtgtacatccttagcacccagaggctactgagagtccacgggagggcgggggacatggctcagcagctaaaatgcttgctatgcaagcttgaggacctgcgttctggtccccaacacccacataaaatctgagcatgcaatgtgcatttgaaaccccagtgcagggaaggggcgggggcagggtagagacagacagattcccaaaggctcagtggccgggtatcaggggcaagttcaacgagagactctgtctcagacagacagacagacagacagacagacagacagagcaagacaaagagacagagagaatgggtctggtgaggtagtgaggtggctaaaggcggagcaaacctagcaactggggttcaatctccaggacccatatagtggtggatggaaggggacttgacctcattaagtgatcctctcatatccacatgagtgctatggccagctcccccaccccaataatcaaaacaaatgaagtaaagagagattgagaacaagtcgcccaatgtcgacctctggcctccattacacatatgcatggatgcacacactcacatgtacacacacacaaccatgtaactctatgtgtgtgtgtggggggggttacaggtcactgcagatactatggcattctgaaaaggggacttgaatgactatggattgtggtctctgaagtgaggcaatccctgctacacggacataggaaggaaacactatatggcccaagttctctccttacatgggcttacgtgtctcataaggcccagtgaggtagcaacactcccatttcactgatggggagaactgaggcttggagaagttcagttactttcccaagcttgtagagctggccagttgcagatcccagatggtccactggggtctctgtcactcctctagtcgctctgtcactctgtctgtccttcacccttaaactcaaggctgcgggtacggtttgctactccatttctgtgttcctgctgccatacatactgtgggttgtcctagttgaggcatactgtactctggatagtgagtttccatttgtggcctaagggaggaccaaaccgtgtagtcccatctggacagctttctccacaactgctgtccagacagtatttcccattgctaccttagtcttcattctcatgaggcctcttaagtatctgtaaggcttccttgcagcccctttgatatgaggtttgcttggataaggtatctgcatatgaccaccttagacagcctgggccttgggtacatgcagaccttgtgtgaatggttctgatggtctatagtgtggctcccccaaccctttgttaaaaccacaacgtctgtgggttttgttttgttttgttttgttttaaatctggaaccttcttggaagaggctctagtgttgcacttataaagagcatacatttatttattgaacacttagtgtgtgatgaatcactatgagaagtgctgaaaagacagccccagccctccaagggcaacagatacatgggttacctctgagttttacagagctggctatgtgcctttggggtactgtcttagtcagggtttctagtcctgctcaaaacatcacgatctagtggcaagttgtggggaaagggtttattcagcttatacttccacattgctgttcatcactaaaggaagtcaggactggaactcaagtaggtcaggaagcaggagctgacgcagaggccatggagggacgttacttactggcttgcttcccctggcttgctcagttttctctcttatagaacccaagactaccagcccaggaatcacatggaggcatttcctcaagggaggctccttcctctgtgataactccagcttgtgtcaagttgacacacaaaatcagccagtacaggagctatacagccttccaggaggctcggtgtccttccttataaagggaggccgtcccttctcatctattgtgagttaggagggagccgatgtactgtggcgtctgcaggcatgctatggcttgcatactctcctccccctcccatagtaatactacaagtaaatgtaattactttttaaggggttgggaggaagattagaaaccgtgctagttatcttccatcgctgtgaccaaatacctgacaagcagcaacttgagggaagaaaggttcttctatctcacagttgagggagctgaaccagggtgcaggagcatgcaggcaactaagaccccttgcttcctcaggaagtggggtcaggctagaacttctcaagttccggtcctagtgagaaccatttcctccagtgaggctcatgttcacttctgaaaggttccacaactttccaaaatataaccatggtggtggtggtggtggtggtggtggtggtggtgggatcagacaagcctctggtgacagttgacattcaagactcatcaggaactaataatggagccaggcccaaggacaggaggccctttcacgggctgctctgagaggccagtggctacacttccaatctcttagagctgtgtcctctataccagtcagcacacctcagtggccagtccctagtggactcctagctcactaatgacagaggctgagcctctcttattctctatttattttatgtacacatgttctgcctgcatgtatgcttgagcaccatgctcacactcagagctctgagagtaaaggagagggtgtcaggtccaatcccctggaaccaagctcaggcaaggttgtgacccactgaatctgaaccagcatcctctgttaaacaaatgctctaagccaatgagccatctctccagcccgttctccatctttgaactctcggtgcctgtgtggaggatccgataagtattcatttgaataaactcatgaatgggaagtgtcacgatcatttcctttcttccgaaggggcattagtcccgtttgcactggctcctgcggtttgcttctctggcttagataggctacacgcatcaatctatgtggatgcagagtgacaaactacctttgtaactctatcttgttttgtctttaaggctgtagatgttgaaccaaaaatacgaccccctctcacagaggaaaaggtaagaagtccaaatgtgggtttgtttgtttgtttggttgtttggttggttcctccaggagcattcttgtgtgtataaaagatattgtgtggagccgggtggtggtggtgcatgcctttaatcccagcacttgggaggcagaagcaggcagatttctgagttcgaggccagcctggtctacacagtgagttccaggacagccaggactacacagagaaaccctgtctcaaaaaaaccaaaaagccattgtgtgactattctgttccctctagagattctgatgatgattttaaaccacggggcttccccacagtagattcccctgggtggggagccgtgtttactttcaaaatgttcctctctaggcccagatttccacacagcagggtacaatgagagagcctttaaaaaaaaagatttatttatttattatatttatatgagtacactgtagctgtcttcagacacaccagaagagggcatcagatctcattatgggtggtagtgagccaccatgtggttgctgggatttgaactgaggaccttcggaagagcagtcagtgctcttaaccactgatacggacctcagagcccatcccctctgtccttgacacagatgagtgtcaagcctttcttacccacagaggcagacatatttcataggaccctgaatcagagttttctgtgcctccctcccattccccaagcaggcaccttaatgtgttttaaggccgaacaggggaagcaggtctatagttttagtacttaggaagcagaagccagggttggggtcgggtaggggtgtgggatgggatggggagggctaggatggggtggctgcaaatgtgaggttagctaggctacaaaataagactttgctcctacaaagaaaacaagaagagcatgcaatagatagactccagcatggttggctccactggaagggtatggtaaggtaaaggctttagtaaccaacctgctgtaagggggtggtggcacaaccctcagctaaggcagaagtagcataaatttggggccacactgagccacctagtgagagcgcaagtgcacacccccctacacacacacacacacacacacacatacaaaataaaacaaaccaaaccaaaaaaaccccaaagtatcagcttagtaagtctgtttttgttttgttttgttttgttttgtttcttttcttttcttttgtttcttttttttttttttttttttgagacagggtttctctatgtagctctggctgtcctagaactccctccgtagaccactgtggccttgaaacttagagctctgcctgtctctctgcagattttctttttttgtttgctttgttttttgtgttttgactttgtagccatggctggctagcctgaaattgtgtaggccaggttgatcttaaactcacaaagatctttctgcctttacttcccaagtgctggaggagggggttgttgggggagtggagaggaaagggtatgggttttcaaacctcaaggccatacctcctcccacaaggccacacctcctaacccttcccaaacagttccaccaactgggaccatgcattcaaacacgttcgtctacatgggccaatctcatccaaatcaccaaacctatccgcctttgatcttggatttctcctctcccaaaccaggaaacaatacatttatgttgttaaaccacccagtctgtggcatttcattatggtagctataccaaaagttaattgaaccctccaaagcagaaaaaaagccaaatattcatctgtccttgaaagggtaaataagctgtggtatgtccgcacaatggaatattatttagcaataaagcaacaaagctcagatacatgtgacagagcaaaccttaaaatcatgttcagtgagaaaagccagtcacgaaagaccatgtattgtcttgttccatttatatacaatatccagaataggcaaagatatggacctaacaaatgtttgccgatgacccaggcatatagaaaattgcaggctgatggctcccggaaggagagggagaggaaatcttctaagggccactgtggtgcggatgtccttgttcagagactgtaccacaattcattgtcgaattagccatgacatgaggcctgtctctagtcccagctctttggaggctaaagtagggagatcccctgagcccaagagtttgaatctagcttgggcaacctggcaagtccctccaaaaacaaaccaaacaaacaataaaacaacacacacacacacacacacacacacacacacacacacacacacacacaccttaaaacaactaagggtctggagagacgctcagcgtgagttaagagcatttgttgctcttgcagagcaccacgtggtggctcagaaaaaacccgtctgtaactccaggtctggggatccaaagcctttgtctggcctccccaagcactgtaaacatgtggtgtgcacacgtacacatgcaagccaaacagtcatacacatgaatcagaaggacagaatcagatggttaaattatgtaatatgtgagtttacatctcaataaaacataaccttcacagagccccagcccttggaggctcaggcaggaagattgtgagttcgagcccagtctgggctacacagtcagaccatatccctgaaaggaaacctctcctttaaggattccctaacaaagtaccacagacttacagaactaaaagaacccacaagatcagttttccagacaaggccccaggctccatcacagagctctttgggggggggggggctgggggggggagcagtttaaccctttgtgggccagactgcagaaggcagcctgagaggtgagactgggagtgtgtgtccttagttggtttcctttgttctgaactctgttctggtgacaggtgagacgtggcctgtagaacagaaggtgcctggggacaaggcttgggttgccagcttaggtgacagggagcaagttctgcctgggacacccttgcccacacagcttggcttctccctccttttgttctgcccaaatgtcacaccctcggggataccttcctgtccatcctgcttgagacgattccccttaccccttggccgcttagcctctatactggctaggaatgagttcgcctacttgtaatagaaaaccctcaaatagccacagtttggggcacagggcaatttcatttttctctttattttagaaacctggagataggaagtgtggggctggggctggtgcagagtgccttgctgactctgcatgacatggggacactggcacctgttttaatttggtgctttattctgtctggctgccacgcccaacgtgattttacaatccatggagctggcaggaaggaggcaggaggatcgttctagggaaagtggcacaaagctgttaccggaagtcgccaggcgagactctaacttccatccctttatctgcctggttggagattggtccagtggccgggtagctgcaaaggagactggaaatatgatccttatcctgggctggtggcggtagtgagggtggctgaattcagctaaaaacagaaacattgattcgtcagaccaaaggagaagtggttatcttgggatgtggccggcctagcgacaccacgctggcgcctgtgtgatacatattcaagtaggatttgttcactatctgtctccctaaatgtggtcagacacggtgtcttgtccattgccagatttggggtgatgggggaaatagagagtagagagtatctcatatttattgaggtgaaaaaacgacgccgtgggggtcttgagaaatagcagggttctttctctgttctacatttggttttatgagacgggttctagacatgaagcccaggctggccttgatgtgtctgattgtggcatctgagtgctgggattacagaatgagccacctgagctgatacaagtatattaaataataaatgaccactgcagtgggaggcaccgtgttttcagtgtccgtaggcggagagggtttgatgctcggaggagctgggaatatgtgtctggagttttcgagtcatatggaggctgaaaggcttgacgagagtgactcttcaaggtgtttgctttgagataggctggtaagatggtccttgaaccccacatgcataccacagtgtgcccatgatcacacacacacacacacacacacacacacacacaagtaaatgaataaatgaataaaaagtttaaaaagacacacctatagacaatggctcttttatttttgagactgggtctcactacatagtcctggctggcatgcagcttgctatgttgaccaggccgactttaaatttggggcaatctcctgcctctgcctcctaagttttagatacagcaagggttttttgttgttgttgttgttgatgatgatgatgttttgtttttgagacagggtttctttgtgtagtcccggattcctggaaccaactcagtagcttaggctggccttcaactcagagatctgcctgcctctgccttccaagtgcatgcacaccactgtaaaagtaccttttatcctcctaacattaatcgttgtctcagattcttactgccttcgtctgctaacctaggcctcgtcctggaagcttctagcctctgtacaatcttatctatatataggcctaggatgcttttagcctcttagacttactgactgatacaatctggcttctcccagcttctcactgaattgctctgcttggcctcacactaactctggcaatctgttctgatgatctcactccttctcattctctggctcattctgtcttcacagggattctggcttattctctctgcaatctgtctctaaacaacatcccaggaaaaatgcctcctccttccttcccctctgcactgcccctcaagtagcttcctcttcctctctcttctcgtgaaagttgtacatatcctattctgtcagatttctctctgatttgtcactttgtctgccactcaattaaacatcactttaaaaaaaaaaagtttatttatttatatgagtacactgtatgagacacaccagaagagggcatcggatcccactacagatggctataagccatcatgtggttactgggaattgaactcaggaccactggaagagcagtcagtgctcttcacaactgagcccctaaacatcacttttaaacataggttcgtccttctacaaactaactttaccttcattgtgttggattatgtattaagggtgtgtctatattccagccagagggattaaaggtgtatgctaaagactgagccacaccctaactgaaaacagagccccccccccccgcccaccccgaaataacacagtcaaggttcacaaagttatcaaatatccagcaacacaccaccactgcccagcacagaagggcttcttaggcttttccatttgtgacccacttttgcctatttttttatatgactctgagtacataggtatatagggcagtgtacaaatcaaatatttactgataataaatcataatttactaaaatgagtcatatatatatatacatacatatatatatacatacatatatatatatataattttttaatatagggtttcactgtgtagccattgttaccctgaaacttgctgtgtagaccaggctggcctcaaactcacaggaatcctccttcctttgccgccgcctcctcctcctcctcctccttcttcttcttcttctttattttttaaaaagatttatttattattatatgtagctgtcttcagacacaccagaagagggcatcaaatctcattacagatggtcatgagtcaccatgtggttgctgggatttgaactcagaacctttggaagagcagtcaagtgctcttaactgctgagccatctctccagccccttcctatgccttctgggtgctgaaattaaaggcatgttctactatagtcaactataacttttaaattaaattactgattcttgtatggggagggggatgtcagtgtgtatgcgtgcatgtatggaggtcagataactttgacagtaggttcttcacagtgggttccaagggtggaactcaggttctcaggccatcttgctagctctaatatgcatatagtcttactacctattaaagataaaagcaatctggctgtcaatgagttgagtgtacttatttttccataaagaattaacctggccttcaggaatattgtttcctgaagagcataccaagtctttagagtcttttttagagtccatggctgttcagttttataaacatcagtgctgagaaatacacaggacaagactgcagaagcacattcaggcctatttcagaaatcgttagaaattctgtcctagccgggcggtggtggcacacgcctttaatcccagcacttgggaggcagaggcaggtggctctctgagttcgaggccagcctggtctacagagtgagttccaggatagccagggttacacagagaaaccctgtctcgaaaaagccaaaaaagaaaaaaaagaaagaaagaaagaaaaggaaattctgtcctagtcctgagctaacatatgctcattagttcagagcttttattttttatttatttatttgtttgtttgtttgtttgagacagggttttactgtgtagccctggctgtcctggaactcacatgcatagaccaggctgtctgtgtcatcacagaaatcctcctgcctctgcctcccaaggagctggaattagagatgtgtgctaccatgccttgctatcaagtagcaattttaaaaatcagactttcgagctcatgaagtctgcagagattgctaatttgataaatgctaacaaatgatgtccagtaaacattttaaagtctgttttctataattataccattgttactcttggagctaaaacacagcagttcataacatactcaatgttaaacacatgagcttccatcgaaccccaaagagttcagagtgcctgacaggtggcaagtcccacctaggcttaacccgttcttaccatgagccaactgtgtttaacttacggttgcgcatgatggcacccacctttaatcccagcatttgggaggcagaggcagatgcacccccatgtttggaggccaacttggcctacagagtaagttccaagccagccaaggctacatggtgagaccctgtttcaaaacaaaataaaacaccccttcccaacagataataattcccagcccttgggaggcagaggcaggcagatttctgtgactacatagacagcctggtctacacagtgagttccaggacaggcagggttacagaaaaaaaaaaaaaacattttaaaaaattgctatttgctaacaacaacaacatgactgatttttacttctctgaattcaaacatcttttcctttaggaaatcaggtaaaataccaagtcagtccttaattcgctctgtgctctcctccccagaaaccctgactgggtgtgatttggacctcgtgtataagcactcagtccaagtatattttggcactaaatcaaaggcggtgggtggaggcagacccttgctggctctgtgaaggtggccgagtgtggggactgggcaacattgtcctagaaagccgtggtggtcagcttgggcacttgtaattgctctgggccaacaagataagggctttcttgtagggaaagaggcctggcttaagataaagaacaggtgcctaaaagaggtaccgcaggctaaccctccctctcacatgccttcctctgtccctttggggtaaaagccaaggatggcagagtctagctttctctgagtagtggtaaaccaagtcagggtagagccaagcaggcaggcaggagtcattatgatacctgaggggcaggtgtttggggaaacagtaaagagattaccagggaaaccagggtacaaaattctcatgcaaaacttaaatttggcattccctcttccttcctccttgatctcaaccctggctttaatgcctgaagtccattgctaattaaaaccaaccaattaagatggaggcaatgcttttacagatgtcagaggtgtgttgatcagtgcagtgtgtgtgtgtgtgtgtgtgtgtgtgtgtgtgtgtgtctgtggtgtgggctagagctggctagaggtgcctgccttgggctgaagaaggtagtggctgctctcatgtctagcccaacactcgatacataattatcaataagggtggctagaccctagctgtcagaaatggtgggttttacagtgaagtctaaccgtggttaagtgttgactggtatttataaatcactagctgtgctaaacaagacattatagggtctagttttagcggttgtcagcgaattgatcctgttagcatgttgggggacagaattttgggccagtcagagggaaagcagctaaggatgtaattttatcagcccagtcgctatgggcggtgcctggaagtgctgctaggttttggagcaaagctgattagaggttgcagtgacctttcactctttggtacttggcatcagaaagcccctccaggctgctaagagcactacttggggcttcattatagaagtcatcatgtctcttcacccctgtggaaatccagggtctgaatcagcagttctcattgggcaagttgtaaaccaggttgcaagccactgaggtgtctgtcactcaggaaccctctcggcaatgtcttctcttcactgcaagacctgcagtctacagctctctctctcacacctcattgactgattaagtggggttaatgatatttgtccttgtagcctccccaggctgttatcgggagaaatgaggcaatacaggagaaactgctctgtaaatgggtgacattgtgtaagcatggtcatcaggaggcgtgcgcttcctggtgccaggggttcagcccatctgtcagagatcacagtggaggaattcccaggactgtggagcagatgggaatgaattagatgtcctaagcatttggtctgtatcatcttccgggcaggtgtgtttggcggagcggccgcctgacaacatttggtccgtccttcccacgactcgtagcaggagagacacagtagatgaactgagagttcagaggacttgtgggaaagatgaaactttgcccagaaggggaagaagcttgggactctctgggttgaggtcttcctgtaggtctgggagtaatcaaggcagctaaactggggtttaagacttaaggagcggggcctgaggcaaaacccccattgctacagtactcaccgatgccccagcaagcacaaagccctcagtttaacttcaactttatgttgcatgtggcagtgggacccatgatccaagcattcaacaggtagagaccagagatcaaagttgaagaacatccttagctatatagagagttcaggccaggttgggctacataggactttaccaaaaagaaaaggaccaggggtagggtagtaaaggggggaaagacacacactaacacgaagaatccagaaccatgcgtggtggtgggcacgtgggaggcagaggccggtggaactctgagttcgaggccagcctggtctacagagcaaattccagcacacctaggactacacagagagactatgtcttgaaaaaccaacgaaacaaccaaccaaccaaaaataactcatgcgtgaggcctggaaagatgactcagtggtaaaggttgctgcctgctctagcagaggtcctgggttcaattcccagcacccacatggtagctcacaaacatctgtaactccagttccaggggatctgatgttctcttctgacctccttgagcatcagaaacatgcatcacacacacacacacacacacacacacacacacacaatatatatatatatatatatatatatgcaaaatattcatataaaacccctaaaaaattaaaaataaacccaggcatagtagtgcacacctttaatcccagaactagctagacagaggtaggcaaatctccatgagttcaaggccagcctggtttatatagagagttccaggcctaccagagctacatagtaagaccctgttttaaaaacaaacaaataataataataataaaaaagacaagaaacctttgtgaggtggtctagggctcaactgagagaagacacaacactgctgtagtgttggctccagggaactgcctgatgggagcagataagaccaggcctccgggagacagtcacccatatcagggaggcagtcttgactcagagttgcttatctggcccaggctgcctgaggtggtggggtaggatggacagagtgctggctaggcatcagaactggggttgagtcccggctccaaattctaccgcaacctgccactgggcaagatggcccaccagctgtgcatcctacgctgccttgcctgtagagaagagccctggtccccgtttgcatggactctgagcactgtccgagtgtgccctgtggaggtgctggggcctgggaggccagggtgagtgactgaggtcatgggaggccagcttaggcaggaaggccagacatgccttcctgtggtgaagggaacttggacaggtatagatgaacggggaagggtaggcgagcaaaggggtatgagcggtgccacagtggaatggacctgtgcagtctgaggagagagggaaatagccctgttgtgaccaggggccagggaagagatacactcaaagagtagggtcagctacagggccaacatgtttaaatcggctccatcagggcccagaagggactgcaggcagggacataacacaattaaggttgcttttcagggagagtgccgtggcctgcagctcagaatggcttggatggctggtagccaacaaccagaaagccaccttaaatgttcttgtaatatttctagctagacaggcgaaaaactggggtggtaatggtattgggagcggcagtgagtctgacttagagatgtgaattaggaaataatgctaagccttagtgcctctgtgtgtgtgtgtgtgtgtgtactgagtcaccttggtacaggggttgggggaagggatagcagaggtgcctacctgcctataagtttggccagctttttcccaattctggtttgttgggtaagggttgtatggggacagattatagtgatagctgaaggctgagtgagggggccgtgagtctaacacggggagcagagagatggcccattcaacctacagagctctgagaaaacaaaacaaccctccatcctcaaagatgtcccagccttgagagctggctggcagaactacatttgcagagtcgaatgcagcttagaagaaccattttgtcctgacactggtggccatgttggtagcgttcgcctgtgcatatgtgtgtgtgtgtgtgttagtttgagatttatgtgggcctcaaatgctaatctttttgaggggagatcctattaggaaaataatttaaatacaacagttaggccctccctgggcctggaaatggcgatatacaggttgcgcccccccccccaaactttaacctgtaggctcccaagttcattctatgagagtacttcccacttaatttgttagacacaagtgtttatgctctttcacaaaaatcatggggtgtagacatcagtagttacagctccatcttaggggtaaagaagtgactgaggacacatctgcacctgccattgggcagggtggggatgtgtcctggatagaggtatcaggtctaccacctctttctcagtgggcagtggtggctggaagggtcctggggtacttgaggggtgttccaggcatgggctcctagccccccaggtgtgggctagaagttagcctctatagttccctcaggacagatgctgcagccctggtcatgggaacatggcctgcaagggaagcttaagtaagagacactgcatacaacggccaggtcaccagcactgaagctaagaaaaccctgcccgactcctgagcagcaactgtaacgcattgcctcagactcctcacctgtagaatcagagccacttctgtatgtcagagttcttacttgtcataaggtacaaatacgatttcccctcaacctgagtcctgaacagtacccccaacctcccagaacccggatgcccaagagctagagaagggtgggaggatcgggacaggctgggaataggccaaaattcccactcggggaccatgagctcttacatgatgtcacaggggcaggcgctttgggtttcgctatgtgaactctgacaggctgtggtgggactccgagcatcatccttagattttggatcctcgatggcaggcaggcacagggacccagtgcaagatctgtgaagccgcctagtttcggcttccgctctctttccacgcccacttgtgtgcttccccaacagggaggatgggaggggtgggggacgagccctaatctccgaggaaggggtgtggctccgttcgcgttctccagtttgtggtgtcctggatctgtcctctggtcccctccagatcgtgtcccacaccccacccactctggcttggcactgtgccaccacgcgtgaccgcgcgctccttacgtggggaacgtgcagggtgatgcctcctttccggcgcgggagggagcggccgtcattctcctgctctggctgggaagccccagccatagcgcggcagtggcgccttgtagccaatggggactgaggaggtgggccggctggcggttgtcaccctcccggggacgggagctcggaggtctggagagagcaggcagacgccccgcccagggactgagggggaggagccaagggaggaggaggtggagtcgcggatccgccgctggaggaccactgctcaccagggctactgaggagccactggccccacacctgcttctccgcatcccccaccgtcaacatgatcgccgcgcaactactggcatattacttcaccgagctgaaggatgaccaagtcaaaaaggtgagccccgccggcgccgccctggccacagccttgcattcccgcatccgctcgccaccgcctgcatcctccccccggcctctcccggctagacagcatctagttggactacagggtgcaggcgacaggcctcatgctgggattcacccgggcattgtgggcatgcgggcgtgcttgtggtttgaggagctgggcggccggctgaagacccccccccttcctcccacggctggattgcatactgcagtgtccttgaaaaggaccatggatgtcagatgggtacccgcacgcagtgccgggctgagacctgtctaggtggggaccagctggcctgtctataggcctgttttgaaaggtccacgcgcgccgtgggcggggaaggtgtgatcgccgagataggctggggaggtgagtgagcagctggcgggggtgctggctggaagccaggcatcccatatttggggttcccatttggagaatacgatgccctcctgaaactgtcactgggctcccccagctgttgcagctgctccttactctgaggacggggtgacccgcctggctttccggtgaggggaggggagcagaggccaccggaaactttgctcataggcctcaggtcgagaaccgcacgtctgaatggaattttttcttcctctaaacctgtaatttccaggcagtctcagcctaggagctcaaataagacactttagtcacttgaagagctcggaggggttggcattcgttccttgtgacttgtgagttcttgcacatggacgctgggtcctaggggtgatgttcatctagtataaagtgccgtctgctggtgggtcttaaagatgtacctcacttttctgccaccatcagtaagacgggatgtttttttcctgagatagactaagttggttaggaaaacacctaggacatttttatttgtgctatgggtatgccttacctaccctaggataggttaatagcatcatcaccctgacagacactgggacaagaggtactatctacaggtgagaggcggcagtgactaggctctgtcctttcctggcctgagacttctcatcctgcaccttcagaagcagtcttaccggggactgtgacctcctgaaggtcacacagctggttagaggtggagtctgggcggggctctgaccctcctcccactcgagaacttgaccaagactccccctgggtgtcagctgaaggggaggtgctgagagacaagactgttggagatgcagctcttatcctgaatagggaccaggaatagggtgctgaagggcttcactgtcaatctcccacccccacccccatccctgacctgatgtcagggagctatgcatcaacacgtgtaattgcttgagtttcttccatggcggtggacatgcttatcccatggaaagggaagataggagggcagagtgcacttaggataggcctcccgaatcaagagtccacagctctcccactctagataccctctgtggctcaggcgtgcaatggtgggtggaggcccaatgaccttgtaaactaagcctccagcctcacacccacagccacctgtgtggctgccagctgcctggctgctccctgacaccgtgctgggtggccaccggtggctgagttggactaaggcgctccactacaagtggcctgattcacctccgtcccattccatctcccaggccctgtgggtatctgagcaccgattcaaacggtgcctaactaaagccctcactctgagattgggatatcccctcccccacctctatcccagagctttgctggagcaaggtctctaaactgaaactttcatttcgttctgtgtaggagatccttaaaaacaaatgagctctcagcctgacggtgggtggtggctcaagcctttaatcccagcttttgggaggcagaggtggatctctgtgagtttaaggtcagcttggtccacagggcaaattccaggtcagccaggaatacagagagaaaccctgtctggaaccacccccctccaaaaacaacaacaacaacaacaacaacaaaacaaaaacaaaaaagccaaaacaaacaaacatacaaaccctcaaaacaaaaactgagcaacggcagggcgtggtggcctcccagcacttgggaggcagaggcaggcggatttctgagttcggggccagcctggtctaccaagtgagttccaggacagccagggctatacagagaaaccctgtctcgaaaaaccaaaaaacaaacaacaaacaaacaaaaaactgagtaacaacaaaatcaaccaaccaaaaaacgccaaaccaaaccaaacccaccaaccaaacaacaacaacaaccaacaaacaaaacaagagcttccttttgcactgcacacagaacttagaagctttttaagcttccaggagatcacctctacctgtagagtgctctgccatatgtgggtgtggtccttaggaggctcccagggcacacagtggtcacttgctcccatgagtcagtttattagcttcctgtccttcccaccccacttctgttatgagaaaggctgcctggaagtgctagtccccaaatcttgctccttttttttttttttttttttttttttggtggagctgggccctgtgtgtgctactctaaagagaacccagtgagtggagactctcctaagtgtgggcagccatgatgattcagttctccagcctcagggagccagcccatggggctatggagacatgcctcgggtgatatacaggaccttgctctcagctaggaggaaggaaattggatctcgttgggggaaggttttcagggttgcccagaatacaaaggcacccgggagacggttttatttccctccactgcctgggagcccgcaataatccagccttgagaacaggtcctgggcagaaatggatgaagcctctgacttctcagctcacatccccgtgctcccggctgcttttgcatagtgccggttaaagggtgccacaaaaaaggggacttggtggacagaagcataaggcacacattttccttcactcaggtttttaagaggaatgaacattgcatgcatctttgtgactacttccattcacaagatgccagctatccagaatgggaaagtcagggccctttaacctccaagtggctcttaaacacgccctgcatagccctgccccctccattgtgtgtcaccgagaaggacctggagggtggagtattgcgtggcatgctgcctgtttgttcaggaaaatgaagggctggagagatgcctctgtggttgagactgcctactgttcttgcagaggtccccgagttcagttcccatactcttcccaggtggcttccaacctcctgtaacttcagctccaagagggagtgtccatcaggggctccttgaggtgggcacatgcagacataatttagaaaagaccagatgcagtatgtttttaatctcagcacttgtgaagcagtggcaggtaggaaaaaaaataatatagaaagaaaaatggagccaggagtataagaaataagaaggaccagatgtctttctccctagccttgccagaacagcaagcagcaaacaccagtggattttctctggcaggatccccatagccccacacaatctgcatcaacagggaacaaacggatgtgatttgtccagtggccggacccaggaaggccaggtagagcaagggaaaagccttgggtggcttttaattgataagcaaatgccctttatttcttcagactgcctggtagagctacaaaggaaggggaggaggaggaagaaaatatggagctgacggctgtaaccacaagttgtggcaggctgagtctggaaacttgagagttctaggccagctcagggtacactgtgaggccctgcttcagagcagttctgttccttattgcttagggaggtgagttaggaaatcatgaaaaccgggcaggcaagttgactcggttggctgaagggctcacttcacaagccccgaggacctgagttcgatccctgtaccccacagttggagagaaccaactctcacatgccgtcctgtgacttcaacaaaagcatgcctgcactcacatcaatagtaatagtattaataaattgaactctaagaagaattttatggccaggcagtaatgtcacacatctttaatcccggcacccagaaggcagaggaggcagatagatctctgagttcgaggccagcctggtctacagagctagttccaggacagccagagctacattgagaaaccttggcttaaaaaaccaaccagtcaaccaaccaaccaaaacaacaatcacttaaaaagagagagagaagcaaattctgttgcatgcaaagctaatacctcattggccagtgttctgtcatattttccgtccctccaccagaggcatcggatttctcccttagagcagagacctgtcattcacaggaagggtcgtgaggaatagaccagggagctgctggctgtggggaggcctcctcatctggccacgcctcttgatgctgccgctgcccacactcctgttctctgggggaaatcgtggccagccttctccttgaaagaaagaagaaggtctagttggggaagggaggacaggtgcccaccccaccatcttccaagttaataaaccataccggtgggacctgaggaagcttcctactgtgttacgttggttatatctgactatctcattgtgagagagagagagagagagtgtgtgtgtgtgcgcgcgtgcgtgtgtgatttttaccagcaggtagatttttttttaatttcttgaaaagaacattggcttctgatgactgatcctttaagaaatttattagcagctttggaaggaagagttcagtggacagcagccatcctgtagcttgcgttccttgctttaacagtttcttagttccgagcatcctgaattaccttgtgtcactcgagatgtcacttaactacgactgagaggtcccgtcacaaatatttcaaatgtaaatatgccacgtgtatatacgcattcattagttcctttggagaccccaggagaggcctgcggctgtgactcaaatgtagagcctttttctggttggtgctacagcgttcagttccccatcactgacaagctacggggttagccaggctgaggggcaggagttgtctctgtgcttctaggccaccccctcctttgggctgtcccgtgcgctgcaggaggaagggcttttaatctctattcagaaaccaccccacccaccgggtcgctgtaagtttatgaatggaacccagaaaaactttctcctcttttaggagaaaaactcattttgatggcttgtctcggaacctgaatcctaactctctgccctctctctcgtataaaaaaagtgtaaatcgttcttattaggaaatatttgaggcacataaacctatagaagctcatgtgtataatatccatatacttacattgtcaccctgacaagtcagacatagttggctcacaaccacctttggtcctattctttctctttattgagatgctctctgctatctatctgagcattctatttatttatttattttctttttcaaaattgtttttattttatgcatatgagtgtttctgcctgcatactttcttttatttttatttatttatttatttatttatttatttatttatttaggttttttgagacagggtttctctgtatagccctggctgtcctggaactcactctgtagaccaggctagcctcgaactcaaaaatccacctgcctctgcctccggagtgctgggattaaaggcgtgcaccaccacgcccggctgcctgcattcatgtatgtgcactgtgtacgtgcttggtgagcagggccagaagagcgtgtcagatcccctggtattggagttacagatggttgtgagccaccacgcgcatgctgggaaccgaacttgagcagcgagtgctcttaaccatgcatccgtctcctcagacctcccgattttttattttattttatgggtattaatgtttttttcccatgtatgcgcatgtgcattagattccccttggagatggagttagaggtggttgtgaggtccagctacaggtcccatgtgggtgctgggaaccaagcccatgttttctggaagagcagcaagccctcttagtggctgaaccatctctccagctccaccatccagaacatatttctgtggatgattttgcacttgaaccatacatacctatagtcagcatctagtaccataaaggcaggcacacctcctgaactcaggcagtacctgagccctcgatttgtgtgggtttaaatgtttgtaagtggtgtcctgctgtgtgtaccctgccgaatccttttctgcagctccacgttctgtttggggggacttctttcatgttgctgtgtggactttattcatttaaacggcgctgtgctctgacagcacatgcttctctcaagccaatcctgccattcttttgacagccgcttgagtgtttcgttttcttcagataacagtgtcagcaagagcttcttttacctccttaagctctggagcgggcttctgtagacatccgaggtgcctggtcacctccacgttgccaagttgttatccctgatggtcgtgctctatcgcacccctatcagaatgtgggcattcgctggtcacgccaccttttggtatagtcaaacctttacgggtaggttaattttgttttgatgtgacatttaattgacttattcacttgtgtttgcgtaccacgctgtgtgtgtgtgtgtgtgtgtgaggtttccagagttacttctctttatccaccacgagcgtttggggtttgaactcaggttggcaggtttgtgtggcgagagcacttttagctacggagccatctcgaggtccttaatcctttgcgtatctgtgatggagcgcgtcaggtggcttgctttcagtactggggcatctagcagaaattagcctgtttcctaatttaccttatcaagtggctttggctggtcccagactctgttaagtgaacttgacagctccaggtgtgatttatgtgtgactccccccacctcatctgctgaagctgagccttttatatgggtctgggtggctgcagagctccccccacccccacacccctatccctgtcccctctatggatcagcccatgacagagtcggcttatctgtctcctaaacgtgaccagccctcgtcagacagaactcaagccaacagcctctctggctatcttccgtaaaaggagagggtggatgtgccccgttgcttcagggaaaactgcacagtgaatcttgaagcccagccctttgcaaacagtaactgagcatgcccagtgcgggcagaaaaaaaaatatcagcgcaggctcagtgcagtccatgctgattcttggctcaaggatctaaaacctgcaggaaaacttcccctgagatggaagcagcggtggggtggggtggggtgtggcagagtcacactgtgcctgctatatgctgtcttttttttttttagtttttgacgtgtgtgtgtgcacatctgcatgcattcgggtggatgtgtgtgtgtgtgtgtgtgtgtgtgtgtgtgtgtgtgtatgcgtgaagaccagtagctgtgtnnnnnnnnnnnnnnnnnnnnnnnnnnnnnnnnnnnnnnnnnnnnnnnnnnnnnnnnnnnnnnnnnnnnnnnnnnnnnnnnnnnnnnnnnnnnnnnnnnnnnnnnnnnnnnnnnnnnnnnnntgtgggaaccatttcccagcctttgttcttctatgtaattctagctagcctggaactccttgtgtagctcagcctggcctcgaactcattatcctcctggctcaacctcccacgtgctgggcttacaggttttggaccacctctgccttcttagcttcagagaaggcaccgggtagcacttcctggcattttgataacacattgcccctgccgtgtttgtctgtccttttgccaattgacgggcatctgtgatagatttccttttggctgtcatctgaacgcagcagtgaacattcgtgcacacgtttcctcgtggacgtttgcctctgtgtgtctcttgtctgtatgcgtgggaatggagaatttttttttgtttgtttttttggtttttcgagacagggtttctctgtatagccctggctgtcctggaactcactttgtagaccaggctggcctcgaactcagaaatccgcctgcctctgcctcccgagtgctgggattaaaggcgtgcaccaccacgcccggctgaatggagaatttttttgtgagtccctgggaggacacctctgtgtagaaatgaggaaactgaggacccctccccccacaccccctcaagtggtgaaaccccttgtttgagggcttgcgtgtcaccacagcggatcccctgactcagagttacacccattgctctcctgtggcagtttagggaaaaagatccaaaggaagaaaggatggatgggagaggcttagggccccccaggctccctcctccctccccagtaccagctcttgctctacagcctgtgcgtgtggtctggtctctctctgtctctttctctctgtgtctgtctctgtcacaatacacacacacgcacacgcacacgcacacgcacacacacacacacacacacacacagagccaaggatgccttccatttggaaagtaaactgatccagtaagttcatatgcgttgacgtgtcccattggccactgttggtctttgcccgacctaagcaccgttgcctccatcactcggttgacacatgcacattgtctttagcagagtcgcttaccccagacctcgtttctctctcagggtccctggcacctgccagggacccattccagatgagtggggtgagtggaataggatgacccaggtcgccattatcataaagacgaacctccgtcttggtaagcccctttgttccactttcgaaatgcttgcttaaacaagatgctgggtttgttttttttgtttttttgtttttttgtttttttgtcgagtccttccagtgagcttacagagtttctctctgcacgttacatcgggtgcaggggaggtgacagaggtcctagaagcagagtctatgtcatcttggtgggtggaaagcagtcaggctggtgccaggatccaggcatctctggcaccgtgggaggttctctctcgctgtatacagaagcagagagagccatggtccaggacttcagactcccagagcctctggtggggctcagggtaagctgtcccaaaatatgggccgaaaacaggaaggattttttctggccttccaccaaaggaagagannnnnnnnnnnnnnnnnnnnnnnnnnnnnnnnnnnnnnnnnnnnnnnnnnnnnnnnnnnnnnnnnnnnnnnnnnnnnnnnnnnnnnnnnnnnnnnnnnnnnnnnnnnnnnnnnnnnnnnnnnnnnnnnnnnnnnnnnnnnnnnnnnnnnnnnnnnnnnnnnnnnnnnnnnnnnnnnnnnnnnnnnnnnnnnnnnnnnnnnnnnnnnnncaccccgcccctctcccccaccccaactccctcccccaccccattccctctccgcacccacagtaatagaagagtccgagcaaacagacctggagttgttccctagtttattacgtcgagtcttgccatgtagcctgggttgcctgctgggatcgcaggcctgagacatggcacccagctcagaagtcccctgtgatgaggaagtcgagtcttcaggaacaaggatagagatacatcaacccaccctgatcttcacggcttgcacccatagcacttaatgactccattgtgtgtgggaaaactgcaggcctcacacatagggaaattgtctcagctcccagggcaacactggcaaacagcaataaactcaagtcaccttcctcttgacaggccccttgccaagggggaccagggtaataccctgaggccaggctcaaggcctcccccaccccccaactgctgagggtgaccttggcacctattagcaattcttgttcagggagagtggtcaagaccttgtccaggcagagaacaaaacggtcacattgaaccaactaaaaataggggaggctgtgtgccctccgggaaagacagcgtcccaggaatgcagcggggctggaacggcagagtcactccttacttcctgtggctagccagccggagaaggaacaagcctccagccacccagtccgaggtgtcctaggcgcccaagacaaaggtgacacctgaagtgaggacgtttcagcacagagaggtagctaggccggaaactgaaaagccccaagtcagccctcgggggaccaagtcacaccctgactccatctgtaatgacacacagacacagggtcaccaagtataggcatttaagatacacgttgtagcttttatctgaacatctgtctggggaacatggacactcactagggccaagagctctccactggattagaaaacaaggcagatattgcccaggaccctggcctggggccctgagccctgattacctaggaagctatggcccctcacctggttgcttaaagtccccccgggtaggactgggggtgtgttgtgggtgagccacaatagccccacctggtgtttgcagcatctcttaagtttcccaagccagccccacgcttgttctcaaatgtggttagtggataggtaacgaggcaggagttgttgacctcatgtgacagagaagaaaaccgaggctcagagagcttgacagccatctaacagtgctgtcagcctgggctttcatacccacttcccttcccgggctatcctgagcagtcacacggcaagaccttctcttagaaagcaaaacctcccagcaagcaaagatggggctggagatatggctcagtgcttagagagcggtgttactcttccagaggacccgagtttagttcccagccctgcgccagggtgctcacaaacacctgtaactccagccccagggcgtctgctgccctcttctggactcatccacactagcacagatctactcttttctgagacagggtttctctgtgtatccctggctgtcctggaactcactctgtagaccaggctggccccaaactcagaaatccacctgcctctactagcacagatctaaaagcaaataagaatcagtggcgtgggggaaatgctattgcaagcagggggacccgagtttgggtccccagaacccacataaaagccacaggggcaagaagagatggctagatgacttaatgggcaaaaacacttgtaagaggacatgggtttggttcccagaacccaccaaagtggttcataaacagctgttagagtagtggttctctcttctaacgaccctttcacaggggacccatatcagctatcctgcacatcagattcgtaatattaagattcataacaatagcaaaattacacttaatgaagtagcaacaaaaagaactttatggttgggggtcaccacagcaggaggaactaagtatattgaccacacagaggtcgcagcatcaggaaggctgagaaccgctgctgtctgacacctcctgcgagcatgaggcatgcccatggtacagccttgctgaactagtgagctccaggttcagtgtgagacttggtctaaaaaatgaaaaataaaaagccagatgtggtagtccatgacattaatccccagcaggcagaagcaagaggagctctgagtctgggctacagagtgagttccagcacaaccagggccactcagagagaccctgtcccccacaaaaaacaaacaccatcaccaaaagttaaaaaatagatcgtagaaagatccggcctccacaagtgtgcacatgtgtgtgaatgtgaataggtacgtaacgcacacacgcacacacacacaacacaccaaaaaaaaaaaaaaaaaatggaggaacttcttttcctcttgttgtagatggagttgtataaagaattggggttgctcattgaggcagaaggaatagtctggatgtgtaatagaacttgtgctggagggtcgtgtgtgagccggggagaaaagcaaggatctctgtcttgtcatttggctttggagatcgttgaggtctttgaggagcctctgccaggagtacaatttccggactcacgctcctccgtgacttgcaggctgctcagtaagtcttacgggaacacgagaatctgattagctttagggccccggtgttctgctgggcgtcagccaattaagagagatctatgaagggacagtgcggattagcactcagagagggttaggggatgtgacagaagtgctggaccgtttggggaaaaggagacagcgggccttatctgagccagcgcaccctcagcgacttccttgaactaggcgtcaccagaagccgccccgcccagctgaggagccacatcaaggcaccagcctgaggactcaggggacacacagagggcacctcaggcattagcagtccagccaaggtgtggaccatgcctgtgttcctgtggctttgggaaagacacacactatgatgtgtgcactggggccagctgacttccatatagaggacacctaaggctagggggatgctgaagagagggagagacgacggcgtgaggccgggcacatcatggcatgtcctgtgcagaaggtgagtttgcagatggcttgaaggaacaggaagtgcaggggtctctctggcatagtgtcgcaggcctgaatcacagcactgaggcaagcaggtctctgtgagttcaaagccagcctcactcatctctgtagcaagttccaggccagttagggctctccaaggtgagatctgtctcaaaagaacaaaagcaggacccacagaggccattgggtggcgactccaaggaagaaatttgatactgtcacagcatgagagtattggtgttttggctgctctaggaacctccaaaggagtgtaggttctcccctactccctgaagctaactccatcctgactcagaaactggctgccaatgctggggaagagactagttcctcctacatggccgccatctgcaccagtgagatgggaatggcagctgggggcagccacgtgcattaggagggagactgagagatactggcttgtccctgagatgccaccaaccacatagcagagggtctgggaggcctgggcctcccagctttgtccccatgatgactggaaaggaatggatacacaggcagctagcccctgctgggaagtggtctggggctcctggagtatttcttaggtgtggtgtgctttctgcaaggcacagcaggcacactgcttcagggctggcaggggctgtgacagcagtgcctgccacctgcattccttcatcacatggttcccagaagtgctatctgtgccccctccatccagttgtgtgtgtgtgtgtttgtctgtgtatctgtgtgtgtctgtgtctctgtgtgtgtatttgtctgtgtatctgtgtgtgtatttgtctgtgtatctgtgtgtctgtctgtgtttgtgtgtctatgtgtctctgtttgtgtctctatatgtgtgtgtgtgtcccccactcttgaggatatctgtgaatgcactccaacataaaatagttacttaggacattatggatttctttgtactttttttttttttttgagacagggtttctctgtgtagctctgtccaacctggaactcactctgcagaccagactggccccgaactcacagacatcggcctgcctctacctcccaagtgctgggatcagaggcgtgtgccaccattgcccttccttttgctttttaaaaagaaaacttgatttgggttttcaagcaagaaattttggtttcggttttggtttccagacagggtctcagcatctctggctgtcttagaagaactcactctgtagaccaagctgaaaccagagctcctcctgcttctgcctccccagtgaaggcacacactgccaccgcgggctctcaagcaggaattttgtagatggcattgtgcgcaatgtcggaaggttggatgcatctggtttagagggaggagcataagaccaggcgaggactgggaagccctttattggcgttcctcaccggccaggtgaggagcctctctgacctataaatttggggatattagaattactgtgttctgtgttcttcagaccgtatggggcggagcagcttgtgaaagaccttgcccagtggagaccttggtagatcaaggtcactgagtcctatatccataggatagatggtgggaagggtaggaaggctgaggggcacgaagtcaagagtaaacacacgagccaacgccatcctatcttcatcctgcgttcacccagcctacatttctggtagagttcaagtgtgacttgagatgtgaagcagttcacacgggaaagaggaaggtggagttagggagccagcattgttatgcttttccagttttggaaagccagtgtggtgtctgtatgtgcattggtgaggtgaccgatagcctcctgcaagcagggatgtcttccggtgggggagaactcatcctttttactctggtgcacaagagcccatttgactagtacatattatatattaatataatacataataataagtacatattattgttgtttttttctttctgtctgatggtccaccccatccatctaccgacctagctatcttaagacagagtcttgtgtagcccaggctggccctgaactctgtgtcaccaagaatgaccttgaacttctgatcctcataccccagcctcctgaatgctgggatgatgtgagacgcctagcttgttactgcttttttaattaattaattaattaattaactttttacatcccaactgcaatcccccctccctcctactcctccttcatttctcttcagaaaagggcaggtctcccatagatgtcaaccaattgtggcatatcaagttgcagtaagattaggcacctcctgtccttgaaggctggatgaggcaaccctaggtaggaggcatgggtcccaaacacaggcaagagagtcagggatggcccatgcaaccactgttaagagttgtctgtgaacagacaccatgaccaccgcaagtcttgtaaaggacaacatttaattggggctggcttacaggttcagaggttcagtccattatcatcaaggcaggagcacggcagcatccacaatgcatggtgcaggaggagctgagagttctacatcttcacctgaaggctgctagtggaagactgacttctaggcagctaggatgagggtattaaagcccacgcccacagtgacacacctactccaacaaggccacactttctaaaagtgccacacctgggccaagcatatacaaaccatcacaggagtcccagagaaagaccaagttacacaactgtaacactgcggagggcttaggtggccccatgcaggctccttttggaggtgcagtctcatcataggcccaggttggttgattctgtaggttttcttgtgatgtccttcacccttccggctcttatgatccttcttccccctcttccagggtattccctgagctccacctaatgttaggctgtgggtctctgcatctgtttcatcagctgctggtttgaagctgctctgctgacagttgggctgggcaccgatcgatgagtataggagaatattaggaatcactctattgactttttttttttttttttttttttggtttttcgagacagggtttctctgtatagccctggctgtcctgaagctcactttgtagaccaggctggcctcgaactcagaaatccgcctgcctctgcctcctgagtgctgggattaaaggcgtgtgccaccacgcccggcctctattgactttttgaaaagaatttggcagtcgtgtttggttctattctaggtctctgggtcctggctctccaggaagtgttgggtggttcccttttatggcgtgggtctcatgctggactggtcattggttggccattcctcctgtgatgtctgatctacttcccttcctcagtgagattcatgcgtcccttcatgggccctctgttactttttgtctttgggtctgtgactagcagcatggttaccctgtattttatgactaatatccactgagaaatgagtacataccgtgtttggcttcagggtctggattacctcactcaggatgctcttctctagttccatccgtttgcctgcaaatttcatgatgtcattgtttttaatagctgagtagtactccactgtctagatgtaccacattccctttattcatcttcagttgagggacatctaggttgtctccagtttctggctattaggaagaaagctgctatgaacatagttgagcaagtgtccttgtagtacagtggaacctccttcaggtatatgcctaggagtggtataactgggtgttgacttccaaagtggctgcataagtttgtatttaagcaacaaaactgccagtgctccgggactttgggcggggcctgtcatttgtacattgccaccttgtagttttcgattaagtgggttaatattggaaagagaactcagagtgttagagcccttgctgcttttgcagagacccagtttccgttcctagcacctacacagtggttctgtggtacccaaccctgccttctggcctccgtgagtaccaggcaggcatgcagtacacagaatatacatgtggcccctatacatgtaaaataaaagtagcttattttctaataaaacaggctaatataatttgtaataaagtcattctttttttttaatttattttttaatttttaaatattttttggtttttttgagacagggtttctctgtgtagccctggctgtcctggaactcacttggtagaccaggctggcctcaaactcagaaatccgcctgcttctgcctcccaagtgctaggattaaaggcgtgcactaccatgcccggctaataaagtcattcttaaggtatttcttaagaactgaaggagttgagagagcacatgattacgtcactcggggatggggaaagattctttgagttcactctttgagcatgactaaaatcttttttttttcctaatttttcattaggtattttcttcatttacatttcaaatgctatcccaaaagtcccccagaccctcccgccccacttccctccccacccactcccacttcttggccctggcgtttccgttccccagtactgaggcagataaagtttgcaagaccaaggggcctctcttcccaatgatggccgactaggccatcttctgatacatatgcagctagagacaccagctctgggggtactggttagttcatattgttgttccacctatagggttgcagacccctttagctccttgggtactttctctagctcctccattagggccctgtgttccatccaatagctgactgactgtgagcatccacttctgtgtttgccaggccccagcatagcctcacaagagacagctatatcagggtcctttcagcaaaatcttgctagtgtatgcaatggtgtcagcgtttggaggctgattatgggatggatccccgggtatggaggtctctagatggttcatcctttcgtctcagctccatattttgtgtttgtaactccttccatgggtgttttgttcccaattctaagaaggggcaaagtgtccacactttggtcttcgttcttcttgagtttcacgtgttttgcaaattgtatcttgtatcttgggtatgactaaaatcttgatctgttaaatgaaagtattggctccatctgagcagcgagaagagccggagggagggaggtttggcaggtgcttaacccgaacccagctgttctagaacacatgagaaaagaaggggcgagccccaagtaggggctaccctattgtgatggtttgtatatatgcttggcccaggagatggcactattaggaggtgtgacctggttggagtaggtgtgccactgtgggtgtgggcttaagacctagctgcctggaatccaatattctcctggcagctttcagatgaagatgtagaattctcagttcctcctgcaccatgcctgcctggatgctgccatgagccccccttgatgataatggactgaacctctgaacctgtaagccagccccagtcaaatgttgtccttataagagttgccttgattatggtgtctgttcacagcagtcaaacactaactaaggctcctatgtagagttaaggtgctgctcccacttagaagccccaggactttgtggagcctcttcggttctgtttcctcttctctaacgtggagacagtggcctctcctggtggctttgcctattgaagtggcagggagaaaaccagccaatacccggaaacccctgcttcacgtctggcactcggcgtttgccttgttcccgctctggctcaggtgaaagtcctggatgcaaacgacagagctcctctgcaaaggctagtgcccatggccttagccccctctggtctctatatcagttgaccgccatccatgtgcccacttcttagccctttgctccccactgcccaggttgtctctatgagacgctgtacctggaaatctctgtttaggagctgtcctgagcagtttcaggcatctgttgctttgcctaattcttttttttttttaatttctgagttggagtctcgtatagctcaggctgaccttgaacttttatagtgtgtgcttgtgaattgtgtatgctgtatgtgtacatttgtgtgtgtgtgtgtgcacacgtggctggctagtcattgagtttattggagacccgcctcagctcccgaccaccacctcccaacattgggattaagggatgtatagaatgtgtatgagtcttacatgggtgctggggatttgaactcaggttttcctgctttcatggcaagtgcccttacccagtgtacaaggctggcctcagacttgaaatcctcctgcctcagtcttccaagtaccagcaatgatgggtcaccacgcccagctctctcttgttctcaattcccatggagagtggacagcagaggtgaaattttccacagccacgccctttccatagaaagtgaaagtgcccatgttgtctgtggtcactggcaatcctgtcctgaccggcctgctcgattgggcatgtctagtcttgaattggttttttgtgcttgtccttttgggatcaggagggcgggactgggatcaggcactgccatgtgggtaaatagggcctagtgccaggctaccagttctttcattggacatagggattgtggccagggtacttggcaaggtgacattctcttcgctgatggcatctgctgcctcagcccgagtccatctgtgcagggttctgagcttcaaggccctgtcagtccacaccgaggaacagtgagggctgactcatggatgtggctagtcccacgtggggtggtggcctgagccctggaggctgatcctggctcaggcaagggctacagaactggcttggcacagggtatccatgtccctgttcacccgagaagatgtctatagagtcatgtgatgcacccatgtaccagagtgagcatgtgacagtctagagagtgagagttgtgagagaaaccacccaaagatgtgctgtgctgagccctccccatgatcaattttaagacagggttgtggataggacaaagcctgtgggcaccaatgcctagccaaggcagcagggggcaggtgcagaatcacaatagaaggtgtatgtgtagtgtgtggtgtggtgtgtgtgattgttggtggttgagtatatgattgtgagtgtgtatgtgtgtgtgtgtatatgaatgtgtatgtatgtgtgtgagtgtgtggtgtgtatgtggtgtttgattgtctgtgattgagtatatgattgtgtgtatatgtgtgtgtgtgaaagtgagtgtgtgggtaagtgtgtgtatgtgtgtgagtgtatatgtgtgtgagtgtatgtgtgtgagtgtgtatgtatgtgtgtgactgtatggagtatgtatgtatgtgggtggtgagtgtatgtgtagtgtgtgattgtgagtatatgattgtgtgtgtgtgagtatgtatgtgtgtgtgtttgtgcgagtgtttgaatgtgtcagtgtgtgtatgagtgtgtatgtatatgtgtgagtgtgtgtgtggtgtgtgtgattgtgattgagtatatgattgtgagtatatatgtatgtgtgtttgagtgtgtgtatgaatgtgtatgtatgtgtgtgagtgtgtgtatgagtatgtatgtgcgtatgcatgtgtgtgtgtgtgtgtgtgtgtgtgtggttggaggagaaggtactatatagagtgttcttctgattcacatagcccagggtctcgtgcacccgctgccatgcctcctgagccacgatggattgaatccctgtggtgtgagccaggttgaccctctctttccattaaagcaagtgtggtgtctggagaaggggtggactgaggtagacaagcttgtggtctgtaagtgtcttggcagggctgaagatgtggtaaagggaggcgttgccctcccgtggcttattagacctttgagacgatggaccccgtggaactgaaatgtcctcgagtctcacactagtaaaggaaaaggctggagcccaggtgccagccggaggaggagcttgcctcctgggaagggattccatctggggctgacagcctgcaggacccaccagcatccaggaacagaaccaaagatgggcccatggtgtgaaggaccacactggacagcgactgcttggctctgcataccttttaccctctatttcaagttaaatctcctttctctgcttttcattggctcttgtctgtttgattggcctaccaggaaccggtggccgagcctggtttgttaaggcagctagaactctgtctggttacaccggtttctagtttccatgtctcttctgagagggattctgtcccatggtgactcttagacctgagcaggaagggaagggtccccaacctgctttttcacgtgatctttttttgctctctgtgggccaggatcaatttaaaatgctggggttcatgatatagtattagcacggagataatcctccagttaggacccaggatacctggggagcttcggagagtcctgccttttctagaaccatctccctacccagctggaagacctcaacagctctccttaggtaggccctcaagggtcagggttggtttcagggtgcactaagcttagccgtgctggtgaaagactgcactcccctggttgtgttctttgaatggattcatttagctacctgaggccccactcctgcagttgtaaaacagggattaagagcgtgtccctgacaaggtcttttgaaagggtcaatgccacattggacatgaaagcgcttggtctatggaaacccacagtaggattacaggatggctccagcagccagcaacatccgagctgctcctctgtgccaggggacttgcaaagctccattcaacacacttcctttccctgggggcagccgcactgtgtcagaagggatgggcatcaccagacagtcaggacgttgtgtgagaagggtggccagaaggctgggatggccgtgggacttacttctggagggccaggtctctactgcctgcagatgtcttcttgccccaccagaggctcctccgtctccttgggtcctctttggtgctctcagggctcaccatgcgttgggatcaggtctgtattcattggtgtgacttttgggaccctgtgtgatgcagccgctggatatctttcttggctttttaatttcttgagctgtcagctccctccgcactgaactgatttccgttcaccttcggctacacatgcacccgcttatgcctggacacactttctgatgtcacccccacccccgacccctcaggacttctctagcatgcttgtattgtgacctttgtggatgccccccagactaaggcccccatgcttacactagtgccgccagccttggggaagaacattgcgtttctccacccagggctgtgcttctggcaatttctctcctgctctgtgtggtgtctgattgtccttcatgtggcttgtcatgaaggagaaagaaaagactggctggctggtgatgggaccggggacagtgatcccctctggccacagaagactagtagactcttagcactatggttatctatgccacaagagaccacggggcttggagaccacagcaaatatgcagaagtgacctagcctggggactctgtcctccaggcaggacatttccagccattctgaagagtgagtacagggtatcattctctgcaaccaatcaacatcaagatcttgtcggtgttactgggtcataagtctggctgcaagcactgggagccttctgtgtgcaaaggggccactggggagactgaggcagaggagcacagctactccaggaagttgtgatgttggggactcagcaccatgggaagggttatctttccccccttggaggacttgggtgacttcaggaaaaagacttcaccggacctggaccctgaggggctgggaagggttggatagccgggaagagatgaaaggcatttcgggtgggagtgaccacagggccagagaagcctgaagcagcagcaacaagagatgtagggatacttgggtgagtgcagagagtggggagacttgctgtttagagtgggtatctctgggacagggaggcagctcgggaagggcaggagggcacgactaggcctgtcctgtgagagactcccacagcagtgggcagagtggaaggatggacggaagatggtaccggaagcatctttggtattactagctcatggttagctgggcttcctaagcagtggagaaaccaagagagcaatggcaaacaaacaaaacaaacaaaaatgtcagtgcacaccacaagacagagctacaaggacaggtgtctagttcatgttgaacacagagaagggactgttccactgagctatgccactagctccctagtaaatattttgtttgagacagggtctttctcataaagcccatgtagccaaagatgacctgagcttcccgtcctcctgcctccagcttcctagcactgggattttaggcgtgtgctgccagacccaggtttgacccagggcctcaggcatacagggcaagcatttcaccaactgagcaaacccctgcccctcctccagcgaaacactttttgagagagtaatcagaaaaaaacaatcagcgacgacccagggggttgagattaggagcctgtgtgtttggagctgtgagcgtgtcaagtaggctcatagtccacacgtgtgggcggcgtggggcccctgggctgatgccagacattctgaagctggggtgaatgcctccccttggggccagctgcctggtctatctgaatggttctagctctttcacttgtcactctattttcttaggattttatttgggactggagagatggctcagcactgaggagcacttgctgttcttgcagaggacctgggttcaattcctggtacccacatggtggcttaccgtcgtcagtctataatgccagttccaggagatgtggcaccttcctctggcctctgtgggtgccaggcacatacacctcacacttaacgtgcacacaggcaaaacacttacacacataagataaatataaatgaaacttttaagaaggttatgtgcccaaagaaacccactgccattactacatcatcctttcattcatttattgatatggctttttgagagtcttgttatatagtccaggctggtcttgaacttctgatcctcctgccccagcctcctgagtgctggcattttaggtgtacaccaccatgcctggttaagtcctatttatttcaactgaagaaacagaaatacacacacacacacacacacacacacacacacacacacacacacttcttagacaacagggcttggacttgaagctacatggctggctctagaacccatgttcttaacttgtatggccttgccaaccaatcttgatgaactagccacctcacagagggagggatgctgcaggtgctgggaggaaacctgcctgtatcatgcatcaccttgggggctgaacaacacttagcatgtggtattccagggttggaacgcgccttggggttatcttgcgccttggggttatcttgcttgttttgtaggtgggggaggggacagtagcatttgtggatcccccccccccaggtggcacagttgagggagtcaacagccttctctggtgccatgttccctccaggctgcatcagtgggtcgatcatccaggccaccagtttcttgccctgccatgcccagccaggctggagctgaactgaactcctcttgaactcagtctaattctcctccctccctgtccttcccccagattgataagtatctgtatgccatgcggctctctgatgaaattctgatagatatcctgacacgcttcaagaaagagatgaagaatggcctctcccgggattataacccaacggcctccgtcaagatgctgccaacctttgtccggtccattccggacggctcaggtgagtctctgagaggtctgggaggctccagctctgtgagctgaatgctctgtgaaacctgtctttccaacagatgagctcatgtgttcatgttacccattcacaattctagccattgatccaacttcaccctctgtccttctatccactcacccacccacccatccacccatttacccacccacttacccacccatccacccacccatttacccactcactcactcacccaaccacccaccattcctcgttcccacattgagccagttatccctcccaccgtccataaatcaacccatgtgtcgtatgcctgccggacatctaccatgcgccaggcgccaatgacaccacactggacaatgctggcttacctacccccaggattatgtgacactgggaaagttcagcatttagggctcttcaggtgccgtggggggtcatcatctctccagtaaagcaagggtttgttctgggagaatcccaggcaccaggtcacatttcctgtggccaggtgggtcttgggctcagaggtgggacatttcaagtcctcatttggacaaattccctacacaataagttaaggtagccccaagaattccccttttaatctgcattcttgtggctcctgcctgcttcaaggagtcgaaggattccccaaggactggcaaaattgctttctgggaaattagcagctgcgaggtcctggcttcatttgctcgctggcagccattttgcccagccaattcatagttaactactagtttgcaaaggtggatgctgaagccacaccatcactagaatgggggctcacccaccctatgccatgaggggagctacattccaggaagtcaagtttctttttttgagtttacacctatgggtgtggcctacacacttccgagatttctttccccccactttggaggcctggattttcagtcttgtctagcggattttgagaagtagttcatgtgccgatcccagcaaagggcaagtgctgggcttgctgtgtgtgcaatctggctggagccggaatagtcctggctatacctggccttgagaatgtccacaatgagtcttaggatcggttaccacttggtggcgttgggattcaccgtctgcacactggtgtctctgtctctgatgatgtctttgttcaagaattgaactggatccactcaggacctttttgtctgttcaggggttggttcagcttttgaagcggttctggccgaccgagtgaccctggctgctgtttcctgagtgtgttccggtgcctgtggctggggatgggagccccttgtgttcactctcagtttttctcagccctggattgacccacaagcaggcaaagaatctgtcccgtgtctgagctgaggtcagccggtgactttggcccgctgagtcgggagggagttgggagtggcgagtgagctgggcttgggaacttggaaggtgacccgtgagcctgtgtaaccaggaaggaggagctgggagtgagaggaagaagttctttctgaactgtgtctcccaccagtgccctcctagtacccttagtacccctcccccgctgtggcccctcccccgcctttcccaccatccatttccagggtttagggtctcagagtgggacagtagtaacctggacacttttttcccccagttaagcttccagaccaggcccacacattcagggaataccctgttctctagttccctcttggagacagctcctcactccccccctgcccccccccccagtaccaaagctcctgggcagttgagcacagagggacctgtttacttcagcacagccgcttccccagaatgcttccacatctcatttatctggaatctcttattcttaaaaagcccctgaaacctggattgttttgtgtagcatgcccgtcgcccctcccccccccccccccgcttcctttcagttattcataatcggccctgcggcatttttttcttcattaatgtttcatcagataatggtgtgcctcacaagcagtggtatcttaaccgtgatgagtcacggagctatgcacagagctatgtaccccgtatcggggtacagttgggacacagtcacagggtttgaggaatccgaggcagcagtctgggccttcaacctccttccccccaacccccttcctctggtgctgataggatcaatacagatcagtattaataagaagagtgaggaaaggagaaggtgaatccatccatccatccatccatccatccatccatccatccatccatctatctatctatctatctatctatctatctatctggaactcaccttcctctgcgcccccccccccaagtgctgggattaaaggtatgaagtttgtttgtttgtttcccgtatgtatgaatgttttgcctgcatgtaatgtgtgtatgtgctccacgtacttgggtcctgtgaagtcagaagagggcatcagatgccctgcaactggagttgtggagggttacgaatcttcaggtgggtgctggagacagaacctgggtcctccacaagagcagcccctgcccttgacccccgagccatctctccgccccccttggatgtttttaatggaaagtattccccatgcagtttctctccgctgactctcattcctgaggggtccccctgccccatttagtgcaaaaggtattgtaggtcttggttagcctgggagctatgggatgctatacattcttggatgtttgtttccctgtcatgggtcacagcaagttctttacaaaggagaagccacagacagttttctgaaaacatacgggcataccattatctttttccattcgaagcagaaagatttatttgagtatattcttcctttcctttcctttcctttcctttcctttcctttcctttcctttcctttcctttcctttcctttcctttcctctcctctcctctcctctcctctcctctcctctcctctcctctcctctcctctcctctcctctcctctcctctcctcttcttcttccttccttccttccttccttccttccttccttccttccttccttccttccttccttcctttctttctttctttctttctttctttctttctttctttctttctttctttcatttttccttttctttccttttcttttctttctttctttctttctttatttttttttttttttttgagacctgtaggcctaggaactcctataaatcagggctggccttgaactcacagagatccacccaccctgcctcgagtgctggggttgaaggtgagggccgccacatgctatttcccttcggtttgagatggggtctgctatagcactggccaccttggaagctgctgtgcacctgagggcgacttgaagttcgggtgacacccagctttcatggctgcttcaggtggagttgaggataaggactgtcatcggagctggcttgcaagcagctcactcccagagccaggcactcccaggaggcagcagtttctgtttgtcgtgtattccagcacaggctggggctcggaggcacctgcatctgtgtttgctttccattattttctgctaataatggccatcattagaagggcagagaggtgcaagacccttcaaagcgctgcttaatgagcctcctcttgaagagtggctctttcaaactacagcactatgggaaacgctgggaggggttagggcaggaggccccgtgggggcggggagaggccgatttgaaactaaagacacaaagaggaagttggacagaagcctgaactccaagtaagaggagggaaagagaaataaaatccaaactaatggagaaggctccagcactctgactctagttcagcatgaccttggagaacttacttcagtctcagcctccctttgcctcttctgttaaatgggtgtgagggagtctggtacttaggattccagcctttgggaaggctgaggcaggagaaatgccatgagttcctccgtttatttttttattttttattttttaaaattgattgaggagctggagagatagcttagcaattaagagtcctgactgctcttccagaggtcctgagttcagttcccagcaaccacatggtggctcacaaccatctgtaatggaatcgatgcccttttctggtgtgtctgaagacagctactgcatactcatatacataaaataaataaatcttaaaattttttaaaatgaaccgaataacataataaacagaaaaataagggcatggttctcctcgctctgactgctgtaaaagacgggattaagtggaaggacctgtagggtactgtaagaagcatagcaagttctatcagcattgcccgcatactctagttccttgggagggccttgctgtaggctctcagctatgggacccccgtcctggggctgtgtaagcccagcctttgccaggatgagggttttagagctcgctggtattgctgatattgtggaaggagacagaaggggaaacacagccaatgctctctcacccccatcctctcccaaccggccacataggaagggtgagcctgaaatgggccagctgggctggcattcgatcgtcatctgagcactcaggaagtgcaggcgggaagatcaaaagttcaaggtcaccttcagctgcatagcaacttcaagacagtgctatgtgtgaccttgtcagagaggacaggatggacggatggatggatggatggatggatggatggatggatgggtggatggatggatggatggatggatggatggatggatggatgggaaagtaaacaggcaggctggtgtgtgcctataatccagctacataagaggcttaggcaggagaggaggatactgagtttaacctaagtaaatgccaggcatccaacagagcttaccaaatgccctgtggcacttacctgaagtcatttctctttgtccctggcctggcagactatgagaacaagcagaccttgttctccttgccgagccagcttattacactcagattgtctgccgtctgcagactcctgctgcaaggggagtgggtgaaatcaccctgcctcaaacttgcttatcacttatgaggttggagacagcttgcagacatcaaacgaacaaacaaacaaacaacccaaccaaccaatcaaccaaacccaaagagcattgaatatttttgagtctgagaggggaaggccccgtggccactggtgggaccattttgcttggagcttcctccatacgccgtggcatggacttaatatttttctagcatttctgggctgtaaaagtgattttcaaacaggggtggcaaccgtttcttctcagccaccacacaacacactgaagatggaactggagacagcacaggtagaggggaccctgcctcaagagagacccccttgactctcagcagccaccggtcaggtacctctcaaatccaccatctcctttactgtcaccctgactgggttactttgggttttttattctttaactctgtcctggccattgtcacggtcaccctttctgatcctgcctgaacttcctggaatcttgctggcccgatcctgtttcaaaggctgagtggacatggttggaggggcaggatagggtggatgggccagcccaaggtgcctgacttcttctcagccactgttggagcttcggtgacaggaaacctgttttcttttattcatctgaccatgagacccagctggcaactaaaaatattctccagttacaaaagttgataatgaatcgattataggtatatatccactgtataaaagagaatactatatattggtgggaaagaaaaattacttcaaaaataaaaaggaagccatgtatggtggtacatgaacttaaccccagcactcaggaagaagaggccggggatctctgagtttgaggccagcctggtctacctagagaattcctggccatccagggttacaaagctaagaacctgtttcaaaacaaaacaaagtaaaacccaaaacaaatataaaatatacaggtagacagagacacagtttcatggtcggttgacttttggcagggatgccaaggctactcagcaagggacaagagtcccttcagctagcagtagccggaagccgaatgtccacaaagtaccccgttgtagccttacctcataccctgtacaaaacattagctctgagcagatcaaagacctaagtggaagagctggtgccgtcaaactcctaaaagaaaagcagatgtgactgtttcgaccttacattgggcggttggaatcttatacacagcacagccctaaacggcaaaaccagaaacagatggcccttggtgagaccgtgtagcccaatggccagcaccacaaaaataaccagaaaaactaaacctgtcagtgcttccttattgttactgatttataacttagatttatttattattgttgtggaagtggtgtgcgtgtgtggaggtgggcacataccatggtgcgtgtgttgagctcaggacaatcgtgtggcgtggactctctcctcccacctttatggggggaggggttcaggtattgaacccaggtcttcaggcttgcactgaaagggctttacccatctcagcagccctgttgttagtgtgcatatgagcatatgtgtgagtgcatgtggaagcatgcccattgcatgtgtgggagccagaggtcagcttcaggtgtcatccttcaggtatgtcagtctttttgatgtagagtctttcattggtctggggcctaacaagtaggtggggctggctggccagtgagcacccaggatccctggtgctggattacaggtgtgtgcgataagcacaccactgcacctagcttctttcacatgggttgggttctggggattgaactcaggtcctcatgcttgcctgtcaaccactttattgagttatccatctggccattcctcttatccttccttccttccttccttccttcctccctccctccctccctccctccctcccttccttcctttcctttctccctctttctttctccttgtagagactgaacttatgtgaggtttgaaagacaacagctcccatagactcatatgtttgaatgccaggtccccacctagtggaactatttaggaaggatcaggaaggtgtggccttgctgaaggaggtatgtcactggggataagctttgaggtttcaaaagcacagagcaggccctgtcttttctctctctctctctctctctctctctctctctctctctctctctctctctctctctctctctgcctgctgcctatggatcagatataaaattcagctactgctcctatctgtctgcttcctgccatgatcactaatcctctaaactgtaagccacccccaattaaatgttttcttttataagagctgccgtggtcatggtgtctcttcacagcaacaggacagtgactagacaacctcaggcaagctaaacaaatgctccactatcaagctacattcctggcctttcgtcagtcaagcaatcaatcaattaactaattaattaattaactaacgcatatcctgcttgtggaggtcagaggacaactccctcgagtcttctctctccttctaccttgttgagacagatcctcttgtttcctttcctgctttgtacactccagactggctggtccacaggcttccagcctattccctggtctctgcctctcaactggacaaagcagtgggattacagatatgcaccactgtatctgtcactggtttggggggattgggggatcaaatgttgatttgattttcaggcttgaatgactggtgttttactcactgagccgtctgcctggccccaacatatataatgtttaaaggcacctcccactcattttggtaccatcgaagggtgcgaatgggcagtaagtaagtagatagatggcgttctaacaccagccttcatcagagagatgcaagagatggtgaaaaatgacctcatacacacattactgaagatatagacaaactagaggtttcttccgttatggataatgacagaaagtggtacagccactttgtcaggccttatcagtgtgactctcaaacacacgtgagagaaaggaaagacgcttatccagacacaaatgtgtgtgccaatgtgcttagcagtggtttttaaaaattaatttattaatttattcactttacatcctgattgcagttcccatttcccaatcccctctcaccttcacttctgaggaggaggaggtcccttctggggagccaacccaccctggcacctcaagtcactttagggctaggtgcatccttgcccactgaggccagacaaggcagaccaagatccacacaggcaggcagcagaggtcaggataagcctgctctagttgttgggggacatatatgtagaccaagctgcacctctgctacatatatatgggagtcgggatagggggctaggtccagcctttgtatgctcttttggttggtggttcagtctctgtgagccccccaagggtccaggttagctgactttcttggtcttcttatggagttcccatctcctttgggacccgcagtccttccctcagctcttctacaagacttcctgagcttcgtctaacgtttggctgtgggtctctgcatctgtttcctgtcagctgctgagggggagcctctcagaggagagtcaggctaggctcctgtctgtgaatccaggctgacagacccagacatagcctgaggatccaaggaagttgaaggaggagggcaggcctgcagtgtgtccctgtagatcccctgaggactgctcattccaagcagtgttaattacagtctgaagtgcaaacagcccatgtctgtcagttcaggaaggaatgtgtgaagtatggtccgtgcagacagtgggatacgtggtggccacgcctttaattccagcatttgagaggcagaggcaggcggatttctgagttcgaggccagcctggtctacagagtgacttccaggatagccagggctatacagagaaaccctgtctcgaaaaaaccaaaaccaaaaaaagaaaaaaagaatggaactcgcatggacagtctaacgtagaagcaggctagacacattttactaagtgaaaaaagccagtcaaaaggaaccatttgtgtttaatacccagaaaagagttttcagaatccatttgtctgtctgtctgtctgtctgtctgtctgtctgtctatatttatctatttattgtttatggtgctatggatcaacctcagggcctcacatatcctgggcaagcaagcactttaccactgagcaacatcaccaacctttggcttttaaaaatataataataataataataatatctttttaaaaaatagatagtattatttacagcacccccttttgagacaagtttttactgtgtagcccaggttagcctcaaactctcaatcttcttgtcttagcctaagtactaggaccacagacatgcaccgtcgtacttgactgggaccgcacacacaccttgaatggatggtttctttgttaggtgacccagattgcaggttgtgtgggggtaatccttttcagggtagtgccaccaggctaatattgatagtcatggggatgggagctattgagacttagggaggcaaacgcagctggcctggtgacacaggctgcaacgtggatgaggcccggggacactacactaggtgaaaggtaccagccacaaagagacaaggcatgcccgattccacctataggaaatgtccagatctctccgagaagaaagtggggttcgctagggacgggaggggatgaggaattactgcttaatggttaccaagtcatcttggggtgatatccaagtttctcagagatagtgacaggagctgcttaactttgcaaatgtccttagtgtcaccgagctatgtaagcaagctgtgctcagcaagtggccctagtttctcatgtttgcttatcttacaataaccgtaaaaactcaatccaaagagtaactggagctttgggcaagcaacgattggcatctgggccaacatggaaggaacccagggcataggctgaaccttggcataggcttctccagtgctgaaactctgtccaagctcggtgtggtggcacatacctttaatccctgtaattaggaagctcaggccgggagggtcgggagactgcagtcatcttctgctacatagtgatgctggggctagcccacatcttcaacaaaataaaaagctagtgttgcgtggtctttatttatgggtagcaaggcagaaggtgggatggagctttgtgccgtatttaatgcctcttccaccccagtgtgggtccagagttgttccagcgggtgctgtatggcggggttgggggtggggggtagcagactggccagatccagagagcaggtatactgctggtgtcctgctcacgcttgaatctgacatctgttttctcccttgtcagaaaagggggatttcattgcactggatctcggcgggtcttcctttcgaatcctgcgggtgcaggtgaaccacgagaagagtcagaacgtcagcatggagtctgaggtctacgacaccccagagaacatcgtgcacggcagtggaagccaggtgggcccctgtcctcctcatcctgttccagccagccagaatcccttggagtacccacgagggccgggcttctgaaagctgccatcctgggcaccccccccccctccaggactctattggaggtctgacatagagcgtcaatggctcaggactcccggtggagggatgaggcggctgtagggggcggggttgtgcctgaagaggcacacaccacccggtgaaactaggggcctgtgagtgggtgaaggctgtggagagggaggccctgtggcattgtcgcaagcgcgtttgttctcaaaggatcctggggttgcgtcctgggcacaggtttggcccactctttgggtagaaagttcttctctcagggcactggcttctgcacccactcgctggaggcctggccctgaggaatggctctcagcttgggagaacgggagctctgtactcttgatagaatggcgagcacacaccctcagcatagcaaccagagactgcacactttgctttagaagtgactcctcctccttgagttcatacccaaagcttcccctcctgccaccagcccttgaggagggccatccttcctgaccaaaggacgtgagcacacctgcagagggtctgttttgtgatgtgcgctgcggtccctgtctccccaggaccctgggactaaggttcaggcaatatcctcgggtttttattttatatgtgggtcccctgagattataacatgggggtgctccatccctcttatggatggacatatgagcttggggcccttccagactccacgttagggtcatagttgccacactattgaaagcttgccagatttctgctggggaagggtgtgtgttcatggtgagaggttcctcaagttccccagagaaagccatggttttggggtggactgaggtgaggcccaggagccttctctataggagtcacactgtgcctaagtcactgtggatgagggctggagcaccctcacctagataagacccttgaactcccgtccttggattcagagtcttctggagcccatcacagtgggcatggaaagaagccctgtgtctagggtggcaagcctccttacagctagccacagaggcagggaaaccgctcattagctagtcctgtttctatcactaggcatcacagactggtcccttcgccccaatgctgttgcaatgggcagggagtgctctcacccatgcccccattgcccactgcgcggcttcttcatgcaagtggccagcagccagcttggcagaccccgttccatgtaacaagtactggcttatcactgttccttgtggttggtctttgggttgagccaccgctgagactgtcactgtgcaaacattccttgtgtcccttggcttggccttttcggtgcaggacttctttaggggggttcctccatcccagggtacccttcttatccccaggatcattttgcttcccctccacactctgtttgttcccttgctccttctaagtcatccaagaagacggtgattgttgtgatatggtgatgcctgttctgtgtaatagcccgacgtataagtgctttatatttagtgacccagtgacccatttaatcaccgtggcaaccctgtggagttttaccatgtccatcttatacacgggaaagctgtttagtagctgtcaaaatctgagatttctaaggtggtctcatccccctccccccatttacttatttattttgaaaccaggcttcactgtgtagctctggctgtcctggaactcactttgtagatcaggctgaccgcgaacttgtagagatccccactgcctctgcttctcactgctgaggttaaaggtgtgaatcactacatccagcaaaattttttaaagtgtatatgtgtggcttgtgtgagtatataccatgtgtgtgtgtgtaggtgccctaagaggccggaagaaggcacttggttccctggaattggggttgtgaggctcctgatataggtgctgccaaccaaacttgggtcctttggaagagcagcgagtgttcttaacctctgagcctctccctgggcccctttcttagatttttgatgctgagaaaaatgtggtggctgtgggcaggagcttagatcagggtgtgagggaagcaaggtaggattatggacactgatggagctagaacgtctccacagcattctggagttagcagtcaactggtgtcaagtggcccatctcccgagctctgagctcgctgaccaacctcttccacggtgacccaggtcttcatgttacccacggagctgctcaagactcatagtccataaacaacgaagtcttaagggcctggattttatgggaccctcaccctctgtgatgtgtgggtgtttaaaagtggatcctaaacctgtctcttgaaatactgttagacgtaaagatgaaatgatgctatccgggttcatcctgcagcccttcccccttctcagcctctctctctctcccctctccaccacatggtatctcaggcgtctcctacaattctaagctttatggtttcagaagctgcatgcaacactgttaaaacagggattgagtgaccagggagacagctcagcaagaaatgggcacaaacatggcgaccagagttcaaatccttgcactcacataaaaagctagctggctgtggctgcccaaatggctgtaaccccaatactgtcagataacggagacagggggatgacctgagcttgctggtcaccagccagctccagattcggtgagaagccttgtctctgggtagtaaagcagagagcgatagaggggaacacttgatattttcctctggccttgtttataagcactgatacacatgtgcatgtccaccttatgtacatcacacacacacacacacacacacacacacacacacacctcacttaggtttgaagattttaaatactacttaaagtttgggttttttttgggggggttcttatgtgtatagtatatgtgtattgtacaagttatctgggtgctcatacacacgcatgcgcgagagcacagtgaagaggtcagaggttgatgtcaggtaatcttcctccaatactctctacgttatttgtctgagatagatctatcattgaacccaaagttcactggatggctggccagtgagctgcccctgtctcttctcttcctccccagcaccagggctgcagtctgctacctcagctggctgtgcgtgtgtttcaggatctgaactcaggccctcacgcttgcatggaaggcactttaccaacttagccatcttcccttaaaaattttgatttttcttgtgtgtgtgtgtgtgtgtgtgtgtgtgtgtgtgtaggtgcacacatgccacagcgtgcaaatgtggaggtcagaggacaaccaacttgtgagagttgggtcttcccttccactgtgtgggtcccaagcgttggactcgaggctgtcaggctcggtgggaagcacttaagccgctcagtcatctcattcagtcctaaagtgtttcctttgttactgatttatttattttagctcaggctggcctggaacttgctctatagtcctttctggcctcaaccgcattatcctgctcttgccttcagagtgtgagattatatgtgtgggtcattacatctagcttctgtgtccattctagcttatgttgtcccaaaggtgatgaggagtcattcattcattcattcattcattcagtggtactgggtattgaatcccaggcattgaggatgttagacaagcactccatcactgagctacaaaccaagctcatttcttacgtcttattttagaagacagggcctctctaagatgcccaggctggcctggaactcactgtagctcaggctagtctggaactttggaacctcctccctcagcctctcgagcactaagactgtaggtgtgtatataagtactccccagggcctgctcagccgcggggagatgcgtttggctcagtttcaggtgctggctatgggttcctggcatggcccgattgctgcagccagccatttcaggcgccacaccctgcccttcctgtggggccgctttcccttccttctgctcacttacagcaggagtgcccagagcccgagctgcagatggcatagaaggctcagggactgacttagcaatggatttgtatcagtctcaagtaggtcacaggaagcttagcctggtttctccagggacggcggtcacgtgtcccttcagtcagagatactgctgcagcgtagcctgagtaattgtgactcaggcccgaggtgcccaagtgggaatagactggtgtcccccaccccaccccccaaccccagcagtgagtcaggtcccctccaaagctggctcaacgtgactatggcttggcactttggcaccgtcctcctctgtctgtgttttagaaggcacgagactgtcctcagtgtacatgcagaatccagggagcctggcttctgtgttctttccagtggattcttgcagtgtgtgtatacctcacgagtcagagccagcaagctcgcaatgccggaagtacaccgtgggatattcatagcatggcatattcatgcagtagtacagtgttgaacaaagactgtccttaaagacacgggggtgatgactcataacagacagcagagagcacagccagctccatttccacttattcccacgagtgttcgaaatcacggtgccaggactgaccccagatccatgactccatctgggattttcttgctgttatctaagacaggggttttcactctgtagcccagcttggccttgagctcagggcaatccatctgcctcagactcccaagtgcagggaattctagccatgagccgatgtgtctagcctcatctcatgtctagactgccacgtgggttttgatagtgttacacttcttttggggtttgttcctgggggaccagacaagggtgttgtagttagacgggtgccgtatcatgagcctggagccccgcttgtactttgtgatgtgggtattgacaggtgcagaacgatgtgacctctacacctcggatctgtgaatttttagggggtgttcatctttccttcagtaagtaaagcaaagcacaatggtggtccagccatggagctgcccgaggatttcctaggatttcctggttcatggcctgggaatggccgggtcactcctcctggatagctgagagacggccaaggtgtcatggaagactctctgccaactctcttagtttctgagtttccctccatgcctgcctgaccggtgccgtgacatctgagggttccgttcctttggagggctggaggtgtcccgtgagagcgtggactagctgctacacgtgcacagcatgacccaaagcgagggcaccctcctccaaccccaacctgacgtccctccttcctctgtaccttctagctttttgatcacgtcgctgaatgcctcggagacttcatggagaaaaggaagatcaaggacaagaaattacccgtgggattcacgttttccttcccgtgccgacaatccaaaatagacgaggtatggaggcctcggggagggttggcttcggaagacgcgctcccgtttttccttgctcacgggtgaccccctgcctcctagttttgggatagtttgtcaaagtgatcctgaggttgcggtgccacgtttcttcttccccttccattcttctgtcacccccacctcctgacctcttctgagacagggtctgattgtagcccaggataccctctgggtggtagcctaggatgactttgaactcaatgcccctcctccctttaccttcacagcactgggattatagatgtgcacactggacaagcactctgctggctgagctgtatccccagcctatccctttgctattttttttcctttctattactttagctgatggtgtatttttagagtctaattccttgtagcccccaggtagaaggagccattgatgaagctctcataaatgagcaaggacagggaggtagacgaggcctaacggttgtgggagaggtggggacattcttcgcgggggttgaggtggggttgaggtgcctgcttacctggaagccacagggtgacctggagtctgggcaggtgccatcgtacctcaggaatcaggctgacttctgcctcaagagaggcctggggttcccttgctgagctccccggtgactgacgcgtcaccccatctttctcatttgccgttttgctcatccgtgggtctgtttagcaaggatgagttcagctccgccatgtggtgcacctgtgtcgagagtggcaaagctgtggaataaatagatacagagtgttccttttctgtatggaggaacaaaccccccccacacacacacccatactgcacccgtacccccgccacacatacctgtggaaaaacaaaccccaggaatactaatagtaaacaccgagggccctgccagccccaggctgtgccttcatatgcacttcacagctaacgcacaagctgataagaatcccacttccagatggagagactgaagctgtcctgccgcccaggaaacagcaaggcatgtcttagttagcacacttatcctctttactgcaggacctttgttgatagggtccacactgccgccgctgctgctgctgcctctcatgatgctgttggccgcatgtttgcttgacttgcggaatcagcaggaagggtttggagagcccagtagatccagcccctcatttttaggatggagagcagaggcctccatgggatgacagattattcatgatagaacctggccggagcactgttccaggtctcacctcacatgttaggctccctcctttgagtacctctaaggtgtttctgtcccagactttctccttcaggaacttgggtagtcccagctagacgcccgagatatgcagcagtctttgaagggagggggtatggcagaaggcacatcctcctgtagacaggagcctactgggtggaacaaattcgaggtgactcttaccaactgagaacccctccagggaagggttcaaagctgggaccccccattgcccgattctagaccaattccactattctccgtgtataatatgcccctcagtggaatgagatagccccccaccagaaagtgggcagaagcctggagaaaggactggccacccaagtccctgttcttcccacaataccacgtttgattgtctcactgggggacagaggggaagaaagcaatgtccagggacatttccaaaactggccttagtcacagttgctccagagtgaagaaggattgcagactcaacaagagttcacccccctcctgagcagtatctacatctctcagagtgaggccaggcccctcatctttgtattaaccctccggagactgacagggcctgacatccatcatccccaacctgctgtgtctatggcaaccttcctgactgagaaaagagcaagccaagtacaactgtttgtcatctttttttttttaaaggccatttgtaaaaccaaagtaatacaaaatgtaatgtccaatctaagtcccggcctatgcaccatcccccagggatttaggcttgtcagcatctctccttggctgctctcccagaggactggggttcaattcccagcacccacatgacaactcacaactgactggaactccagttccaggggcgcgatcctacattctcacacagacgtacacgcaggcaaaaccaccaaagaacataaaaaacaataaaccattaaaaggaaaacttgcctcagggaaaccctttaagtggacagacagacagatccggctctatcttcattgtgacctggtaaaggccatttgtcactgagggtgtctgctttgtccctacattcactgccttcaattcacttttccattctccttctcaggccgtactgatcacgtggacaaagcggttcaaagccagtggcgtggaaggggcggatgtggtcaagctgctgaataaagccattaagaagcgaggggtaatttctcttgggttgtgcatagtctggtactgggaggaatctccatctttaaatggtttaagagtcatgttgtcaggtgtgaggggcacggagtgcttaataccctagcagagaacaagaatcctatccgagggagaaagtcagatgtgagctctccgaaatgccatcaaaagatacctagtctgcagcagagaccatccccgtggtcttagagcagccttctgcatgcacccggggggaggggggnnnnnnnnnnnnnnnnnnnnnnnnnnnnnnnnnnnnnnnnnnnnnnnnnnnnnnnnnnnnnnnnnnnnnnnnnnnnnnnnnnnnnnnnnnnnnnnnnnnnnnnnnnnnnnnnnnnnnnnnnnnnnnnnnnnnnnnnnnnnnnnnnnnnnnnnnnnnnnnnnnnnnnnnnnnnnnnnnnnnnnnnnnnnnnnnnnnnnnnnnnnnnnnnnnnnnnnnnnnnnnnnnnnnnnnnnnnnnnnnnnnnnnnnnnntgtaatcactgctgtctaatccaattaattgagtcctggccgcagtgaagccacccatcagcttggttgtgtgagaattggagcatgcctggttgggatttccgcgcccatgtgggagctgatggtgactttctcttccgtatcggttcccaggactatgacgctaacattgtagctgtggtgaatgacacagtggggaccatgatgacctgcggctacgatgaccaacagtgtgaagtcggcctgatcattggtagggtgtcccgccacccagtttaaccccgagcttcttgctttgctcagcccgtcaggtgcccttccttgcctcgtggggtcacagcttcccacattgtctctcccaggcactggcaccaatgcttgctacatggaggaactgcgacacatcgacctggtggaaggcgatgaggggaggatgtgtattaacacggaatggggagcctttggggatgatgggtccctggaagacattcgaacagagtttgacagagagttagaccggggatccctcaaccctgggaaacagctgtgagttaactttaatttctggctacatttctgatttaggaggcattgagcaaaagactgggctagaaaaccaggtagtcacaagccctgtcacccatcagttcctcccccccccccacacacactgggtggaacctagggcctcagcagtgctaggcaaatacgctaccaccaagccacatctccagcctttaaatgcttttattttgaaacaagagtcttactaagtcgcttaggttggtcttgaacttacactccttcaggctttacctgctgggtagctgagataacaggcctgcgctacccttcttcagatgtgcatgactggactgtgcttgcttggtcagatgcctggctgtgaagttcatgccattaaaaggcaagatgccttagcgtgtaaaggctcttagtgtgtatgcccagcaactctggaacccacattaaggtagcaggagagaaccaagacttttgttttctgagacacatacacaatagtagtagtagtagtagtagtagtagtagtagtagtagtagtagtagtagtaacagcataacgataataataagattttttaaaatttagggatgagctatggctatgtggtcaagtgcactgactgctctcccagaggacctggtttcgattcccaacactcacatagcagctcacaaccatgcatagctctagttccagggtgtctgactccattttctgacctccacaggcactaagcacacacttagtacacagataaatagtcaggcaaaaaccccataaatgtacattaatataataattaaagctcttaaataacattctttctgcttaatcaccattcgattgggatgtagctcagttggcagagctacctgccaggcatatccgaggcttcgtccctctcatgggtacagtgatacatgattctgtattcccatcatcagtaggtgataggagagggtcagaaggtcaaggccatcctgtgctcttatagcatgttcaaggacagcctaggctatgtgagacctcatctcaaatgcataaacgaatagcttaggaaccaccagacggaggcaaatgtcttaaccactcagtagccagatttcatggtcacgtgtcctctgtagagccttgaaggaaggccctgtcttactgtcacccagatgagaagactctagggcaatggtaacagaagtgatgtgagccaggcagccaggccctgcttgccttctgccagcttggggcttccagcctagacttcacaggacacctacgacaggagcctgagcagtagccgaacagccaggccacagacggtgctttcctgccagggagcatccactctctggatctgggtgagcctgcctgggccagtcaggaacaataaaagctgtgtttgaaagcaggcttgtgctgtgctgacaggccagggctggatgcttgggagcccagtagcatctttggcttgctggatggctctgcctggaacacgttgttttgctgtgtcactgccaactctgggagtgccagctaaccagccaccctcaagaagaggcctctggtctaccttgcttagaggttccttagggggaacccgaaggttcctgatcagccatactctgaatctgactcaactatggcattaggccccaggagcccctggactgcgtcttctgcctggcgtgggttaatctccgtccacaggctcttctccagtgtttggatacagagaggtagcttcagatatggagtcacaccccagaccacattcactgtgctattggcccatccctgaattcattcagagcacagtgtgtgtgtgtgtgtgtgtgtgtgtgtgtgtgtgtgtgtgtgtgtgtgtgttgtgtgtgtgtgagctgattggttttcatttactcagctcctacccctggccatgagggtgaagctggagatgcagcagagttggtccagcgtctgcctagcactcatgcaggaactctgcagctcacaggaaggaaatgttggagtactgagttggaaccccagtactgtagaagccaggcctcgtagcacacacctctaatcccagccctcagaaagcagagacaggagaatcagagattcatggtcgttcatcctctgctctgtatcaaacttaagagcagccgggctttgtgggaatttgtctcagaaaagaaaggaaaaaaaaatccacaaaaaacaaaccccatcagatgtagagacaagttgatcgtattagctctgacctagttaccagctccagatctcatctcccgcacccctgcagtgaagctctagagctccagagctaaagggaccgagattcgaacccacatccactgttcctgtccttccctgagtggggggtttgacctctctgagctgcagcttcctccagggagaatgacctctgccgatggcaggccaatgcactgaggcccttacctcctgacacctctcatctctgtcttcatcatctctgtcttcaccatcatcagcccccaaggccgtgccccacacttgtacagggactggagagatggctcagcagctaagcttttacggaggtcctgagttcagatcccagaacccacgtcaggcagcttgcaaccgttcttcgtggtcacatatgctctggcacacagacaacgcacaagacatgattaatcatttctaaatatttatcttagtaaaaaaaaaaaccccaaatatacaaatatccccctacccccatagagaacagctttgcccatcttccaaaagaggacatttccttcctgtgagctgcatagttcctggctacctctatccctccatccctgatgggtctatgatgaacagataggaatgacagctctgtcattcagtcatgtggcacatgcctttaatcccagcacttgggaggcaaacgcaggtggatttctgagttcgaggctagcctgatctacatacagagtgagttccaggacaaccagggctacacagagaaaccctatctaacaaacaaacaaagagatgaccctttacacttgtcacccccaatctaactcctaacatttccaggcagccttccttgcatgttcctgcccttcagtgtcctcctgggtggccactctgttcagactgtggagactgggagcttgagagacagacacgggggcgggggtcccctctgttctgctgccccctccttggatgctgacactgattcctgtggcatcgactcctgcaggttcgagaagatggtgagcggcatgtacatgggggagctggtccggctgatcctggtgaagatggccaaggaaagcctcttatttgaagggcgcattactccagagctgctcacgaggggcaagttcaccactagcgacgtagccgccattgaaacgtaggtaccatccagggccttggaaggagggcaggggcctgttacctcttgagatttaaacccaggggtcgggggaggggaggtttcttctcctcatgtgccaggccgcctgggcccttcaggccctcagctgaccactccagctggtctccctgcccacactttctggtacagtcattaagaacagcccagggctctaaagagatggcctcgcacgttcagcccccagcacgcacatggcagctcacaataatctgtctttatttccaggggatgggaactctcccctgaccgcaggtggtaccaggcatatatgaggtgcacacaagacacccacaggtataaaaagaaaaaagttaaaaagaaaagggtttagcacaagtgctttatggataattttgtgtggtttcaaaaacagtcccttctgtcaccctcacacaccatacataaatacacacacacacagcacactacatatgcatcacacatacaaatacacacatcacacagacacacagacacacacacaccctgggtaaaagctgggtccaggcagcagatgactccagtgtcgagcaagggtctgaccaaacctgagcctggattcttagaattcccccttagtgtatcatggcctttcccaaactgtgttctaggaaacctagaggtgtctagtcaacgactggatggttctatgggaaatactagtttataacattcattaattagaacgctaattaatgtgattaacccatcattccccaaacactggttcatagataaagtcagagtttaggcagcatcctgccctctgccctctggcatcccataggatgctcaggagccaccatctcgactctgagaggtgcacagcatggtgcagtctatatgagccccttgctgcgggtggctgctgtgtctcagtgggctctagtcctgcttctggaggcttcccacagccgtggaaggccatcagcagagacagaaagccgtgaggctgctctgtgccaccagtccccacatgcgtcgactgccagtgtgccctctggtcctgggtatttacctccggttggcggagcttcattcacttcggctctgacagtcatatgcacagccatctctgtggctaaagaggctgctgggtggctgagggcttttccccccgatttattctctgcccacactgcgtgttggagtttgttatcgggtcattctccttcggtcccaagattccgtttgtgtgtgtgtgtgtgtgtgtgtgtgtgtgtgtgctgtaacttaactttacagtcattggcgaaaatgagtcaatggcgaaagtgagtcaggaaagtgcctgccttcttcatcttggcctgtttctgccactgggtctttggttactgagaactacaatgccaaaggggtgtgggacagacagatggacagacagacaaacagacctgagaaagatttttaagactaaccatgtataagaacaacagagccatacagtacctctgaatgaaaccaacaaaagatacgcaagactcataggcagaagattagaattttacagacaacattggtacgtttgtgtaagcaactcggaacgctccatggggagaggatcccctcatgttatgttaattaacccccaggtaaaaaaaccagctctttctccacctgctcacaggccacgtgtgcggtctcccctttccaaggcctggcatgaggtacctggcctggtagcattttccaccagccagatctctctcctgcaagaaccccacctcaggcatttcacagagctgcacccacaccaggccgtgccatgggttctgccttccccagctttgcttcccgattctggcactctccacagcctgccgtgagcttgaactcttaaattttgatatcttactctcacccacctcccagggataaggaaggcgttcaaaatgccaaggaaatcttgacccgcctgggagtggagccgtctcacgatgactgcgtatcggtccagcacgtatgcacgatcgtctccttccgatcagccaacctggtggctgccacgctcggtgccatcttgaaccgcctgcgggacaataagggcacgcccaggctgcggaccacagttggcgtagacggttctctctacaagatgcacccacagtgagtcctccgtgcattaatccccccatctgaggccaaggccctctccagaaggcagacttgcgtgctcagggtacggtttgggaagaaacacctgggaaacaaggctaagagttgctcatcttggacgcctcactccagcgccttctcacatgttgcttctgcagtccgctttggtctcttatctcccaaggcgagacagaagtttcttcagacaggaacgtgaggtgtagtgtccctacagctaggttgcattgtatccgtttaccctgttagaactggaacttggtcataggtattcctcattttttttggtgattgttaattgttgttgttgttgagacagtgtctgatgtagcccaggctggccccaaacctgctgtatagcagaggttggctttgaactcctgatcttctggcctctgcctccaggtgtgtgctgccatgaccggtcgcatccattgtttcagaagcttccgatataatccgtcagcctcagacattgctgcttcaaatgggcccatgtcggctcttgccgtctgagagccagagatagcgtcatcatgaggggtctttacagactgggacaggcttctctactgagctgccttccttttttatttttattttttttgagagagggtttctctgtatagccctggctgtcctggaactcactttgtagaccaggctggcctcgaactcaaaaatccgcctgcctctgcctcccaagtgctgggctgccttcttgcttgctcatggtgttggcccttccaagcttcagaaagtctccccggccattgacaaagtgactgaaacttctgaaatgaaagcaaatcctgagtctttgctgaggtttaacgatctctgaccatggcactgggttttgtgtgagtgcaagaccgaagctcgtatttgcagattctcagccttcacactgggacacttgcacaaatacatgcattgaagtagttcctggatgccaaggggctagcagtaggctagctgggtgatgccagcttccaagttcacagttttgtgtgtgtgtgtatgagtgtataataaatatatgtatatatgtacatatatacatatatattatatattatttatatatattaaatatatacacatatatatttaaaagatacttgaaagagaaaattaaccattcctttctttatccttcccctttctttttggtccccttaagaagcaaagtctcattatgttggccaagctgtccctgaaacttgtaggcttcaagtaatccttttgcctcagctgtcgagtagctgggaccacgggtctatgcaactgcatgcagctttttctgtggaattcttggctattttttttttccgacaagaaagcctaaaggtgtataatatcatattaaaactggtgtaactagtgaggcccttgtctaaaaaatccaagcaaaacaaaacatctctaggcggtaaatcaaatacacacgacaccagctctatcaccatagcgagtcctcaggatacagtctggtggtgttagggtcatccatgctccaaaactacttctcttctgtttgcaccttcaccttcttttaagaacttattattttacgtgcattagtgttttgcctacacacttgtctgttgaatctcctggaaccgtagttacgggtggttgctgggaattgaactcaggacctctggaagagcaccatgtgctcttaaccactgagccatctctccagcgcccacaccttcacattttaaagagtaactctgacccggggtgactgctcagtcaggaaagtgcaggttatacaagttggaacacgggatgcacttccctagaacccaagacaagtgtaacagcgtgcacctgtaatcccgggggagggtagatctctggggcctgctggccagcaagtctagcctgttggggagccctagattcaggagagaccctatctttaaaaataaggtgtggcgcgattaagaaagatgcctgatattaaccgtgtcctccacgcctgtgctcacatgtgagctcatgtatgtataccttactcatgtgcacccatccaggagcgtgcgcatgctcaaaaacaaagaataactcggaacaggtgtttcctcatttcagaattactagaaattcgaggccattttcaagagtttcaaaaagaatagaagccattcttgacccgtcccttggaggcagtgactgttggtcttttggggaaatggcttttcctgtttcctttggcctgtggccatccataatgtagaccacaggctctgtctcacactggcctaagcttttcttctagaaaagaggaagatccaaatgaaaaacaaacaaacaaaaaaagcgaagtaaacaaaaccacacaaaaaaggttattgagcctggctccttcattcatgtgtggttcctcactaaacccattcatttcccagccccaccctcagccagactctggtcttcctggagtccaaggtcagtactggctcaaggtcacttgcctcagcatttgcccttgtccttgggtctgactctgaagtgcttgcctctggcccctgtggtacagggctgtaatatagccttgatagaccccctttttgatcatttgaagcaaagtctctctccctctctctctctctctctctctctctctctcattctctctcctaattggttatttttatctatttacatttcagatgttgtccccacttccccctccgaaagcacccccccccatatctcccctcccttgagcaaagtcttgctatgcagctcctgctggcttagaactgactctgtagcccaggttggtctggagttagcaagtgattctgcctcacacaaagatggtttgggccctcgaattttttttttttttttttagatattttctttttatacatttcaaatgctatcctgaaagttccctataccctcccctacccacccgctcccacttcttggccctggcgttcccctatactggggcatataaagtttgcaagaccaaggggcctctcttcccagtgatggccgactaggccatcttctgctacatatgcagctagagacatgagctctgggggtactggttagttcatattgttgttccacctatagggttgcagactccttcagctccttgggtgctttctctagctcctccattgggggccctgtgttccatcctatagatgactgtgagcatccacttctgtatttgccaggcactggcatagcctcatacgaggctgctatatcagggtcccttcctctctttttttgttgttattgttataagcagttttaggtaatttttttttttttgtatttcatgcattgtttctatggcatgtacatagaggctgcataagcaaagagcagtagcagaatggaatcaaagcgttctgacaggagagttcgaacctggcccaagtatgtagcctggtccagcccttgtggctcacccactgccaccttctccctcaggtattcccggcggttccacaagaccctgaggcgcctggtgcctgactcggacgtccggttcctcctctcggagagtggcagtggcaagggagccgccatggtgaccgctgtggcctaccgcctggccgagcagcaccggcagattgaggaaaccctgtcccacttccgcctcagcaagcaggcactgatggaggtgaagaagaagctgcggtcagagatggaaatggggctgagaaaggagaccaacagcagagctacggtcaaaatgctgccttcttatgttcggagcatcccagatgggactggtgagggcttgttggggctgccacacctctatcccaggaagagggtggggtagagatggggttggataagggacatattagaaccctcttgaggatgctgttggattggccatgtctagttttacaagagctggaatcttacccaacccagtgcagtttgtgtgtgtgtgtgtgtgtgtgtgtgtgtgtgtgtgtgtgtgtgtgtgtgtgtgtgtgtttggggacttagagcacttcagttttcctagtgggacttcccaggctggtgctctttgtaaaaccgtgttagaaatggaaaatgggaagcttgcagggcagtacacacctgtactctgagcactcaggaggctctagagttgaaggccagcctcagctacattgtgagttcgaggccagcctgggctacatgagatgaaacaacagaagaattcacatggtcctcatcttttaagtagtgtcagggtatgtgtgacctggggctttgtatacctgggctggtcggagaagcatccgcgaccctcactgagcctagctccatggtgacactgaagagattcttaggtggagcctcagaataccaactgtctgggatagaagacacaccttcacctccatgagccgctgcttggtgaggcagaagtggaccagggatttctcaattttagtgctataaaccaaccactgttcagtgggtcagtgggtcagctgtgggattctgctaatccaggccagggtctgctgacctctgctgggggtcagctgagaagccaccctctcagtctttactatatacccgatatagctggccttgggtttcccacccatgggtcactgtgctctgctgctggacagaagcagaatctggaggccgaggccagggctggcccagctttgcctatgccacttccctttgggttccagaatccaaaaagaagagaagcaggttcttccattgttttcaatgacaagagccataggtccaagctgaatgggggcgcacgcacctttaatcccagcactcgggaggcaggcagaggcgggcagaggcaggcagatctctgagttcaaagtcagaatgagttcctgggacagccacagctacacagaccctgtctcaaaacaataacaatagcaacaataacaacaaaaacaaccatacacccacattgcaaagagggaggggaggctgtgatcatttttagattcatacattgatacaaattatgcatttttatatgagggtcactaaaatgaaggtacggttgtcaggcttttaagtgacagtgaagttcattgtgcctagtggttcccttctggggccaccattctgatgccagcccagcttgtgactcagagcctagaccgtgctgtataccacaggaaccattcatttacagtcatctccgtaatgccggagggggccggtctggggggttactggccactaagatgcacgcagccgtttgaggctttttctctgtgttcttcccggtgacagagcatggtgacttcctggccttggatctcggaggaacgaatttccgagtcctactggtaaagatccgtagtgggaaaaagagaacagtggagatgcacaacaagatctactccattcccctggaaatcatgcagggcaccggggatgaggtaaggtgggcccggcgcatgcaggcctgtgcagggtgaatcccacacctggccaatgatggcactggtggtcatgagataacccgtgtctgccacataacattgtagctgtgcccctaaagcatcagaccctttgagcccgtgatactccagtgactggggagttcctaaagaaaactgtttatgtgtgtgtgtgtgtgtgtgtgtgtgtgtgtgtgtttgtgtgtgtgtgtgtgtgtgtgtacatgctaaaattgtgaaaccaaagagagcccggctagtccatcccttttctcttccagctgtttgatcacattgtctcctgcatctccgacttcctggactacatggggatcaaaggcccccggatgcctctgggcttcaccttctcgtttccctgcaagcagacgagcctagattgcgtgagtgtctttcctgtggacctgacagtgttgagttcctttggctagggtttccttcgacctcgcgggtatccctggatgtctgggacagccttacatgtctcatgggtccctctctccagaatgtccctaagacctgtactcttgagccgttgtttgctaggtggcagcggcagtgcacacctttaatcccagcacttgggaggcagaggcaggctgatttctgagtttgaagccagcctggcctacagagtgagttctaggacagccagggctacacagagaaactctgtctcaagaagccgaaacaaacaaaaacactggagccatgacttttgagaacccctggggcctccgggcacaaagaataactttcagtatagagctttgcacgcgtcttaggagctcgccaggtctttgcttctttcgttcctcctcaaccccattttccctccactcccttatcccaggccaccttccaacttgctctgtagccacagccttctcttctgacaccactgcgtcctcctccacaccgggggtttttgtgtactggggagtggcacctaaagctttgcccatgctaggcaagcactctgccagctagctacatcctcaagcccttggcagctttccttgtggctgctagtacagcaaggtgctggatgcctataggccctggggcagtgccctgttagaacagacctgtagtaaatgcttgctcaatctatgggatgaaaagggtcccagatgggcgtggctctcccccactgctggaactaaggtgtgggtacaggtggaaggtttctgttagggttcaacacaggacaagtctcactctgtagctgtggctcctcccacacttttcttccaacccctaccctgaacctcctgggggctgggcttctgctccccaccccccctcgccctgatttctatatttctcagtccttttggttatactaggctccttttttggatggtgactcctctcttgctctccctccctgtctcttttcttggtcctgcctaagtcaacttgccatgtttagcctgggctccttcctctgcctgctttctccctgtgtctactataaaaatcgtctccacactttcggagtaggcatatatccttctcctcttatttcttgtttctttttttttccatccatttacaatctctgtccttaggggtttcctatggcagtgccagagtcagaggcacgtaccagcactctgccactgtgcgggaagggccaggcctgggtgggcatactgtgtgcagagagcgagaaggtgatgctgagtcactgagggaggagccagcctgtctggaagatctgcaggcagccctgcatggcgcaagtggagacacggccagggaggggcccgaggggatggtttaagggctgattggcagccccgggagagctaagtaaggtggtgtcaacagaaaagctccaacctaaggaggttgtctacagccatgaaaacagggattgaataattccagacaagcaacatcaaaaggagggaagtgcatgcacacacacacacacacacacacacacacgcacacacacacaccaatatcatggacacatagacacggcacacagacacatacatctaacatcagttgactctctctaaacatttttttaaaggctggggcttatgttgcccaggctgggaatctgtcacacagattccttgtgtggccaaggatggcccatcatttctaatcctcctgcctcttcctcccatgggttgggattctgagtgcctactatcacacctgatttgtgcagtgctggagatcaaagccagggctctgtgttctctgggcaaaccctctaccaactgagctacatctctgctcctaaactcttgtttattgcaggtctgattttttttttataagatctcattatatagctcaggctagcctaaaacttaacttaagtaccccaggctggtcttgaactaacagatgatttcttgcttcagtctctcaagtgctgagattccaggtatgaaacagatgcacacgcacacttgtggcattttcccccagcagtgtataacttcagacctgtgaagcctaaagtcggcctataaagtaacactgttactgaatttttgcattcctttaaataagccaaccttatgtgcctccatttctccatctgtgaagtgggtttagaaagcagatgtctgtgaagatggtgggaggggccagcccacaggattccactcttgctttacagcctctgtggttattgcccgggaggtagggtgtcacattctcctgactgaaaagtgacctgaaggttactcacctaaactctttgggtgcctttcctgttttagggaatcttgatcacgtggacaaagggattcaaagccaccgactgtgtgggtcacgatgtagccactttactgagggatgctgtaaaaaggagagaggtaacttaatccttttaagataatttttgccttgcgtggggcgggggagggtacaaaaattaagcttgctttttttgtgaagaattggaacaccacaggagcatgcgatttggaagtgtccctgtccccacgcccgccccagtcactgccaggcggtcaagtgacatttgtcagttttgtatcattaagggatggtaatatgggctggtgagctggcttgacagcctgccaccaagcccgagggcctgagtttagtttctaggacccatgtggtggagtgagagaatcctttcctgtggtttatcatttgacctacacacatgtgctgtgtgtgtgtgtgtgtgtgtgtgtgtgtgtgtgtgtgcacatgtgaaaaggatggtacacccaaagagaggtaaaatcatgactcatagggatggaacaatggaaagttcctgagggcccatacagccgggaactgccaggcatttcagagtgcaagcaccgtcgggcatggatggccctgttggctggaatagacttatagacagtattgctactctgtgtcaagttatcgaactcagtcaggaaaccaaccctgcttcccagaagtgtccagtccacagcctggactagccggattcaagccaggcccagctgacccttccctacatccctgtccccttcttttcaaaggaatttgacctggatgtggtggctgtggtcaacgacaccgtgggcaccatgatgacttgtgcttatgaagaaccttcttgtgagattggactcatcgtgggtaagtaccgtaaaagggtctcttctccaggaaggggatgttggcgttccctctgtggtacaaacccaacagctcagtctttagtgggggaatggttgatcttgggtaccatttttacctcctctagaattctgtataaaggcaggctacaccccagcatgctacaaatccgttaggattggaccgtcagtcaggaagctctctaggaatgaggcacaaaaaaaagctcatgtgtcctgggtagatggagtggggtgcctggaaccagaccatgcgcaagagcctcagagctgcaaactcaagggctaaaaaggaagtagagaccatctccactcctgaccatgtttaacttggaagggccactgtgctcctggggaccattcatcgtctgtagccactgtctaagtgaccccaaccctgtaggttgtcgtcttgtgaggtctacacctcaagaggattaaactgtatgtgtgtgtgccacacagtgcctatggaggtccaagagcaaccatggatgttggatgttggtcctcacctccacctgctgatataataaaatagcctaacagaagcaacctaggggagaaagggtttattctggctgccggttccaggttacaaataggcaagaacttgagacaactagtcacattatagagtagaaagaaatgaatgtacagattcacttatgctcaacttgatttttcccccctcttacccagttaggacccttgcctaggggatggtgctgcccacagtgggctgggtcttcaattcacataagatgctctttccacccaatgcagacagtccctcattgagactctcttcccagggtgattctaagttgtgtcaggttgacagttcacgttaaccactgcactccccaaacactttctcagtcactaatacctgcaagcacttataggacatcttgaaatgtcactgccgcctcaagatcatttccagcatctgaagatcaggatgctactcacacaggctgccctctgtactggggaaagcctttgtatttgttattaagctacttgaaacaactgttgaaatagaaaatcaggaagcacatctatctgaaaggtatttggcttctgccccagagattttatacctttcttccttttggcaaagcattcaccaccgagccttgcccagcccagccttttgcctgtggatgggcgtaggtgagacctgcaaacccagcgtgactgggcatattctcttagaggccaggcctcaccttcctgccctatgaggggagctggtgccaggattcagccagctttttcttgcctccatcaaccgacctctttgtttaaaattcttatggccagggaatacagtttacatatattggctttctttgtgtcttctatttccagggctcctttttttcctccttgtttgtactttgggtagaagggaacagagaaaccagaaacaatccagtggtaggggagggtggggagccattcccttgaatggagggaaagctcactcatatccctgcaggtcttgttacagtgtcagaagtggttgcctggttgctgagaaggctttattgtagaggtgagggagacttcagccagaggcatctggaaggggccagactgaacagggctagcagaagacactgggccaggagagcagaagtggagggggttgggggagagccannnnnnnnnnnnnnnnnnnnnnnnnnnnnnnnnnnnnnnnnnnnnnnnnnnnnnnnnnnnnnnnnnnnnnnnnnnnnnnnnnnnnnnnnnnnnnnnnnnnnnnnnnnnnnnnnnnnnnnnnnnnnnngtagggggcggggtgagaagtgtgggaggagccacgggtactgggtgagacttgtcctgggtttctctgagacctagcaaagatcttcatgagtgcaggctccagggcatctgtgggaatgcccccttgattgagttttcagtctatgcagtaggacaagctcagtgaccacaagccagaggtcacgacgttaaaactgccgtatgctaggctgggaacggggacctcagtggactgtgtggcagggctagcagccgggatctcagtggctaaaggtgcctgcttccaagcctcctggcctgagcccagaccccaggttcactgcacagtagaggaacagaactgaactcccctgcaaggtgaattctgattccatacaccacagttttaaaataactagtctgctatgaaaatgtacctcccattttgtgtccacagccccttgtgggctaaaacagcaccaaccggtgctccttcccagtcttaggggatactgtgtaagatatgctctagggaggttaaacatggaaaccagaggcttcctgggagccacacgccacccagaggaattctccttgtcttagaagcagcagatctcctatggtgtcagtgtattgtctggctttatgttttatgtcaatttgacacaggctagaggcatcagaggacggaacctcaactgagaaaatgcctctggtaagatgggctgcagtcaggcctctagggcattttcttaaccagtgattgatgcaggaagggcccagcccgttgtgagtggtgccatccctgggctggtggccctgggttctataagaaatcaggctgagcaaaccatggggaacaagctagtaagcagcatccctccatggcctctgcatcagctcctgcctccaggttcctgccctgtctgagttactgtcccgagttccctcagtgatgaacagcgatggggaagcataagccaaataaaccctttcttcaccaagttgctttggtgttggtggtttcagcacagcagtggtaaccctgactacaacagtctgtggtaccagcaaggagccgcttgctcagcaaggcaaggagcccctgagcagaaaggtgggaaagtcccagcacttccaagcttgctgactagatgtagtcacaagaagtgaatgagcaaccaggcgatgtggtgcacgcctttaatcccagcacttgagaggcagaggcaggcggatttctgagttcgaggccagcctggtctacaaagtnnnnnnnnnnnnnnnnnnnnnnctgtgtgtgtgtgtgtgtgtgtgtgtgtgtgtgtgtgtgcgcgcacacgtgcgagcacaagcgctgctcatttgcttcttgtgactacatctagtcagcaagcttcaaagtgctgggactttcccacctttctgctcagcggctcgttgccttgctggtaccacagactgtcgtgcacgcgtgtagcaatacattcctctgttgtaagagcgtatagcaacataaatatagccctgcacaggccaacaggttaggctttaggcaaaatggtggacacttgaggattgctgcaagttcaaggccaacctagtcaacatagtaagtacccagccggctagggtttgttttaaagatcaaccaacccacccctctttgtcgtttacctcagatttgccatttaaacgtaagtacccagatacaatggaaaaaccaaatgttttgtttgttttcaagaaatacacccagctggacggtagtggtccatgcctttaatcccagcatttgggggctgggggtggggggggagcggggcagaagcaggtggatctctgtgagtttgagtccagcttagtctacaaatcaagttccaggacagccaaggctacacagagaaaccttgtctcaaaaacaatcaacaaaaacaacaaaaaacaaccaaaactctatagggctggagagatggctcagtggttatgagcgttggctgctcttccagaggaccagagttcaattcccagcaacctcatggcagctcacaactgtctgtaactcaaattccagtgaatccaacctgcttacccagacatagcgcaaacaccaaatgtacattttaaaggtcggggagggagggagggagggagagagnnnnnnnnnnnnnnnnnnnnnnnnnnnnnnnnnnnnnnnnnnnnnnnnnnnnnnnnnnnnnnnnnnnnnnnnnnnnnnnnnnnnnnnnnnnnnnnnnnnnnnnnnnnnnnnnnnnnnnnnnnnnnnnnnnncacacctttaatcccagcactcgggaggcagaggcaggtagatctctgaattttcggccagcctggtctacagagtgaattccaggacagctaaagctatacagagaagccctatctcataaaccaaacataaatatatgtatgcatatatgcacacatatataatgtatgtgtatgtatgtatgtatgtatgtatgtatgtatgtatgtatacctcacccatatacacactggtgagggctggggatgtagttcagttgatagaatgcaagtaactcagtccctttttgccaaggatcaaggatcattgtggaagacggggcagatggttataagagccagaggtggttggctagtctaaaaaaaaaggatctttgcacacatgacagggcagttgcacacatgaaatcggaggctctgactgcaggcagatcctgtgcaagatcaaggcagacaagatcccagcatagtcgaggggcaggagggtcacgatcccaccactagctgaggagctattggccggcactgcacctgatggctgctggggggacgagagtcagggtttcagttttctctggagatggggaccctgagaaaacctccctgtgctccagtaccgggtcctagcccacatgcaggcagcatcagctgtgctcagtgggcgtgtttagatggcaccacagagagttgagagggaaaaagtgatagaggatgggggagggactggaagagagggggtatacttaatccaaatctgtgtgtgtatgacaactaatttaaaaattgtaagcaacccttgccctgcgcatcagagctcccggtgtgaagcccccctaccccaccatgtgttcatctccccgtatgaagccccccagatatgaagggtgtgaggacccttcctgagtgcgaagcctctcccccagtgtgaaccccaggtgtgaagcccctggtgccagccccatcatttccttctgtccccatgttttagggactggcagcaatgcctgctacatggaggagatgaaaaacgtggagatggtggaggggaaccagggccagatgtgcatcaatatggaatggggtgcctttggtgacaacggctgtctggacgacatcagaacagacttcgacaaagtggtggacgaatattctctaaacagtgggaaacaaaggtaatcagcctgttgggtgcccgtgagtgggttggctggattctatggctgcacaggggcttggaagcccatccctttgttataagtgggtttttgattcctggtatggggtaggattattcctagaagtgactgtgacagtggacatgctgcctagtttgccctttggggactgaaggagtttagccatgcctcaaaggtctcttacctttgaggacttcagtgggtgaggtagactctcttctcactacaagatcctgcgcccccttgtggctgctcaaagttttgcaactcaggtcatgttggttctgaaagaacagtagccacttagcaatgaggtgaccgttccagtcttccagtacggttcttattcattggcatagcctggacgagatgatctgagttatgtcctttggaaaataaattggcttcagtttaatcttgaaagtgttggggctcaccagacttgccccatgctgttaaccacaaaaccatcaaaagccaaccaaccaaccaaccaaccaaccaaaaccatcaatatatgaatacaaaaaccaaagaactttctctctgtccatttaagactccactgagatattttttgcttagtctggaactgctgagggcgttgtactgtgctgggctggggtctaggcaaggcactcgttccccgtcttctcaggaccaggagtcactgtggtggtggcaagagagagagagagagaagggagccttgtgtgtgctctgtagaagggtgaggtgagagagagcctgggcctggaagagtgacagtctggggtgaccctctctggggtgtggctcatggctgagagcggagtggaatggaccaggcaaagacaaccaacgaggccacctagcacggctttctgtgactgcagggggcatcagtgtggggagggtagagggcttcttagcccctgtcagcatgctcggggaggcacaggacaggtatgtgaccgagatcatacccttggctggccgtcataggtccggagtggctgttggtcccagggcgagtggtccttctgctcagtgccctcccttcctctccactcaggtttgagaagatgatcagtggaatgtacctgggtgagatcgtccgtaacatcctgattgacttcaccaagaaaggcttcctcttccggggacagatctctgagccactcaagacccgaggcatcttcgagaccaagtttctctctcagatcgagaggtgagcagggaggggaggagtttctgagcaccattttgctttcggcgaactccaaactcgtgtcgagagtacttcacttcgcagagtatttttgaggctcatccactttgggtcctccctttttagggctgagtaatattccattggatggacctatcacgttttgttttcccgcatctgctactgtctggcagcttgggtggttcccttaaatgactctctgaacatgggggggggggttggggagtaaacatctgtttggtccctgctgtcgtgtctcttatgtatatactcacaagtggactggctgggacctgtggtaattcccttttcagtttcctgaggaaccaccatattgttttcccaaacggccactcccatttgccatccccagcatcctcacgtaagctgccagtttctaacagcttaatggcaaagacagaacaaaccagagctccataggttctgtaaggccttttaaagattggtattggggggggggcgacaaatagtacactgagaaaaacatttgctttgcgtgtgacaagaggcagaagcatggtgggggctggggacgcagatcccaacagttccgaccccgtgagcctccctaccctcgactgtgcttccaagaatgcctaagttttccatttcctcctcttgggcatgatgaaagcttgacgtaagggttacaggccagaggatctggagttataggcccaactcatctacgtggtgaatttggggctagccttggctatttgagatcttgtagtgacttcgtacatgcagtgtgtgtacaattgcacacacacaagtctttgagaaaggctagccagtcttatctcagctctttcaatttactaggagaagggaaagtcctggggtacactaggtcgctcatatgacccttaagggaacaaacgtcatcttggctgacgtagaataatgcaaattaagccaaggtgtggtgacaaagggcattaaaaaattacttcgtgtgtgtgtgtgtgtgtgtgtgtgtgtgtgtgtgtgtgacatgtgtcagtcagaggtttcctttctcctggctaagagagaaggccgatccctcggctagcctctcctcttgctgtaggggtgcttctggcatcagatttagttcattggactttcataaccagtgctgtccccactgagccacctcccagccctgctgttgtccttaggaaattatagtttcaaagtgatctcttctagctgggcggcgaggtgaggcgggaagccggtgagcctctaggtcaccttggacagccctctctctccaacagaagaggaagaagagggggagaaaagaatgtaatggcattccctggggtcactgggattaggaaaagttttaaaatttttcagctttaatttctgtagtctagcatgtggtacacgcctctaatcccagcactctggaggcagaagcaggcagatcaatgagatccaggccagcctggactacagagtaagttccaggacagccagggctacacagaggaaccctgtcataaaaaacaccaccaccaccaccaaaaaccaaaacagtcttcagtcttcctaatgctgcaaccctttaatacagtccctcatgttgtggtgacccccccaaccataaaattattttcattgctccctcaaaactgtaattttgctactgttatgaatcatagggtaaatacctgtgtttactgatggttttaagtgacacccatggaagggtcattagacttccaaggagtcacaatccacggggttaagaatcactggtttagnnnnnnnnnnnnnnnnnnnnaaaaaaaaaaaaaaaaacaaaacaaaacaaaaaaaaaaaagaatcactggtttagggctggcgagatggctcagcgggtaagagcactgactgctcttccaaaggtcctgagttcaattcccagcaaccacatggtggctcacaaccatctgtagtgagatctgacgccctcttctggggtgtctgaagacagctgcagtgtacttatgtataataataaataaatcttaaaaaaagaaaaagaaaaagagccactggtttgaatcggtgagccagagagattattgctcattggttaagagcactcacagctcttgcggagagcctgagtttggttcctagcacttcattcaggctgctcacagccacctgtacctcgagctccaggggatctgacacctctggctgccgcaggaacctgtaactcatgcacacagacatacacaattagaagccgaagacaggagagatggctctcaccccttctgaagttcacagtgtgattgtcagctcgcacaatcaggcaagtcacagcttcatatagctccagatccaggggatctgacaccctcctctggcctctatgggtacctgtggcgtatacatagacacacctacctacaaatgtgtgtgtgtgtgtgtattcttttaatttaatctatttagaaggggaataaacccctgggatgccattcatagacaagcagaatgctttggaccggtccttgttccaagggttccatgggcctgctccatccagctcactgggcttttgtgctccacagtgaccgattagcgctgctccaggtgcgggccatccttcagcagctgggtctaaacagcacgtgcgacgacagtatcctggtcaagaccgtgtgtggggtggtgtccaagcgggcggcccagctgtgtggtgccggcatggccgccgtggtggaaaagatccgagagaacagaggcctagaccacctgaatgtaaccgtgggcgtggacgggacgctctacaaactccatccacagtgagtgtggcttcctctcttggctggggagttggttgagggtcacagggtgtcggcacagttcctcacggaggcatagtagcctggggcatttggagacaggagcctgagacggtgagtagccctagtactttggggagccagaggagggcttcagctgggccagcctgcaggagtgaaactctccctgcttccctttggccctctgaggtgtgtgtatgtttgtgctataagtgtgtgcactggccagctgtgcttggtaaaaggaaattcagaacgaggcagaacaggagcagggtaggcccgggctctgtggcagggagaaatgtttttatcagaatcataagccctgtacttgagcccgctcaaagctagggtcttagggacagtgaccacatctgaacagaaaccctgtgcattggttagcattctatagaggaagggacctgacagaatgaatctatattcaaagtagatccatcattccagctagtccaacaatggctgcctcccaacagaaaggccaagaatcttatagttgttcaatccatgaggctggacgtcttctgtctgcattggaatcccgaagtagtcatcttgggtatcagtgagaagggatgcccccgcaacagggtagatgagcttgccaatgggagtgagggcaggaaacaggcaaaaaagcaaaagcttccttgcatgtatgtccttttctgtgagctgtcaccagaaggttggcccagatttagggcactcttctccgccccttcaaatcatccaggcaagaaaaatcccacacaggtgtgccctgaatgcttggattttagttaattccagatgcagtcaagttgacagccaaaattagcaaccacacccccttaccagtaagaagaacactattagctaccagacaccatctcagccaaaccgggctacagtctgacccagtgccccggagacatttacccatttaccttgtggctatggtgtggagctatcacttagaagctgtgcccatcaggaacgtggctcagtgggttgagcacttgcctctatgcatgaagctctggattctccccgaagtacaacataagccaggcatctgagagagttaagctactctggactgccatacttcatagattccagctcctgactggactagaaattatgtgaatcgagtatcatgtatcagtcttagccatgttatgacagtttttttatacagtttttttgttgttgtgtatttttgaggcagagtcatgtagctcaggctagcctcaaactttatatataactgtgggacaccttgaatgcatggtcttccttgcctccacctccctagttctgggactcagattcagcggcctgggcctcctgcatgctgaggcaggcgctctaccagctgagtgagctgtgtttgcaggcccccgctcaccctttctctagcacatcttcctaatttcagtcaacccccggttctcgagcctcatcttcctcctctgaccttctccccacgtctttcgcctttgcagcttctccagaatcatgcaccaaacagtgaaggaactgtcaccaaagtgtaccgtgtccttcctcctgtctgaagacggcagcggcaagggggccgcccttatcacagctgtgggcgtgcggctcagaggagaccctacgaacgcctaagagccaggatcctcccagcccccagcccgccacccttccagcactcctctctagaaccgacgaccacacaccgcccccgtgttccacccagcaagctccgctgggagacccagcgccggcacccactctgccgcagagggaggaaggggactgcagtaacggagcatcacatagaataccacccggagcgcgtgctgttgatgatctgatctctcgcctggacccctcatccctgccctgccactttgcatgattcaagttcgacctggccatgcattgcccaagcgtgaacgtagtggcacccacgtctaccgcaggcgtccagccaggaaagagcgacccccctcttggactgtcttctgggcccttccaagcccatctgtggagtcgcctccctccttccccccacccccgtgtgaagtgtgttatcaccagcagacactgccggactcctgcccacaggggcgtggcctgaagggcgagtgtgaacatggcactgctgttcccttccccctccctgcacccgccgcagcctgccatcccatttggatgtatcaatgccactgagttgtctgtccgtccgtggagccagtcctagccacattattgacagtcttgcattttgttttgtctcgtgatggtggtggtggtaggggtacgcttaggtgggcagtcctgtggggaaaacatcttgtctccatcttgctaggaagaaccaacccacaaaacaacgccatcactggaatctcccatcgctttagtgagccattgtcgtatgtctagtaaactttgtactgattcaaaagtcggagtggtgtttccttggggtgggggcaagggcttagcatatggtgacagccacgctaggggctttatggactcctgggtggggagaaagcttcaaagctccccaggtatgcctatagtcccagcacttgggaaatggaggagtgagttcaagtccctccttggctacatagtttcaggcaggcctatccaacatgtgagcccatcccaaatgaaatgaagcaataaaaataaatctccagtccccagagttggttcagacaagggcttctttatttcaaaacatcacacagtcgcctttggcctgacctgatgtcccagcacctgtcatgtgcttccatcctaagccccagcctcacggcctggaaatggttgtctgtgctctttacttgtttgggagcagtgaacttgaccttctggggcttactgggttagtgagaagacaatacagccttgtgtaacaagggtgttggagagctgtccaggggttttcaaggtctgtctggcttgggtattctgaagagctgctgggccctagcccttctccctgttggtcctttttagttatccaccctcacgccttccccctggcaatgttttctgggaactagaagctgccatttcagggagcccgcctttcctttccctgcctatctatgttcctctaagaccctttcagtccatccttctcagagactggcagatgctgagaagggacaggttagaggggaatggactctgtgtgtgggtatgtgacagagagacaggcaggcaggcaggcagacagaatactctcatgagacagagttctgaagttagttcaggggaggctacagtaaaattccgagagagaccatcccactcggtggcctacaggtgaacaaaaactctagttgatgatggtgaagggaacagaactcgccagttgtgcaaagccaggaatccatattctttggaagatcattacccagaggaacaccctcagttgccttttgtgatggtttctatatgctcggcactatttggaggtgtggccctgatgtaggcatgggctttaagaccctcaccccagctgtctggaagtcagtattcttctagcagccttcagatgaagatgtagaactctcagctcctcctgcaccatgcctgcctggatgctgccatgctcccaccttgatgataatggactgaacctctaaacttgtaagccagccccaattaaatgttgtccttataagagttgtctcggtcatgctatctgtttacagcagtaaaaccctaactaagacacctgtctagctgtccttggggcattccttcaggaagttccctggctgtccacagagatagcatgccctcaagataccatgcccgctccttggacaatgctcattaacagcttattaacaagtccatatgttgtgtgtcctttttcctttccctgtcctggtcaagtttacaatacactgaggtttttagtctggaacaactggtctaggatctcactggctcagccaccagattctgcaaaaggatttttggtttttgctgattttttttttttaaagacagggtctcatcatgtggttctggttgtctagatttcattctgtagaccagactggcctcgaactcacagaactgcctctgcctctgcctctgcctctcgagtagttggattaaagaaataactctgcaatggcttgtacaattctctatgaatatctgactgtcagggagtctccttttggagacctccaagagctctggtattgcatcaacatgtgttccaacagccttctttaatctctggagaaaggtaatataagattcattttctccctggtaaatggccatcagctgagagtaactaagatttggtcttggctttcctgaagtccccagaaatacaataaagtgcttcttctcccagtaacctatggtgtcgatgacattcctggatgaagctcttaaagggacatcctgggctcctgtaggaacttgggtctgtgagtcttggaataagaagccaccatctcagagagctatccatgttcctctgagtccaaccccttctcactgtgtcctcccccttcccctacccccatctcctcagcctctggacgagatgagggcacaccctttacacattccagctcatgaatgtgggggcagtccaaagagacaaagtgactgctggggcccctctccacactgtagaaccttagccctgcctggaccatttgcctatactagctctgcagttaggggttcatccccaccctttggtggatttcccaaaactctatgatgtcccggtcactactgcagctctaagtgacataagagccctttattgggggtactggcaccgtgaactctaggagaactcagatgacattaagctttgaacacatgtttacagcttatttggttttcagagggcactgggcaggcagcaaatgagtcaccatttgctggggaacagggagatggacagtcctggagcagcctgggctggacgatcttagaactgggaccaccggtgtgcttcacctgtgtgtgggagctgtggtcccgacttgtaggtgcttttgtgtcctaacagctgatgaagtgggaagcatcttggttactatttacttagcattaagctgaatgtagcctgctggtttgaaggcatcacttccaccaagcctcagggcaatcctgtagggggtcagattgacctatatctcaactgaggttcctctggactgttaactgcctccgctctgggcgggatgggagctttcagatcctaaggcagagacgccctggatccattcacagccaagtgggggaacttcttccttcgtggcttatctttggcgaggagacagtgtcgtggttgtgccccacgctggcttagccagtgtctctaagcattttcatgaaccaaatttaggagcctggagcttccatgtgtgtgtgtgtgtgtgtgtgtgtgtgtgtgtgtgtgtgtatgatgtatatatatatgtgtgtgtgtatacgtatatgtgtgtacatatatatacatatacacacatatacacgtgtgtgtacataaacatatacatatatatatatagatctcaggctttatttggaaaacctggcaactgtgttccagagcaaagcagctgagtttccctttgggtgcttgtcctctgcaggctgccacagtccccaccttttcctgtgaccctaacactggagtggttgccttctttctctttaacattgtatgtgcacaggcacatgtacatgtgtgtgtgtgtgtgnnnnnnnnnnnnnnnnnnnnnnnnnnnnnnngggaggtcaggggacagcttgcagacgttggttctttccttctgtgtgggtttcaggaactgcacttaggtcatgaggcttagcagagagtggctttacgacctcgctgctgagccatgtcaccatccttcagctgcctttctcattatgactgcagttgtcttccctgagatcgtttttccacccctctctatactcccgggagacaactcactttgcagctcctggattggccaaatgttggttcccagtcttcctggccccttcctcggttgctggaatgcctatgatgggtgtctgctctccaagctctttgtatcagcattgcctgtggcgctctgagcaccgtcttgcttcttttctgttggtgtgttgaagaatggggtgtgggacaagctattatgtaagggcttttccatcagccgattctcaaaggggctaagcctgggccctgcagacaagctcaagacttcagggtccagcaggctccccatcctgggggcccccaacctgcccattggtagcctcagagtgggtcatatcccctgtcatgaacaaagtctccttggtgtgacaccggttgactctcctggagatggacggagtgtgggtcagctccagcctgtcttcctcggttggtgtcccccaggggcagcaccggaaagcaagccggaatccagagcgaaacctgccgagggtggagagtcactttaagcaagggagataggggtacaggagtcgtcggctatgtgactgctccacgccccaggagattagctcccttgcaaagaagcctcgcttagaagagtctaccaacaactcaacaactcggggctgtgtggagagatgcacaattgaatggatttagtttcttggagcagccagaaacaccgggaacatggctcatgcgagtaacatcagtacttcctaggcatgggcaagaaagatggcatcaaggttcaaggcggccaagtggtggaagaaaggaatggagggagagagaaagagggagggaaggaggagggggagggagaaaccaaactgaattacaaaggtgccatggacttaactggcttctaacaggagagaagaatcttagaaagaactgggctcagtgtatgtagagtagagaacctcccccaggaactacttaaaaggaaagctggcacactggctaccaagtatgggtgttatctgctcaaaaaataaacagctctcactcaggcggggtgtaggcctgtaatcacagcttcttagagaataaggaaggagggaggcacaattaaagtacaaggctcacctgggcagtaagggagaccatatttcaaaacaaataagaccagttctacgatgttgctcattagtagagtatttgcctggcatgctggaggccctgggttcaatccccagtactgggaggaccaagaaagtaaagtaaaataacaggaaaaacccccatccttccccatggtgctacggactgtatctgaggttgtgaggatggttttgaacttttgatccttcagagtgctgggatgcaggtacacatccatgcccagcttgtggagatcaaaccttgagctttgtgcctgccaggcaagcactgtcaactacatcatacctgctttggcctgattttaaatgtgggtgggtgttttccctgcatatatgtctgtgtgacacatgaatacattacccaaggtggccagatgaaggcacaagatcccttgggacggcagttacaggtggttgtgagccactatgtgggtgctgggatttaaaccaggctactcaggaagagcagccagtgctcttaagcacgggccatttgtccagctgattcttttggaaggtaaatcagagtgcttgtctcccaggtctcgatggctcaaagccttgttgagctctccctgttggagtgccagcccaagagcagaccttatctcagggctgttgattccctctgcagggaattcttgcccagactgcggggaagagtcagttactccagcttttgctcaactgtaaactacacatacacacacatacacacacacacacacacacacacacacacacacacacacacagtccagtgcctaagaccatcagcacctcctgctcactttcatacatatttgtctactacattatgtgtcacccctgtccaggcttttggtgcttgcaaaacacacacacacacacacacacacacacacacacacacacattatattaacattatgtattaatagtatatataatttgtaatataaattttaaataatatactatatattatatactatacatactattaaatattatataatatagtatatattatactatatagtatatgctatatagtatattatatacttattgtattatacttaatatatattatatactatatagtgtataacagtgtatatatatttttcttctgcttactccttaacccctggggcttgaaaagtcctggacacatgtggctgcttgtgagcttcttctggactgagagtccaaacctctatgacagcgttgtcacagaacgacacttcagaggctcaaaattgaatgttgagcagtgtccaagaaccgtgtgtctgggtgacagaagagagtcaggcatgcagacatgtggtgctggtggtctctccctgatgtgacagggtggtccccaggttctcacatcaatctgaacaagtgtgagtggaatcagctgggaagcattggagatatggaaattccaaatcctgtatagcctgtatgtcctagggttaggacagtcttcccttcttatgctcagtctttccatctgtacaatgggagacacccccctttctgctcttatctacttatgtcttgggaactcaagattctaggcatccattaaaccctcacagagcctggcccagatgggtgggctgagtaacaaagaccccagtggagttaggtagagtctggacacgtgtagacacctgatacaagttatgtcataaacaaagaggtcccatcctcagtactgctcacacccattggactgcagctgactcagtgtctccctctcgtgacctctcatctgctcccaccccaggccgaaaggctcactctgagcacaaggatcctgggacttggattctgcctggctcaccacctcttccttaatcaagagtcccagagctggtgccagcatatccccagactccaggaccccagaagcaccagagccagcagccagagcccagcccttcctccactggtcacatcctgggggagcgtgggggagggtggggggcggtgaggcaagaagcacactgccagcccctaaccctgcccctagccccgccctcagttccgccccagccccgccctcagtcctgccccccagccctgccccaaatctgccccaaccctgccctcagcctctttagacacctgcccacccagatcagtcacatccttaggaagaagcacttttaaatggcagctcttttgagccggtgggatggcgtagtgggaaaaggcatttgctacaagcctggcaacccaagttctatctcagagacctacatggtagaaagagagagacaactgctacaaattgtcctctgacccccacccatgtgctgtggcacacactcatttgcacacatgcacacacacacacacacacacacacacacacacacacacacacatcccataaaaaagaagaaaaagccatctcagagatagtcttacccatttcagctttctccctcccattcagctcttctgcctctccctactgtctccttccctccatctctctgatcctgcctttctgccttctcccttgcccccgatgcagaccccggaagagacaaggacagacataggcattatggctcagcaaaggacaaggctttgggaaggagatggggcccaggctagatccgggccacaggagggtgatactgtgggagtcccgggcagctccagcctctgggaggagctactccagtccctcccctgtggtcggagagcggagccagggtggggctcacctgtggttaaggcagcaataaatgatggggttgtacatggtggagctcatggccagccagaagagtgccaggtagacctgctggataaacttgcggtagtagatgtcctcttggaaggtccccaggatgaagtagaggtggtagggcagccagcagatggcaaatgtcaccaccaccagtaccatggccttcacaaactggtcagggagagacgcgggtcagtacttggcatctgagtctcaagcctagctccctagcaccccctagcgggtgggttttgggttctaatggctccctgaagcagattcctgcacctccaccccgctccacccccgaccctcctccggcttcccaccttcttcttggcctgtagatggcgcaggttagctccatgagcctggtgtctgggtacggcgcgtttccacagtgtgaggccaatgacactgtaagctgcaaacatcaccactagaggcaggaagtagatgaggacaaacaccaccagatgatacctgcagggaaagccggggagctggctgggcagtgggtggccagatccaccaatgctcactcgggattaaggtccctgaaccccacacaaacaccttgcagccccaccctggagttcggtttaaagaaaaattaaggcaacatttcctagcatatttgttaatgctgggctttcctcgcaaaaattaaccagcatcagccagttcttctgtggtatggaaaaggctaaaaagggggaaagctaaccaaatgttatgtttgtttaacatataaaatataacgccagcatcagtgagacagtggggatcggggctgagttggacctgagttggatccttggaagccacatgtagatcagaaggtgcatggcatgtacacagctctgtccgtctcatgtttttataaaaagaaacatttactatatatatgtgtgtgtgtgtgtgtgtgtatgtatttactatatagatatatatttagtatatatgtaatatattatattcatacacacatatatatatagtaaatgtattcatacacatgtatatgtgtatatgtatatatatgtatgtatatatactaaatttcatttttaatttttagtatatatactcatttagtatatatatttatatatactcatttttagtatatatatatgtatatatacatatatatgtatgtatatatacgtatgtgtgtgtatatatatatatatggtggcacatgcctgtgatcccaacagtccaagtatggaagcaggagggtaggatgttcactgttaatcctccatacacaatgaattagaggccagcctgggatactaagaccttgtttctgataaacatcattaagcacaaaggttaacactcctgtcactgttcacagtgtatgtttcctcccagaatcatctctgtgcattggtatgttgtgtgtgcaggaatggatatgtgtgcacatgaatatattcttatatttagtaggtagggcatatatgatattatacatatagaattgcaggagccacactaagaaaaggccttagctagagaaggacagtggagaagccacactgatagctctcatgtcccctgcttctttcctctaaacaccaccgggtacgtggctgtgccatcaaatacctttgagcaaggcgcacacaccactgcgcctgctgagacccaatacactgggttgcattgatgctcattgtttcctttgaggaagacactacacaggaggcacgccactggctccatttctgagggtgccatggcctcctggaaaagccacaagcttccttctgtcttccaggcaggccttctgaggtgggaagggggagtccttggaacatcaaggaatgggcctgagagcccccctccaccatgcaacttctttaaaaaaaaaacatgtgtgtgtgtgacgtgcatgtgtgtatgcacatctgcatgtgaataggtacgtgtgtgtgtgtgtgtgtaaaccagaggttgacatggaatgtcttcctccatgtctctctccctaatattttgaggcagggtctctagtttgaacttggggctctctgacttggctagtccggctgactttgctctgtatcacagactccacttcctgagtactaagattacagggggagttgtcatgaccgcctggcattgacttccagctacacacacattctctaagatgtatgcacatccatcactagccgcacacagacaccaaatgtgtgtagtgcatgtgtgaggcatgcagaactacacactccatctgtagatgcacatggctcatgccccaccttaccaaggtggcagactggctgccagcatctgtttccccacctcaccgctctgcctcaacgttcactgaccgtgctgtctgagccacatcttggaacatactttctcccccaccaagatggaagactacaatacatatggtggtcacagtgacttgtgagaaggaggcaggaggatcagagtttcagaccagtctaggctacatgagactgtcccgaaaatcaaaataagaggttggggatatagcttagtttataaaggtgcttgtctggcacacacaggcccttggttctacccc

SEQ ID NO: 1225 - DNA, 3831 bp, Mus musculus
cctgaaacacctgggaccatggagggcccccctcttctcaaggcttgctaggttagaccagtaactacatcaaggactccaacccaccagctagagaccgttcctcagacacctgagaaggatcagaaaaccccgcttctgaggacagaagacctctggaaaaacagtgtagccatcacctctacactatgggacagaactgccagcgaggacaggctgtagatgttgaaccaaaaatacgaccccctctcacagaggaaaagattgataagtatctgtatgccatgcggctctctgatgaaattctgatagatatcctgacacgcttcaagaaagagatgaagaatggcctctcccgggattataacccaacggcctccgtcaagatgctgccaacctttgtccggtccattccggacggctcagaaaagggggatttcattgcactggatctcggcgggtcttcctttcgaatcctgcgggtgcaggtgaaccacgagaagagtcagaacgtcagcatggagtctgaggtctacgacaccccagagaacatcgtgcacggcagtggaagccagctttttgatcacgtcgctgaatgcctcggagacttcatggagaaaaggaagatcaaggacaagaaattacccgtgggattcacgttttccttcccgtgccgacaatccaaaatagacgaggccgtactgatcacgtggacaaagcggttcaaagccagtggcgtggaaggggcggatgtggtcaagctgctgaataaagccattaagaagcgaggggactatgacgctaacattgtagctgtggtgaatgacacagtggggaccatgatgacctgcggctacgatgaccaacagtgtgaagtcggcctgatcattggcactggcaccaatgcttgctacatggaggaactgcgacacatcgacctggtggaaggcgatgaggggaggatgtgtattaacacggaatggggagcctttggggatgatgggtccctggaagacattcgaacagagtttgacagagagttagaccggggatccctcaaccctgggaaacagctgttcgagaagatggtgagcggcatgtacatgggggagctggtccggctgatcctggtgaagatggccaaggaaagcctcttatttgaagggcgcattactccagagctgctcacgaggggcaagttcaccactagcgacgtagccgccattgaaacgggatgggaactctcccctgaccgcaggtggtaccaggcatatatgaggtgcacacaagacacccacagggataaggaaggcgttcaaaatgccaaggaaatcttgacccgcctgggagtggagccgtctcacgatgactgcgtatcggtccagcacgtatgcacgatcgtctccttccgatcagccaacctggtggctgccacgctcggtgccatcttgaaccgcctgcgggacaataagggcacgcccaggctgcggaccacagttggcgtagacggttctctctacaagatgcacccacagtattcccggcggttccacaagaccctgaggcgcctggtgcctgactcggacgtccggttcctcctctcggagagtggcagtggcaagggagccgccatggtgaccgctgtggcctaccgcctggccgagcagcaccggcagattgaggaaaccctgtcccacttccgcctcagcaagcaggcactgatggaggtgaagaagaagctgcggtcagagatggaaatggggctgagaaaggagaccaacagcagagctacggtcaaaatgctgccttcttatgttcggagcatcccagatgggactgagcatggtgacttcctggccttggatctcggaggaacgaatttccgagtcctactggtaaagatccgtagtgggaaaaagagaacagtggagatgcacaacaagatctactccattcccctggaaatcatgcagggcaccggggatgagctgtttgatcacattgtctcctgcatctccgacttcctggactacatggggatcaaaggcccccggatgcctctgggcttcaccttctcgtttccctgcaagcagacgagcctagattgcggaatcttgatcacgtggacaaagggattcaaagccaccgactgtgtgggtcacgatgtagccactttactgagggatgctgtaaaaaggagagaggaatttgacctggatgtggtggctgtggtcaacgacaccgtgggcaccatgatgacttgtgcttatgaagaaccttcttgtgagattggactcatcgtggggactggcagcaatgcctgctacatggaggagatgaaaaacgtggagatggtggaggggaaccagggccagatgtgcatcaatatggaatggggtgcctttggtgacaacggctgtctggacgacatcagaacagacttcgacaaagtggtggacgaatattctctaaacagtgggaaacaaaggtttgagaagatgatcagtggaatgtacctgggtgagatcgtccgtaacatcctgattgacttcaccaagaaaggcttcctcttccggggacagatctctgagccactcaagacccgaggcatcttcgagaccaagtttctctctcagatcgagagtgaccgattagcgctgctccaggtgcgggccatccttcagcagctgggtctaaacagcacgtgcgacgacagtatcctggtcaagaccgtgtgtggggtggtgtccaagcgggcggcccagctgtgtggtgccggcatggccgccgtggtggaaaagatccgagagaacagaggcctagaccacctgaatgtaaccgtgggcgtggacgggacgctctacaaactccatccacacttctccagaatcatgcaccaaacagtgaaggaactgtcaccaaagtgtaccgtgtccttcctcctgtctgaagacggcagcggcaagggggccgcccttatcacagctgtgggcgtgcggctcagaggagaccctacgaacgcctaagagccaggatcctcccagcccccagcccgccacccttccagcactcctctctagaaccgacgaccacacaccgcccccgtgttccacccagcaagctccgctgggagacccagcgccggcacccactctgccgcagagggaggaaggggactgcagtaacggagcatcacatagaataccacccggagcgcgtgctgttgatgatctgatctctcgcctggacccctcatccctgccctgccactttgcatgattcaagttcgacctggccatgcattgcccaagcgtgaacgtagtggcacccacgtctaccgcaggcgtccagccaggaaagagcgacccccctcttggactgtcttctgggcccttccaagcccatctgtggagtcgcctccctccttccccccacccccgtgtgaagtgtgttatcaccagcagacactgccggactcctgcccacaggggcgtggcctgaagggcgagtgtgaacatggcactgctgttcccttccccctccctgcacccgccgcagcctgccatcccatttggatgtatcaatgccactgagttgtctgtccgtccgtggagccagtcctagccacattattgacagtcttgcattttgttttgtctcgtgatggtggtggtggtaggggtacgcttaggtgggcagtcctgtggggaaaacatcttgtctccatcttgctaggaagaaccaacccacaaaacaacgccatcactggaatctcccatcgctttagtgagccattgtcgtatgtctagtaaactttgtactgattcaaaa

SEQ ID NO: 1226 - protein, 941 aa, Mus musculus
MGQNCQRGQAVDVEPKIRPPLTEEKIDKYLYAMRLSDEILIDILTRFKKEMKNGLSRDYNPTASVKMLPTFVRSIPDGSEKGDFIALDLGGSSFRILRVQVNHEKSQNVSMESEVYDTPENIVHGSGSQLFDHVAECLGDFMEKRKIKDKKLPVGFTFSFPCRQSKIDEAVLITWTKRFKASGVEGADVVKLLNKAIKKRGDYDANIVAVVNDTVGTMMTCGYDDQQCEVGLIIGTGTNACYMEELRHIDLVEGDEGRMCINTEWGAFGDDGSLEDIRTEFDRELDRGSLNPGKQLFEKMVSGMYMGELVRLILVKMAKESLLFEGRITPELLTRGKFTTSDVAAIETGWELSPDRRWYQAYMRCTQDTDKEGVQNAKEILTRLGVEPSHDDCVSVQHVCTIVSFRSANLVAATLGAILNRLRDNKGTPRLRTTVGVDGSLYKMHPQYSRRFHKTLRRLVPDSDVRFLLSESGSGKGAAMVTAVAYRLAEQHRQIEETLSHFRLSKQALMEVKKKLRSEMEMGLRKETNSRATVKMLPSYVRSIPDGTEHGDFLALDLGGTNFRVLLVKIRSGKKRTVEMHNKIYSIPLEIMQGTGDELFDHIVSCISDFLDYMGIKGPRMPLGFTFSFPCKQTSLDCGILITWTKGFKATDCVGHDVATLLRDAVKRREEFDLDVVAVVNDTVGTMMTCAYEEPSCEIGLIVGTGSNACYMEEMKNVEMVEGNQGQMCINMEWGAFGDNGCLDDIRTDFDKVVDEYSLNSGKQRFEKMISGMYLGEIVRNILIDFTKKGFLFRGQISEPLKTRGIFETKFLSQIESDRLALLQVRAILQQLQSTCDDSILVKTVCGVVSKRAAQLCGAGMAAVVEKIRENRGLDHLNVTVGVDGTLYKLHPHFSRIMHQTVKELSPKCTVSFLLSEDGSGKGAALITAVGVRLRGDPTNA

SEQ ID NO: 1227 - DNA, 3859 bp, Mus musculus
acagaagtgctggaccgtttggggaaaaggagacagcgggccttatctgagccagcgcaccctcagcgacttccttgaactaggcgtcaccagaagccgccccgcccagctgaggagccacatcaaggcaccagcctgaggactcaggggacacacagagggcacctcaggcattagcagtccagccaaggtgtggaccatgcctgtgttcctgtggctttgggaaagacacacactatgatgtgtgcactggggccagctgacttccatatagaggacacctaaggctagggggatgctgaagagagggagagacgacggcgtgaggccgggcacatcatggcatgtcctgtgcagaagattgataagtatctgtatgccatgcggctctctgatgaaattctgatagatatcctgacacgcttcaagaaagagatgaagaatggcctctcccgggattataacccaacggcctccgtcaagatgctgccaacctttgtccggtccattccggacggctcagaaaagggggatttcattgcactggatctcggcgggtcttcctttcgaatcctgcgggtgcaggtgaaccacgagaagagtcagaacgtcagcatggagtctgaggtctacgacaccccagagaacatcgtgcacggcagtggaagccagctttttgatcacgtcgctgaatgcctcggagacttcatggagaaaaggaagatcaaggacaagaaattacccgtgggattcacgttttccttcccgtgccgacaatccaaaatagacgaggccgtactgatcacgtggacaaagcggttcaaagccagtggcgtggaaggggcggatgtggtcaagctgctgaataaagccattaagaagcgaggggactatgacgctaacattgtagctgtggtgaatgacacagtggggaccatgatgacctgcggctacgatgaccaacagtgtgaagtcggcctgatcattggcactggcaccaatgcttgctacatggaggaactgcgacacatcgacctggtggaaggcgatgaggggaggatgtgtattaacacggaatggggagcctttggggatgatgggtccctggaagacattcgaacagagtttgacagagagttagaccggggatccctcaaccctgggaaacagctgttcgagaagatggtgagcggcatgtacatgggggagctggtccggctgatcctggtgaagatggccaaggaaagcctcttatttgaagggcgcattactccagagctgctcacgaggggcaagttcaccactagcgacgtagccgccattgaaacggataaggaaggcgttcaaaatgccaaggaaatcttgacccgcctgggagtggagccgtctcacgatgactgcgtatcggtccagcacgtatgcacgatcgtctccttccgatcagccaacctggtggctgccacgctcggtgccatcttgaaccgcctgcgggacaataagggcacgcccaggctgcggaccacagttggcgtagacggttctctctacaagatgcacccacagtattcccggcggttccacaagaccctgaggcgcctggtgcctgactcggacgtccggttcctcctctcggagagtggcagtggcaagggagccgccatggtgaccgctgtggcctaccgcctggccgagcagcaccggcagattgaggaaaccctgtcccacttccgcctcagcaagcaggcactgatggaggtgaagaagaagctgcggtcagagatggaaatggggctgagaaaggagaccaacagcagagctacggtcaaaatgctgccttcttatgttcggagcatcccagatgggactgagcatggtgacttcctggccttggatctcggaggaacgaatttccgagtcctactggtaaagatccgtagtgggaaaaagagaacagtggagatgcacaacaagatctactccattcccctggaaatcatgcagggcaccggggatgagctgtttgatcacattgtctcctgcatctccgacttcctggactacatggggatcaaaggcccccggatgcctctgggcttcaccttctcgtttccctgcaagcagacgagcctagattgcggaatcttgatcacgtggacaaagggattcaaagccaccgactgtgtgggtcacgatgtagccactttactgagggatgctgtaaaaaggagagaggaatttgacctggatgtggtggctgtggtcaacgacaccgtgggcaccatgatgacttgtgcttatgaagaaccttcttgtgagattggactcatcgtggggactggcagcaatgcctgctacatggaggagatgaaaaacgtggagatggtggaggggaaccagggccagatgtgcatcaatatggaatggggtgcctttggtgacaacggctgtctggacgacatcagaacagacttcgacaaagtggtggacgaatattctctaaacagtgggaaacaaaggtttgagaagatgatcagtggaatgtacctgggtgagatcgtccgtaacatcctgattgacttcaccaagaaaggcttcctcttccggggacagatctctgagccactcaagacccgaggcatcttcgagaccaagtttctctctcagatcgagagtgaccgattagcgctgctccaggtgcgggccatccttcagcagctgggtctaaacagcacgtgcgacgacagtatcctggtcaagaccgtgtgtggggtggtgtccaagcgggcggcccagctgtgtggtgccggcatggccgccgtggtggaaaagatccgagagaacagaggcctagaccacctgaatgtaaccgtgggcgtggacgggacgctctacaaactccatccacacttctccagaatcatgcaccaaacagtgaaggaactgtcaccaaagtgtaccgtgtccttcctcctgtctgaagacggcagcggcaagggggccgcccttatcacagctgtgggcgtgcggctcagaggagaccctacgaacgcctaagagccaggatcctcccagcccccagcccgccacccttccagcactcctctctagaaccgacgaccacacaccgcccccgtgttccacccagcaagctccgctgggagacccagcgccggcacccactctgccgcagagggaggaaggggactgcagtaacggagcatcacatagaataccacccggagcgcgtgctgttgatgatctgatctctcgcctggacccctcatccctgccctgccactttgcatgattcaagttcgacctggccatgcattgcccaagcgtgaacgtagtggcacccacgtctaccgcaggcgtccagccaggaaagagcgacccccctcttggactgtcttctgggcccttccaagcccatctgtggagtcgcctccctccttccccccacccccgtgtgaagtgtgttatcaccagcagacactgccggactcctgcccacaggggcgtggcctgaagggcgagtgtgaacatggcactgctgttcccttccccctccctgcacccgccgcagcctgccatcccatttggatgtatcaatgccactgagttgtctgtccgtccgtggagccagtcctagccacattattgacagtcttgcattttgttttgtctcgtgatggtggtggtggtaggggtacgcttaggtgggcagtcctgtggggaaaacatcttgtctccatcttgctaggaagaaccaacccacaaaacaacgccatcactggaatctcccatcgctttagtgagccattgtcgtatgtctagtaaactttgtactgattcaaaa

SEQ ID NO: 1228 - protein, 902 aa, Mus musculus
MACPVQKIDKYLYAMRLSDEILIDILTRFKKEMKNGLSRDYNPTASVKMLPTFVRSIPDGSEKGDFIALDLGGSSFRILRVQVNHEKSQNVSMESEVYDTPENIVHGSGSQLFDHVAECLGDFMEKRKIKDKKLPVGFTFSFPCRQSKIDEAVLITWTKRFKASGVEGADVVKLLNKAIKKRGDYDANIVAVVNDTVGTMMTCGYDDQQCEVGLIIGTGTNACYMEELRHIDLVEGDEGRMCINTEWGAFGDDGSLEDIRTEFDRELDRGSLNPGKQLFEKMVSGMYMGELVRLILVKMAKESLLFEGRITPELLTRGKFTTSDVAAIETDKEGVQNAKEILTRLGVEPSHDDCVSVQHVCTIVSFRSANLVAATLGAILNRLRDNKGTPRLRTTVGVDGSLYKMHPQYSRRFHKTLRRLVPDSDVRFLLSESGSGKGAAMVTAVAYRLAEQHRQIEETLSHFRLSKQALMEVKKKLRSEMEMGLRKETNSRATVKMLPSYVRSIPDGTEHGDFLALDLGGTNFRVLLVKIRSGKKRTVEMHNKIYSIPLEIMQGTGDELFDHIVSCISDFLDYMGIKGPRMPLGFTFSFPCKQTSLDCGILITWTKGFKATDCVGHDVATLLRDAVKRREEFDLDVVAVVNDTVGTMMTCAYEEPSCEIGLIVGTGSNACYMEEMKNVEMVEGNQGQMCINMEWGAFGDNGCLDDIRTDFDKVVDEYSLNSGKQRFEKMISGMYLGEIVRNILIDFTKKGFLFRGQISEPLKTRGIFETKFLSQIESDRLALLQVRAILQQLQSTCDDSILVKTVCGVVSKRAAQLCGAGMAAVVEKIRENRGLDHLNVTVGVDGTLYKLHPHFSRIMHQTVKELSPKCTVSFLLSEDGSGKGAALITAVGVRLRGDPTNA

SEQ ID NO: 1229 - DNA, 3627 bp, Mus musculus
gccgtgggacttacttctggagggccaggtctctactgcctgcagatgtcttcttgccccaccagaggctcctccgtctccttgggtcctctttggtgctctcagggctcaccatgcgttgggatcagattgataagtatctgtatgccatgcggctctctgatgaaattctgatagatatcctgacacgcttcaagaaagagatgaagaatggcctctcccgggattataacccaacggcctccgtcaagatgctgccaacctttgtccggtccattccggacggctcagaaaagggggatttcattgcactggatctcggcgggtcttcctttcgaatcctgcgggtgcaggtgaaccacgagaagagtcagaacgtcagcatggagtctgaggtctacgacaccccagagaacatcgtgcacggcagtggaagccagctttttgatcacgtcgctgaatgcctcggagacttcatggagaaaaggaagatcaaggacaagaaattacccgtgggattcacgttttccttcccgtgccgacaatccaaaatagacgaggccgtactgatcacgtggacaaagcggttcaaagccagtggcgtggaaggggcggatgtggtcaagctgctgaataaagccattaagaagcgaggggactatgacgctaacattgtagctgtggtgaatgacacagtggggaccatgatgacctgcggctacgatgaccaacagtgtgaagtcggcctgatcattggcactggcaccaatgcttgctacatggaggaactgcgacacatcgacctggtggaaggcgatgaggggaggatgtgtattaacacggaatggggagcctttggggatgatgggtccctggaagacattcgaacagagtttgacagagagttagaccggggatccctcaaccctgggaaacagctgttcgagaagatggtgagcggcatgtacatgggggagctggtccggctgatcctggtgaagatggccaaggaaagcctcttatttgaagggcgcattactccagagctgctcacgaggggcaagttcaccactagcgacgtagccgccattgaaacggataaggaaggcgttcaaaatgccaaggaaatcttgacccgcctgggagtggagccgtctcacgatgactgcgtatcggtccagcacgtatgcacgatcgtctccttccgatcagccaacctggtggctgccacgctcggtgccatcttgaaccgcctgcgggacaataagggcacgcccaggctgcggaccacagttggcgtagacggttctctctacaagatgcacccacagtattcccggcggttccacaagaccctgaggcgcctggtgcctgactcggacgtccggttcctcctctcggagagtggcagtggcaagggagccgccatggtgaccgctgtggcctaccgcctggccgagcagcaccggcagattgaggaaaccctgtcccacttccgcctcagcaagcaggcactgatggaggtgaagaagaagctgcggtcagagatggaaatggggctgagaaaggagaccaacagcagagctacggtcaaaatgctgccttcttatgttcggagcatcccagatgggactgagcatggtgacttcctggccttggatctcggaggaacgaatttccgagtcctactggtaaagatccgtagtgggaaaaagagaacagtggagatgcacaacaagatctactccattcccctggaaatcatgcagggcaccggggatgagctgtttgatcacattgtctcctgcatctccgacttcctggactacatggggatcaaaggcccccggatgcctctgggcttcaccttctcgtttccctgcaagcagacgagcctagattgcggaatcttgatcacgtggacaaagggattcaaagccaccgactgtgtgggtcacgatgtagccactttactgagggatgctgtaaaaaggagagaggaatttgacctggatgtggtggctgtggtcaacgacaccgtgggcaccatgatgacttgtgcttatgaagaaccttcttgtgagattggactcatcgtggggactggcagcaatgcctgctacatggaggagatgaaaaacgtggagatggtggaggggaaccagggccagatgtgcatcaatatggaatggggtgcctttggtgacaacggctgtctggacgacatcagaacagacttcgacaaagtggtggacgaatattctctaaacagtgggaaacaaaggtttgagaagatgatcagtggaatgtacctgggtgagatcgtccgtaacatcctgattgacttcaccaagaaaggcttcctcttccggggacagatctctgagccactcaagacccgaggcatcttcgagaccaagtttctctctcagatcgagagtgaccgattagcgctgctccaggtgcgggccatccttcagcagctgggtctaaacagcacgtgcgacgacagtatcctggtcaagaccgtgtgtggggtggtgtccaagcgggcggcccagctgtgtggtgccggcatggccgccgtggtggaaaagatccgagagaacagaggcctagaccacctgaatgtaaccgtgggcgtggacgggacgctctacaaactccatccacacttctccagaatcatgcaccaaacagtgaaggaactgtcaccaaagtgtaccgtgtccttcctcctgtctgaagacggcagcggcaagggggccgcccttatcacagctgtgggcgtgcggctcagaggagaccctacgaacgcctaagagccaggatcctcccagcccccagcccgccacccttccagcactcctctctagaaccgacgaccacacaccgcccccgtgttccacccagcaagctccgctgggagacccagcgccggcacccactctgccgcagagggaggaaggggactgcagtaacggagcatcacatagaataccacccggagcgcgtgctgttgatgatctgatctctcgcctggacccctcatccctgccctgccactttgcatgattcaagttcgacctggccatgcattgcccaagcgtgaacgtagtggcacccacgtctaccgcaggcgtccagccaggaaagagcgacccccctcttggactgtcttctgggcccttccaagcccatctgtggagtcgcctccctccttccccccacccccgtgtgaagtgtgttatcaccagcagacactgccggactcctgcccacaggggcgtggcctgaagggcgagtgtgaacatggcactgctgttcccttccccctccctgcacccgccgcagcctgccatcccatttggatgtatcaatgccactgagttgtctgtccgtccgtggagccagtcctagccacattattgacagtcttgcattttgttttgtctcgtgatggtggtggtggtaggggtacgcttaggtgggcagtcctgtggggaaaacatcttgtctccatcttgctaggaagaaccaacccacaaaacaacgccatcactggaatctcccatcgctttagtgagccattgtcgtatgtctagtaaactttgtactgattcaaaa

SEQ ID NO: 1230 - protein, 900 aa, Mus musculus
MRWDQIDKYLYAMRLSDEILIDILTRFKKEMKNGLSRDYNPTASVKMLPTFVRSIPDGSEKGDFIALDLGGSSFRILRVQVNHEKSQNVSMESEVYDTPENIVHGSGSQLFDHVAECLGDFMEKRKIKDKKLPVGFTFSFPCRQSKIDEAVLITWTKRFKASGVEGADVVKLLNKAIKKRGDYDANIVAVVNDTVGTMMTCGYDDQQCEVGLIIGTGTNACYMEELRHIDLVEGDEGRMCINTEWGAFGDDGSLEDIRTEFDRELDRGSLNPGKQLFEKMVSGMYMGELVRLILVKMAKESLLFEGRITPELLTRGKFTTSDVAAIETDKEGVQNAKEILTRLGVEPSHDDCVSVQHVCTIVSFRSANLVAATLGAILNRLRDNKGTPRLRTTVGVDGSLYKMHPQYSRRFHKTLRRLVPDSDVRFLLSESGSGKGAAMVTAVAYRLAEQHRQIEETLSHFRLSKQALMEVKKKLRSEMEMGLRKETNSRATVKMLPSYVRSIPDGTEHGDFLALDLGGTNFRVLLVKIRSGKKRTVEMHNKIYSIPLEIMQGTGDELFDHIVSCISDFLDYMGIKGPRMPLGFTFSFPCKQTSLDCGILITWTKGFKATDCVGHDVATLLRDAVKRREEFDLDVVAVVNDTVGTMMTCAYEEPSCEIGLIVGTGSNACYMEEMKNVEMVEGNQGQMCINMEWGAFGDNGCLDDIRTDFDKVVDEYSLNSGKQRFEKMISGMYLGEIVRNILIDFTKKGFLFRGQISEPLKTRGIFETKFLSQIESDRLALLQVRAILQQLQSTCDDSILVKTVCGVVSKRAAQLCGAGMAAVVEKIRENRGLDHLNVTVGVDGTLYKLHPHFSRIMHQTVKELSPKCTVSFLLSEDGSGKGAALITAVGVRLRGDPTNA

SEQ ID NO: 1231 - DNA, 3402 bp, Mus musculus
gtggggtaggatggacagagtgctggctaggcatcagaactggggttgagtcccggctccaaattctaccgcaacctgccactgggcaagatggcccaccagctgtgcatcctacgctgccttgcctgtagagaagagccctggtccccgtttgcatggactctgagcactgtccgagtgtgccctgtggaggtgctggggcctgggaggccaggctttttgatcacgtcgctgaatgcctcggagacttcatggagaaaaggaagatcaaggacaagaaattacccgtgggattcacgttttccttcccgtgccgacaatccaaaatagacgaggccgtactgatcacgtggacaaagcggttcaaagccagtggcgtggaaggggcggatgtggtcaagctgctgaataaagccattaagaagcgaggggactatgacgctaacattgtagctgtggtgaatgacacagtggggaccatgatgacctgcggctacgatgaccaacagtgtgaagtcggcctgatcattggcactggcaccaatgcttgctacatggaggaactgcgacacatcgacctggtggaaggcgatgaggggaggatgtgtattaacacggaatggggagcctttggggatgatgggtccctggaagacattcgaacagagtttgacagagagttagaccggggatccctcaaccctgggaaacagctgttcgagaagatggtgagcggcatgtacatgggggagctggtccggctgatcctggtgaagatggccaaggaaagcctcttatttgaagggcgcattactccagagctgctcacgaggggcaagttcaccactagcgacgtagccgccattgaaacggataaggaaggcgttcaaaatgccaaggaaatcttgacccgcctgggagtggagccgtctcacgatgactgcgtatcggtccagcacgtatgcacgatcgtctccttccgatcagccaacctggtggctgccacgctcggtgccatcttgaaccgcctgcgggacaataagggcacgcccaggctgcggaccacagttggcgtagacggttctctctacaagatgcacccacagtattcccggcggttccacaagaccctgaggcgcctggtgcctgactcggacgtccggttcctcctctcggagagtggcagtggcaagggagccgccatggtgaccgctgtggcctaccgcctggccgagcagcaccggcagattgaggaaaccctgtcccacttccgcctcagcaagcaggcactgatggaggtgaagaagaagctgcggtcagagatggaaatggggctgagaaaggagaccaacagcagagctacggtcaaaatgctgccttcttatgttcggagcatcccagatgggactgagcatggtgacttcctggccttggatctcggaggaacgaatttccgagtcctactggtaaagatccgtagtgggaaaaagagaacagtggagatgcacaacaagatctactccattcccctggaaatcatgcagggcaccggggatgagctgtttgatcacattgtctcctgcatctccgacttcctggactacatggggatcaaaggcccccggatgcctctgggcttcaccttctcgtttccctgcaagcagacgagcctagattgcggaatcttgatcacgtggacaaagggattcaaagccaccgactgtgtgggtcacgatgtagccactttactgagggatgctgtaaaaaggagagaggaatttgacctggatgtggtggctgtggtcaacgacaccgtgggcaccatgatgacttgtgcttatgaagaaccttcttgtgagattggactcatcgtggggactggcagcaatgcctgctacatggaggagatgaaaaacgtggagatggtggaggggaaccagggccagatgtgcatcaatatggaatggggtgcctttggtgacaacggctgtctggacgacatcagaacagacttcgacaaagtggtggacgaatattctctaaacagtgggaaacaaaggtttgagaagatgatcagtggaatgtacctgggtgagatcgtccgtaacatcctgattgacttcaccaagaaaggcttcctcttccggggacagatctctgagccactcaagacccgaggcatcttcgagaccaagtttctctctcagatcgagagtgaccgattagcgctgctccaggtgcgggccatccttcagcagctgggtctaaacagcacgtgcgacgacagtatcctggtcaagaccgtgtgtggggtggtgtccaagcgggcggcccagctgtgtggtgccggcatggccgccgtggtggaaaagatccgagagaacagaggcctagaccacctgaatgtaaccgtgggcgtggacgggacgctctacaaactccatccacacttctccagaatcatgcaccaaacagtgaaggaactgtcaccaaagtgtaccgtgtccttcctcctgtctgaagacggcagcggcaagggggccgcccttatcacagctgtgggcgtgcggctcagaggagaccctacgaacgcctaagagccaggatcctcccagcccccagcccgccacccttccagcactcctctctagaaccgacgaccacacaccgcccccgtgttccacccagcaagctccgctgggagacccagcgccggcacccactctgccgcagagggaggaaggggactgcagtaacggagcatcacatagaataccacccggagcgcgtgctgttgatgatctgatctctcgcctggacccctcatccctgccctgccactttgcatgattcaagttcgacctggccatgcattgcccaagcgtgaacgtagtggcacccacgtctaccgcaggcgtccagccaggaaagagcgacccccctcttggactgtcttctgggcccttccaagcccatctgtggagtcgcctccctccttccccccacccccgtgtgaagtgtgttatcaccagcagacactgccggactcctgcccacaggggcgtggcctgaagggcgagtgtgaacatggcactgctgttcccttccccctccctgcacccgccgcagcctgccatcccatttggatgtatcaatgccactgagttgtctgtccgtccgtggagccagtcctagccacattattgacagtcttgcattttgttttgtctcgtgatggtggtggtggtaggggtacgcttaggtgggcagtcctgtggggaaaacatcttgtctccatcttgctaggaagaaccaacccacaaaacaacgccatcactggaatctcccatcgctttagtgagccattgtcgtatgtctagtaaactttgtactgattcaaaa

SEQ ID NO: 1232 - protein, 811 aa, Mus musculus
MDSEHCPSVPCGGAGAWEARLFDHVAECLGDFMEKRKIKDKKLPVGFTFSFPCRQSKIDEAVLITWTKRFKASGVEGADVVKLLNKAIKKRGDYDANIVAVVNDTVGTMMTCGYDDQQCEVGLIIGTGTNACYMEELRHIDLVEGDEGRMCINTEWGAFGDDGSLEDIRTEFDRELDRGSLNPGKQLFEKMVSGMYMGELVRLILVKMAKESLLFEGRITPELLTRGKFTTSDVAAIETDKEGVQNAKEILTRLGVEPSHDDCVSVQHVCTIVSFRSANLVAATLGAILNRLRDNKGTPRLRTTVGVDGSLYKMHPQYSRRFHKTLRRLVPDSDVRFLLSESGSGKGAAMVTAVAYRLAEQHRQIEETLSHFRLSKQALMEVKKKLRSEMEMGLRKETNSRATVKMLPSYVRSIPDGTEHGDFLALDLGGTNFRVLLVKIRSGKKRTVEMHNKIYSIPLEIMQGTGDELFDHIVSCISDFLDYMGIKGPRMPLGFTFSFPCKQTSLDCGILITWTKGFKATDCVGHDVATLLRDAVKRREEFDLDVVAVVNDTVGTMMTCAYEEPSCEIGLIVGTGSNACYMEEMKNVEMVEGNQGQMCINMEWGAFGDNGCLDDIRTDFDKVVDEYSLNSGKQRFEKMISGMYLGEIVRNILIDFTKKGFLFRGQISEPLKTRGIFETKFLSQIESDRLALLQVRAILQQLQSTCDDSILVKTVCGVVSKRAAQLCGAGMAAVVEKIRENRGLDHLNVTVGVDGTLYKLHPHFSRIMHQTVKELSPKCTVSFLLSEDGSGKGAALITAVGVRLRGDPTNA

SEQ ID NO: 1233 - DNA, 3846 bp, Mus musculus
cattctcctgctctggctgggaagccccagccatagcgcggcagtggcgccttgtagccaatggggactgaggaggtgggccggctggcggttgtcaccctcccggggacgggagctcggaggtctggagagagcaggcagacgccccgcccagggactgagggggaggagccaagggaggaggaggtggagtcgcggatccgccgctggaggaccactgctcaccagggctactgaggagccactggccccacacctgcttctccgcatcccccaccgtcaacatgatcgccgcgcaactactggcatattacttcaccgagctgaaggatgaccaagtcaaaaagattgataagtatctgtatgccatgcggctctctgatgaaattctgatagatatcctgacacgcttcaagaaagagatgaagaatggcctctcccgggattataacccaacggcctccgtcaagatgctgccaacctttgtccggtccattccggacggctcagaaaagggggatttcattgcactggatctcggcgggtcttcctttcgaatcctgcgggtgcaggtgaaccacgagaagagtcagaacgtcagcatggagtctgaggtctacgacaccccagagaacatcgtgcacggcagtggaagccagctttttgatcacgtcgctgaatgcctcggagacttcatggagaaaaggaagatcaaggacaagaaattacccgtgggattcacgttttccttcccgtgccgacaatccaaaatagacgaggccgtactgatcacgtggacaaagcggttcaaagccagtggcgtggaaggggcggatgtggtcaagctgctgaataaagccattaagaagcgaggggactatgacgctaacattgtagctgtggtgaatgacacagtggggaccatgatgacctgcggctacgatgaccaacagtgtgaagtcggcctgatcattggcactggcaccaatgcttgctacatggaggaactgcgacacatcgacctggtggaaggcgatgaggggaggatgtgtattaacacggaatggggagcctttggggatgatgggtccctggaagacattcgaacagagtttgacagagagttagaccggggatccctcaaccctgggaaacagctgttcgagaagatggtgagcggcatgtacatgggggagctggtccggctgatcctggtgaagatggccaaggaaagcctcttatttgaagggcgcattactccagagctgctcacgaggggcaagttcaccactagcgacgtagccgccattgaaacggataaggaaggcgttcaaaatgccaaggaaatcttgacccgcctgggagtggagccgtctcacgatgactgcgtatcggtccagcacgtatgcacgatcgtctccttccgatcagccaacctggtggctgccacgctcggtgccatcttgaaccgcctgcgggacaataagggcacgcccaggctgcggaccacagttggcgtagacggttctctctacaagatgcacccacagtattcccggcggttccacaagaccctgaggcgcctggtgcctgactcggacgtccggttcctcctctcggagagtggcagtggcaagggagccgccatggtgaccgctgtggcctaccgcctggccgagcagcaccggcagattgaggaaaccctgtcccacttccgcctcagcaagcaggcactgatggaggtgaagaagaagctgcggtcagagatggaaatggggctgagaaaggagaccaacagcagagctacggtcaaaatgctgccttcttatgttcggagcatcccagatgggactgagcatggtgacttcctggccttggatctcggaggaacgaatttccgagtcctactggtaaagatccgtagtgggaaaaagagaacagtggagatgcacaacaagatctactccattcccctggaaatcatgcagggcaccggggatgagctgtttgatcacattgtctcctgcatctccgacttcctggactacatggggatcaaaggcccccggatgcctctgggcttcaccttctcgtttccctgcaagcagacgagcctagattgcggaatcttgatcacgtggacaaagggattcaaagccaccgactgtgtgggtcacgatgtagccactttactgagggatgctgtaaaaaggagagaggaatttgacctggatgtggtggctgtggtcaacgacaccgtgggcaccatgatgacttgtgcttatgaagaaccttcttgtgagattggactcatcgtggggactggcagcaatgcctgctacatggaggagatgaaaaacgtggagatggtggaggggaaccagggccagatgtgcatcaatatggaatggggtgcctttggtgacaacggctgtctggacgacatcagaacagacttcgacaaagtggtggacgaatattctctaaacagtgggaaacaaaggtttgagaagatgatcagtggaatgtacctgggtgagatcgtccgtaacatcctgattgacttcaccaagaaaggcttcctcttccggggacagatctctgagccactcaagacccgaggcatcttcgagaccaagtttctctctcagatcgagagtgaccgattagcgctgctccaggtgcgggccatccttcagcagctgggtctaaacagcacgtgcgacgacagtatcctggtcaagaccgtgtgtggggtggtgtccaagcgggcggcccagctgtgtggtgccggcatggccgccgtggtggaaaagatccgagagaacagaggcctagaccacctgaatgtaaccgtgggcgtggacgggacgctctacaaactccatccacacttctccagaatcatgcaccaaacagtgaaggaactgtcaccaaagtgtaccgtgtccttcctcctgtctgaagacggcagcggcaagggggccgcccttatcacagctgtgggcgtgcggctcagaggagaccctacgaacgcctaagagccaggatcctcccagcccccagcccgccacccttccagcactcctctctagaaccgacgaccacacaccgcccccgtgttccacccagcaagctccgctgggagacccagcgccggcacccactctgccgcagagggaggaaggggactgcagtaacggagcatcacatagaataccacccggagcgcgtgctgttgatgatctgatctctcgcctggacccctcatccctgccctgccactttgcatgattcaagttcgacctggccatgcattgcccaagcgtgaacgtagtggcacccacgtctaccgcaggcgtccagccaggaaagagcgacccccctcttggactgtcttctgggcccttccaagcccatctgtggagtcgcctccctccttccccccacccccgtgtgaagtgtgttatcaccagcagacactgccggactcctgcccacaggggcgtggcctgaagggcgagtgtgaacatggcactgctgttcccttccccctccctgcacccgccgcagcctgccatcccatttggatgtatcaatgccactgagttgtctgtccgtccgtggagccagtcctagccacattattgacagtcttgcattttgttttgtctcgtgatggtggtggtggtaggggtacgcttaggtgggcagtcctgtggggaaaacatcttgtctccatcttgctaggaagaaccaacccacaaaacaacgccatcactggaatctcccatcgctttagtgagccattgtcgtatgtctagtaaactttgtactgattcaaaa

SEQ ID NO: 1234 - protein, 916 aa, Mus musculus
MIAAQLLAYYFTELKDDQVKKIDKYLYAMRLSDEILIDILTRFKKEMKNGLSRDYNPTASVKMLPTFVRSIPDGSEKGDFIALDLGGSSFRILRVQVNHEKSQNVSMESEVYDTPENIVHGSGSQLFDHVAECLGDFMEKRKIKDKKLPVGFTFSFPCRQSKIDEAVLITWTKRFKASGVEGADVVKLLNKAIKKRGDYDANIVAVVNDTVGTMMTCGYDDQQCEVGLIIGTGTNACYMEELRHIDLVEGDEGRMCINTEWGAFGDDGSLEDIRTEFDRELDRGSLNPGKQLFEKMVSGMYMGELVRLILVKMAKESLLFEGRITPELLTRGKFTTSDVAAIETDKEGVQNAKEILTRLGVEPSHDDCVSVQHVCTIVSFRSANLVAATLGAILNRLRDNKGTPRLRTTVGVDGSLYKMHPQYSRRFHKTLRRLVPDSDVRFLLSESGSGKGAAMVTAVAYRLAEQHRQIEETLSHFRLSKQALMEVKKKLRSEMEMGLRKETNSRATVKMLPSYVRSIPDGTEHGDFLALDLGGTNFRVLLVKIRSGKKRTVEMHNKIYSIPLEIMQGTGDELFDHIVSCISDFLDYMGIKGPRMPLGFTFSFPCKQTSLDCGILITWTKGFKATDCVGHDVATLLRDAVKRREEFDLDVVAVVNDTVGTMMTCAYEEPSCEIGLIVGTGSNACYMEEMKNVEMVEGNQGQMCINMEWGAFGDNGCLDDIRTDFDKVVDEYSLNSGKQRFEKMISGMYLGEIVRNILIDFTKKGFLFRGQISEPLKTRGIFETKFLSQIESDRLALLQVRAILQQLQSTCDDSILVKTVCGVVSKRAAQLCGAGMAAVVEKIRENRGLDHLNVTVGVDGTLYKLHPHFSRIMHQTVKELSPKCTVSFLLSEDGSGKGAALITAVGVRLRGDPTNA

SEQ ID NO: 1235 - DNA, 3714 bp, Mus musculus
gtggggtaggatggacagagtgctggctaggcatcagaactggggttgagtcccggctccaaattctaccgcaacctgccactgggcaagatggcccaccagctgtgcatcctacgctgccttgcctgtagagaagagccctggtccccgtttgcatggactctgagcactgtccgagtgtgccctgtggaggtgctggggcctgggaggccaggattgataagtatctgtatgccatgcggctctctgatgaaattctgatagatatcctgacacgcttcaagaaagagatgaagaatggcctctcccgggattataacccaacggcctccgtcaagatgctgccaacctttgtccggtccattccggacggctcagaaaagggggatttcattgcactggatctcggcgggtcttcctttcgaatcctgcgggtgcaggtgaaccacgagaagagtcagaacgtcagcatggagtctgaggtctacgacaccccagagaacatcgtgcacggcagtggaagccagctttttgatcacgtcgctgaatgcctcggagacttcatggagaaaaggaagatcaaggacaagaaattacccgtgggattcacgttttccttcccgtgccgacaatccaaaatagacgaggccgtactgatcacgtggacaaagcggttcaaagccagtggcgtggaaggggcggatgtggtcaagctgctgaataaagccattaagaagcgaggggactatgacgctaacattgtagctgtggtgaatgacacagtggggaccatgatgacctgcggctacgatgaccaacagtgtgaagtcggcctgatcattggcactggcaccaatgcttgctacatggaggaactgcgacacatcgacctggtggaaggcgatgaggggaggatgtgtattaacacggaatggggagcctttggggatgatgggtccctggaagacattcgaacagagtttgacagagagttagaccggggatccctcaaccctgggaaacagctgttcgagaagatggtgagcggcatgtacatgggggagctggtccggctgatcctggtgaagatggccaaggaaagcctcttatttgaagggcgcattactccagagctgctcacgaggggcaagttcaccactagcgacgtagccgccattgaaacggataaggaaggcgttcaaaatgccaaggaaatcttgacccgcctgggagtggagccgtctcacgatgactgcgtatcggtccagcacgtatgcacgatcgtctccttccgatcagccaacctggtggctgccacgctcggtgccatcttgaaccgcctgcgggacaataagggcacgcccaggctgcggaccacagttggcgtagacggttctctctacaagatgcacccacagtattcccggcggttccacaagaccctgaggcgcctggtgcctgactcggacgtccggttcctcctctcggagagtggcagtggcaagggagccgccatggtgaccgctgtggcctaccgcctggccgagcagcaccggcagattgaggaaaccctgtcccacttccgcctcagcaagcaggcactgatggaggtgaagaagaagctgcggtcagagatggaaatggggctgagaaaggagaccaacagcagagctacggtcaaaatgctgccttcttatgttcggagcatcccagatgggactgagcatggtgacttcctggccttggatctcggaggaacgaatttccgagtcctactggtaaagatccgtagtgggaaaaagagaacagtggagatgcacaacaagatctactccattcccctggaaatcatgcagggcaccggggatgagctgtttgatcacattgtctcctgcatctccgacttcctggactacatggggatcaaaggcccccggatgcctctgggcttcaccttctcgtttccctgcaagcagacgagcctagattgcggaatcttgatcacgtggacaaagggattcaaagccaccgactgtgtgggtcacgatgtagccactttactgagggatgctgtaaaaaggagagaggaatttgacctggatgtggtggctgtggtcaacgacaccgtgggcaccatgatgacttgtgcttatgaagaaccttcttgtgagattggactcatcgtggggactggcagcaatgcctgctacatggaggagatgaaaaacgtggagatggtggaggggaaccagggccagatgtgcatcaatatggaatggggtgcctttggtgacaacggctgtctggacgacatcagaacagacttcgacaaagtggtggacgaatattctctaaacagtgggaaacaaaggtttgagaagatgatcagtggaatgtacctgggtgagatcgtccgtaacatcctgattgacttcaccaagaaaggcttcctcttccggggacagatctctgagccactcaagacccgaggcatcttcgagaccaagtttctctctcagatcgagagtgaccgattagcgctgctccaggtgcgggccatccttcagcagctgggtctaaacagcacgtgcgacgacagtatcctggtcaagaccgtgtgtggggtggtgtccaagcgggcggcccagctgtgtggtgccggcatggccgccgtggtggaaaagatccgagagaacagaggcctagaccacctgaatgtaaccgtgggcgtggacgggacgctctacaaactccatccacacttctccagaatcatgcaccaaacagtgaaggaactgtcaccaaagtgtaccgtgtccttcctcctgtctgaagacggcagcggcaagggggccgcccttatcacagctgtgggcgtgcggctcagaggagaccctacgaacgcctaagagccaggatcctcccagcccccagcccgccacccttccagcactcctctctagaaccgacgaccacacaccgcccccgtgttccacccagcaagctccgctgggagacccagcgccggcacccactctgccgcagagggaggaaggggactgcagtaacggagcatcacatagaataccacccggagcgcgtgctgttgatgatctgatctctcgcctggacccctcatccctgccctgccactttgcatgattcaagttcgacctggccatgcattgcccaagcgtgaacgtagtggcacccacgtctaccgcaggcgtccagccaggaaagagcgacccccctcttggactgtcttctgggcccttccaagcccatctgtggagtcgcctccctccttccccccacccccgtgtgaagtgtgttatcaccagcagacactgccggactcctgcccacaggggcgtggcctgaagggcgagtgtgaacatggcactgctgttcccttccccctccctgcacccgccgcagcctgccatcccatttggatgtatcaatgccactgagttgtctgtccgtccgtggagccagtcctagccacattattgacagtcttgcattttgttttgtctcgtgatggtggtggtggtaggggtacgcttaggtgggcagtcctgtggggaaaacatcttgtctccatcttgctaggaagaaccaacccacaaaacaacgccatcactggaatctcccatcgctttagtgagccattgtcgtatgtctagtaaactttgtactgattcaaaa

SEQ ID NO: 1236 - protein, 915 aa, Mus musculus
MDSEHCPSVPCGGAGAWEARIDKYLYAMRLSDEILIDILTRFKKEMKNGLSRDYNPTASVKMLPTFVRSIPDGSEKGDFIALDLGGSSFRILRVQVNHEKSQNVSMESEVYDTPENIVHGSGSQLFDHVAECLGDFMEKRKIKDKKLPVGFTFSFPCRQSKIDEAVLITWTKRFKASGVEGADVVKLLNKAIKKRGDYDANIVAVVNDTVGTMMTCGYDDQQCEVGLIIGTGTNACYMEELRHIDLVEGDEGRMCINTEWGAFGDDGSLEDIRTEFDRELDRGSLNPGKQLFEKMVSGMYMGELVRLILVKMAKESLLFEGRITPELLTRGKFTTSDVAAIETDKEGVQNAKEILTRLGVEPSHDDCVSVQHVCTIVSFRSANLVAATLGAILNRLRDNKGTPRLRTTVGVDGSLYKMHPQYSRRFHKTLRRLVPDSDVRFLLSESGSGKGAAMVTAVAYRLAEQHRQIEETLSHFRLSKQALMEVKKKLRSEMEMGLRKETNSRATVKMLPSYVRSIPDGTEHGDFLALDLGGTNFRVLLVKIRSGKKRTVEMHNKIYSIPLEIMQGTGDELFDHIVSCISDFLDYMGIKGPRMPLGFTFSFPCKQTSLDCGILITWTKGFKATDCVGHDVATLLRDAVKRREEFDLDVVAVVNDTVGTMMTCAYEEPSCEIGLIVGTGSNACYMEEMKNVEMVEGNQGQMCINMEWGAFGDNGCLDDIRTDFDKVVDEYSLNSGKQRFEKMISGMYLGEIVRNILIDFTKKGFLFRGQISEPLKTRGIFETKFLSQIESDRLALLQVRAILQQLQSTCDDSILVKTVCGVVSKRAAQLCGAGMAAVVEKIRENRGLDHLNVTVGVDGTLYKLHPHFSRIMHQTVKELSPKCTVSFLLSEDGSGKGAALITAVGVRLRGDPTNA

SEQ ID NO: 1237 - DNA, 152473 bp, Homo sapiens
  misc_feature (1)...(152473): n = A,T,C or G
cactagaagaggagttggcacacttattctgtaaaagaacagatagtaaatgttttaggttttgcaggccatatggtctttatcaaaactaagctcagtgtcttaatatagaaaataatgggaaacatagatttattgttatgggtgctatccaagttgagagcttgagcagatgggaaatgtgaggggatgcttaggccatggacaccttgggagctgttgaactgagaatgttgtctaggaagaggctcagacaagaccaagactggccctggtggtttctttcctctttggcaccaatcttgtaactggaaggcaggtgagttgtggtaagcccagctgaagcaaggattgctccaaaaagaagggaccttccctttgaatcccaagttggggcacctgagtgtcatggctcttcccaaggggcagttcattctagttagctttgtgtctgtagccactgaaggctcacatttttggattgaggttttaagggggcagcacctttgaacttgccttgaaatcaccattttttgttctggtgttaattcccttaggctgatgaggtcttgagcagttaagagaacccaagcccagcacataaatgcttcccatttgactctgcaagcagtggcagtctggctctgtgtcactgttgttaatgatgatgtgtgtcaccatcacacaccctgtgcagagtgcctggtcagtacaaggccccttttctctcttgctctcttgaccctcatggagctcacggtctggtagaaaggaggaagggaattaatgcttttgagcacccctggtgcatgcagacagtttcaatgtgttaactcacagagtagaatttgcagagtggaacagatttgtagcacaaagccaaggagaattggctttggggccaagaccagggactaaattttgcttagtgcccactgtacccagatgcttgcctcctaacagtcttgtaggggcgctactcttctccctgttttgtagatgatagcttgcagtgcttgctcacatcaagcagctagtatgtggcagagctaggatctggatcttgctccatgcgtagctccaaagcctggccttctcacatcatgtggtcttctgcattgcaggtctgccccaaccttatccttcttctccaaacagatacgagaaaatgaccagtgggatgtacttgggggagattgtgcggcagatcctgatcgacctgaccaagcagggtctcctcttccgagggcagatttcagagcgtctccggaccaggggcatcttcgaaaccaagttcctgtcccagatcgaaaggtgacctgtgatcaagttcatcatgaggctctgactggcatatgctgccaccacgctggggttgggccaatttgaggtttaaaaataaaaacagaaaggccctggctgggtaagggattgcctcctggggctgctcttctctttccaactgattcaggatcgctttcaacaataataaactcatggccaaactgggctcatctataaagtcctgctgtccccatcctcaggctgggctaatttgaaacaaaccccacatcttacatcagttcatctataaatatttcataatgtatttctgaaatataaggattcttaataaaacataactacagtaccattatcacacttaaaaagctaatgataaacctcaatctcacaaaatatcctgttagtgttcttatttcctgaattgccaaaaattaatggtttttacagttcttttgtttgcatcagtatccagacaaagtttataaactgcatttggttgatatgcttaaagaatctcttttaatctatgggtttcctctccctctcttactttcccttgcaatgtatttgttgaagaaactgttgtcttatctatgagtttcctgtattctagattttgtggattgcagcatttagcattttcctctgtcttcttgtatttcccaaaaactcatagttagacccagatgcttaattagattcagtagtgaattctggacaagaatattttctaggtggcattgagttgtctgtctgtctctctttcttttaggatgttatcagtcattgatgcatattgcctggatctattatttcactagacatcgtaaatggtgatgattcctgcagttattagctggaatacttctagaaagaggaactttcccctatcaactctttggtgtaattatcattttgaatggctgcatattatactatgttactgtactataatttactaaactttccctttaatataggatgtctagtttgtaatttataaattcctgttattctgagtaacaccatagtttttcttttagtacacatagtcatttgaatacagtaaatcatttccttagtagtagaaacatttggttaaaagagtatttcaccatgggcgcagtgtttttttttttaaagtagtttcaatttccatcaccatcagttatgtacaaatgtgtcagtttcactgctttttgtgctagcactggatgttatctgatgctttgtgtttggattttctctccatttgtgttcattcatttaattctcttggtctttatggtcagatgcccacaagtgaaaaatcacttttcagcggggaaaaaagaaacacattatacatgaaagtggtttacttaatgaggcaaatcagatgggctgtttaaggggagttcttattgtttaaggagaggatggtggaatcagtaacagcagcagcgattatgtatttttggggtgtaaattagcaagtgttcagcatccttctcctgtctagtcttcaacccatccaatctgaacagatgggttaaaaatcatcacgcttggtgaccaaagggatcctgttttgctgtgtaaaacagcttctccctcataagcaatagaccgacaagtttacttatctttgccttgcttttttttttttccgtaataaaagaaaagttgttcctagacaagcacaaggtggtaacactcttatgccaccagaaagatttgcttctgctgcacaagaggtgtctgttttggatgttttgatttctacaggtttctgttgttgttttgtttttgttttctgagacagggtctcactctgttgcctgggctggagtgctgtgttgcaatcacagctcagtgcatcctcaacctcccgggttcaagtgatcctcccacctcagctgccaccactgctcctctcccctgctcccattccctgtcaagtagctgggactacaggcacacaccaccacacctagctaatttttgtattttttatagagatggagtttcaccatgtcgcccaggttgatcttgaattcctgggctcaagccatccatctgcctagaactcccaaagtggtaggattacaggcatgagccaccgcgcctggccaggttttgttttttaaaagcttcatggaataaaaaaaaaatcatatccacctagtgccagtgggaattggtaggtgctgtgctgactgcagcccatttcaaagcagtttgtcaaatggatgggacagtgttctccgggggaagtgccctgaatttacagtcttagagcttgagttttaagatttatctccactacttaacctgtttatgctgcgtgacctggggcaggttgtttcacctctttgaacctcagtttcctgcttcataacagaaataattgccctgttgcttaacccccaggattgctctgaggatcaggaagggaatgtacttgaactaggtaagctgtgaaaggctgggcccaggaaggaattgcaggctttctctttagacacaccagttaaaaaacctctttttcttactatacaaatgttattcattcattttagagaatctaaaaaatacagataaacaaaggaagaaaaataagaattaagctacgtgtggtggctcatgcctgtaatcccaggactttgggaggccaaggcaggcagatcacctgaggtcaggtagccaacatggtgaaactctgtctctactaaaaatacaaatattagctgggcatggtggtgggcctataatcccagctacttgggaggctgaggcaggagaatcgcttgaacccaggaagcgggtgagccgacatcattgcactccaacctgggcaacaagagtgaaactccgcctcaaaaagaagagaattacctgtaatcctcccaatgtctgaatagatttccttctgtgtgtgtgtgtgtgtgtgtgtgtgtgtgtgtgtgtgtgtgtgtctttttttaatctgggcaagggcaaacattaaaacaaaaagccagcatcatacagtgcatagtattttataatctattttttcactatgtcatgaagattttccatggtgtgaaatattctcacgcaaactcatcttttttttttttttgagacaagatcttacgctattacccaggctggagtacagtggtatgatcatggctcactgcaacctcaaactcctgagctcaagcaatcctcatgcctcagcctccaaatagggactataggcatacacaatcatgtctggctcatttaaaattttttagagatggggtcttgttatgtagcccaggctggtctcaaattcctggcctaaagtgattctcctgcctcagcctcttaaagtgctgggattacaggtgtaagccactgtgctggccacaaactcatctttaagatctatgaagaattctattgtttggctacaccgccatttacctgctgaatcccctgtatggtcatataggttgtttctcaattgtctttcttgataacactcttcttctctaagtattacctgagacagtcaaggatacaacttcacattgcttggtgtgggagtcagggctccgtttaagtaccattagttcactgtgagatgaccagggtctagacttgaagccagcctgcccctatgatgggtgtttctctgcatgtgtttacagtcctatcaggttccccttctctaaggttctgattgtattttgtatattcatttattcacttgctcattgaatataccctgctggctactactgaagatatagtcttactgtcaaagagcagagaaatgagaaaaagggaagaaagtgcagagaatcagaaaaagttaaatagaaggaaagttggcctccaattgaagggggccagagtgtgggagctggcacgatttgtgggaaagtgcgagaggtggtgtgaaaaggcttgaatttgagcccctgctctctaacgagagggcacagctctagcaggctgagccacagcctcctcttctgaaaaatgggtacctggtgtgttggttgctgcagctcatatggcttctagtgagatcacagatatgaacatgctgaacaccagaggcattcacactttattttttaaagttgatggaacttccaggggtggtggaccttcttgagtctcggcttctaaggcattctgctccagcctagccattgcctgggtcaatttctcctccctcctgtaagggcatctaagaatggggaggctgtgggtcacactgggcacatcccggggtcctgggaagcaggtcctgactccctgctctattgcctgcagcgatcggctggcccttctccaggtcaggaggattctgcagcagctgggcctggacagcacgtgtgaggacagcatcgtggtgaaggaggtgtgcggagccgtgtcccggcgggcggcccagctctgcggtgctggcctggccgctatagtggaaaaaaggagagaagaccaggggctagagcacctgaggatcactgtgggtgtggacggcaccctgtacaagctgcaccctcagtgagtgcccacaagaggcgtggcgggtggggctggggagggctggcggccaagtgtggacttggcatagcctcctgaactgcggcatgggaagatgcatccccgtccttttatgggaaaggagtgctgtgtggtcaagtcacctattcaatctgacagacaaggtgtgagccctggtgcctctgctacctggtaatacgatgtgggaatgttagccggcctctctaaaccccaggttcctcatccacaaaaggccagcactaataatccctaccacatagggctaaatgtgtgaggttgaaatgagttagcacatgtaaagtgcttcacacggggctcaagaaatgtaagttggctgagtgcagtggctcatgcctgtaatggcagacgggaggatcacttgagcccaggagtttgagaccagcctgggcaacacagggagactccatttccacaaacataaataaataaaatacaaaatgaacaaaaattacaaatattagctgggcgtgatagtgcatacctgtggtcccagctacatgggaggctgagctggggggcttgagcctgggaactcgaggctgcagtgggctgtgattgcacaactgcagtctacaccctgggcaacagagtgagaccatgtctaaaaaaaaaaaaaaaattagaagaagctgtttagagccttgaaaagcaaaccaaagggaagaagctaaagaaattagattatgatcatttataaatgttctgattctacatggaagggctgatgatgtttctttctctttttcatagcttttctagaatattgcaggaaactgtgaaggaactagcccctcgatgtgatgtgacattcatgctgtcagaagatggcagtggaaaaggggcagcactgatcactgctgtggccaagaggttacagcaggcacagaaggagaactaggaacccctgggattggacctgatgcatcttggatactgaacagcttttcctctggcagatcagttggtcagagaccaatgggcaccctcctggctgacctcaccttctggatggccgaaagagaaccccaggttctcgggtactcttagtatcttgtactggatttgcagtgacattacatgacatctctatttggtatatttgggccaaaatgggccaacttatgaaatcaaagtgtctgtcctgagagatcccctttcaacacattgttcaggtgaggcttgagctgtcaattctctatggctttcagtcttgtggctgcgggacttggaaatatatagaatctgcccatgtggctggcaggctgtttccccattgggatgcttaagccatctcttataggggattggaccctgtacttgtggatgaacattggagagcaagaggaactcacgttatgaactagggggatctcatctaacttgtccttaacttgccatgttgacttcaaacctgttaagagaacaaagactttgaagtatccagccccagggtgcagagaggttgattgccagggagcactgcaggaatcattgcatgcttaaagcgagttatgtcagcaccctgtaggattttgttccttattaagtgtgtgccatgtggtggggtgctgtctggggcatctgtttttcattttgcctgtggtttgtgttgcaggtgttgatagttgttttaaggattgttaggtataggaaatccagtaaattaataaaaaaattttgattttccaataaactttgcatgaagtggtgatatttcttctgggaggctcacttggtaataccatgctttgttgatggaataagggatgcagagtcagaaggagcttgagcatttttctcgagtccaaacttcctaccaacaggggtaatatatggaatatcttctacaatatccttaacagattatccagatgtctttagaatacttccagtaactgagcatttcccacatgatcctacagctcttgcctttgaacggctggagtggactggaagtccttctgacttctgagctcggttcctcccatacaccccactgatctccattctaccctgcagaactatgtgtaataggcctgtccctgaccatttctccagtggacttcctctctctctcctctcttccccactttacctgaactgcctgtgcctttctgttctgccacatagttatctgtatgagtttcacatctggccagatagattgtaaactctttgtcaaacacattcttgtattgctctagtgaacctagcactgtgccattcctatcaaatacttacttgtgggaggcatgattgaagaaatagaacttttcaagaaattttcttcagataaagtatagactgggtatggtggctcacacctgtaatctcagcactttgggaggccaagtctggaagattgcttgaggccaggagttcaagatcagcttgggcaacatatcaagacccccatctgtacagaaaaatttttaaaattagttgaatgtggtggtgcacacctgcagtcccagccactcaggaggctgaggtgcggggtatctctcgagtctaggtttgaggttacaatgagctatgactgcaccactgcactgcagcctgggcaacggaaagagaccctgcttcttaaaaaaaaaaagagagagagaaagagaaagaaatgaaagaaagaaagaaagaaaaagaaagaaagagaaagaaagaaaaggaaggaaggaaggaaagagacaactattgtcatgggaaacaaactgaaaagaataatccacagtgattttatttgtatttatgtgcttaattacatacttaagtatgacaactccacagagtgctcttgctgtctcttcaaaagattatggctttggtcaggcgtggtggctcatgcctgtaatcctagcactttgggtggctgaagcaggcagatcacttgagttcaggagtttgagaccagcctggccagcatggtgaaaccccgtctctactaaacatacaaaaaaaaaaaaaaatagccgggcgtggtggtgtatccttgtgatcccagctacttgggaggctgagtcaggagaatcacttgaacctggggggtggaggttgcagtgagccgagattgagcaactgcactccagtctgggtgacagagcgagactctgtctcaaaaaaaaaaaaagtttttggattccagctctaagcgtcaccatttgctgaagcgggatgtccagatggagtgaagggggctgagtctaaagacggagagagagagaggccagctagggctggggataatgagggagctgagggttccccaggacatattttttacactttcttttttgttgttttttgagacaaggtctcattctgtcactcaggttggagcatggtggcgcaatcacgaatcactgcaaccttgacctcccgggctcaaggcattctcccatctcagcctcccgagcagctgggactgcaggcgcatgccaccatgccagctgatttttaaattttttgtagagacaggggtctcactatgttgccctgacttgtctcaaactcctggcctcaagtgatcctcccgccttggccttccaaagtgctgagatttatagtcgtgagccactgtgcctggtccatactttcaatacaaatgtatggtgatactactgtgaacaggtcctagatttaccaaaattatctttttgtgtgtttgtgtattttaaggttatatctctttagagaaatgtcgtatgaatttattaaatgtatctttttatattttgaagttatgcctctttggagaaaggtttcaccttatcaggtttcatcttaatcagttgaaaaccttgctgtccttattctctttccccaggtctcccatttcatggtaagtcatcctcagctcccagtccctctttcccctggttctgctaggggtctttctctttgctgtctttcctggacaaatgatctgacccatagattcaggttgttgtgccactaagttctcccatgacctggtctctcagcacatgtttggcaggttagggaggtcacccagtcccttctcacccagccgtggtctcttacaagaaaaaggagacacaaggtatctaggcaagcttgcacattctgactaattgattgcatcatagaatccttgaacaagaaccagaactccagagagggaaaacatctatcttgctgtgtttggacaggccagcccctgaaacatcttgggcaatggagggttaacttctcaaagtttaataggcaagaccagcaaccatgcaacaaggtaaattgtcctcacgagaactccaaagactatttttctctctctttttttgaggcagggtctcgctatgttacccaggctgctctcgaactcttgggctcaagcaatccccccatcttaacctccccagcagctgggactacagccacgcgccactgcacccagctgacttttccttctaagcatctttggctgggcgtggtggctcatgcctgtaatccctgcactttgggaggccaaggtgggtagatcactggaggtcaggagttctagaccagcctggccaacatggtgaaacctcatctctactaaaaatacaaaaaaattagctgggcatggtggcaggtgcctgtaatcctagctactcgggaggctgaagcaggagaattgcttgaacccaggaggtagaggttgcagtgacccaagattgtgccactgcactccagcctgggtacacagcgagtctgtctaaaaaagaaaaaaaaaaaaggaagagagagcatctttatcttcattttctaacctttaagtgttactttctcccagtaacattttgcccagaaagaggtgatgaatatagatttaagaataagattttccccatgttgctgcctttccagaacaagtgagttcattctcatttgtctttcttcagaaatcttttatctgtctttctcccattagctggaatgggtgctccatgagaataaagacttgggttccattcttcctattgtccccagagcctacatactggctggcattgagtagcaattgaacagttttctgaatgaatgaatgaatgaatgctcaaataagcacatgaattaattatcactttcctttgaatctctccattcttcttcctcacccaatggggctcgatccttatacacagaagatactctataaatgatgattcaatgaatgccaagccctgttctatgcactgaagaccaaaagaaataaaagacatcattcctgctctgtaagaattcataggctagtaaggaaagaaagatatataaatatctgtaatacaacatggtaaacaggaacaaggtgacgactgttcctgaccatttcctgtatcctttagatcaggaactctcaacctttgtgcacgtgtatgtgtgtgtgcatgtaccatgtaccccttggacaatcaagaatacaagaaaccttgtattctttctcagaataatgtttttaaatgcataaaatacacaggattataagggaaattaatggcatgaattacatttattaaaatgttaaagtggcaccatggtaatacatgcatgtatttattaatgcattatgcagcaagatccagcaggaacctaataacaatgacaattttgaagtcttttttttttttttttgagatggagtctcgctctgttgcccaggctgaagtgcagtggcgcaatctcggctcaccacaagctctgcctcctgggttcatgccattctcctgcctcaagcctcctgagtagctgggactacaggtgcctcccaccacgcccggctaattttttgcatttttattagagatggggtttcaccatgttagccaggatagtctcaatctcctgatctcgtgatccaccctccttggcctcccaaaatgctgggattacaggcatgagccactgcacccggcctgacaattttgaagtcctgatgagtgtaaacactactttgagacatttgcaacaacagcatagatatgaatatatctgtgatttctctttttttttcttttttttgagatggagttttgctctgttgcccaggctggagtgtagtggcacaatctcagctcactgaaacctccaccccctgggttcagtcaattctcctgcctcagcctcccgagtagctgggattacaggcacctgccaccatggccagctaatttttgtatttttggtagagacggggttttgccatgttggccaagctggtctcaaactcctggcctcaggtgatccgcctgccttggcctccaaaagtgctgggattataggcgtgaaccactgcgcctgacccaatatatttgtgatttccactggagacaaagtcacagatgctgctagcactagtgggtttgttgcccacattcagaattaaaggaaatgctaaatttcagttacagactatcagaaattaatttgtatttttttcccacagaagcttacggatatcaccttctacctgaagggtctctgatgcccaggttattaatctctgatcagaatgttctaatggagctggcacttatttagagacagatcttagatggcagatctaagcaattttagcattccttgtagtacagcactgatggtagtaaattcacgcaacttttgtttgtctgaaaatgtctttttacccttccttttttaagaatacacaatacacagttctagtttggtacttttttcctccagtattttaagaatgtcatttcattttcttctggcttccataatttattttgggaagtcagttataattcttattactgtttttctgcaagttttttttttttcccctttctagctgtttgtaagggtttctctttctctttagtttccaacagtcatttaactataatgtgcttggatgtgtttttgttttagtgcatgtgttctttttttttctttttttaaatttatcttgcttgggctttgctaagatcttcttgaatctgtgggttaatatctttcattgtttttttgaaaattcttgttttatgactcattatttctcctctttccttctgaaattccaatatgcaaacattagagcatttcatcctgtcttacatctctttcaagttctgttccagtttttttgccattttttttttctctgtgcttccgtttgcataattccttttctttcttttttaccttttttttttttttttgagatggagtctcactctgtcagccaggctggagtgcagtagtgcaatctcagctcactgaaatttccgcctcttgggttcaagcaattctcctgcctcagcctcccaagcacctgggttacaggtgcccgccaccatgcccagctaacttttgtatttttatttatttattcatttatttatttgagatggagtctcactctgtaacacaggctggagtgcagtggcgtgatcttggctaactgcaggctccacctccggaattcatgccattctcctgcctcagactcccaagtagctgggactacaggcgcccgtcaccacacccagataatttttttgtatttttagtagagatggagtttcaccgtgtcagccaggatggtctccatctcctgacatcatgatccgcccacctcggcctcccaaagtgctgggattacaggcatgagccaccgctcccagcctaacttttgtatttttagtagagatggggtttcaccatgttggccaggctggtgtcgaactcctgacctcaggtgatccccctgccttggcctcccaaagcgctgggattacaggcatgagccactgcgcccagccagtttgcataatctccaataactagtcttcaagttcagtgacagattttttttctgctgtggccaacctgctcttaagcctagccaatgaattcttaatttaaaacattatatttttcaattgtagaatatccatgtccttttttagagatttaatttctctattgacattatttatcttttcgtccattttttctaacttttcttttatttttctttaacataattacaaaaatcatcttaaagtccttgtctgctaattccaacatctgggttacctgtaggactgtttgtgttgtctattttttctcttgcttacaggccacatttttctacttctttgcatttttttttaatattaagcataaatagccatagagtctgatgtagatattatttttcaccagaaagagaacactctttcttctctcaggcagctaaggtgatggactgatcactttgatccagtctgatattgagctggatcagttcacttttcgtttcaaatatcagctgagcatagtggctcatacctgtcatcctagcactttggtaggctgaggcaggatgaccacttgagctcaggagttcaagaccagcctgggcaacatagatctcatctgtatttttttaatttttcaaattttaatttaaaaaatacttttgcccaggcgcagtggctcacgtttctaatcccagcactttgggaggccaaagcaggtagatcacctgaggtcaggagtttgagaccagcctggccaacatggtgaaaccttgtctctaccaaaaatacaaaaagtagctgggcatggtgtcacacacatgtaatcccagctaattgggaggctgaggcaggagaattgcttgaactcaggaggcagaggttgctgcgagccgagatggcactccagcctgggtgacagagcaaaactctgtctcaaaaaaaaaaaaaacagtttcaaatatcttagagtcatgcctgtcttgtgtttattacaggcccttttttcaagcagccttctctttctcaaatacaacaatattatagggtatctttctctgaatttcaatctagccttctttactgcccagaacttagcaaaaatcctatggggagaactggcaggtggggaaaaccagctatgcatttgaagcttctccagattctactctgtctagccagctcacatgaccataaaagctggctgctttctcattctctctgagtagtcttgcctctattctggcaagtctaatctcccccaacccatgccgagactcaacaaatgccctcatagaggaaagcagtcatgaatctccactcactttgggagggtcccttctgctctggaatttaattccattagatttccagccttccagtatctctaaaaagaaatatatatgatttttagtttatccatatatattttttctaattgctatagtggacacaatggtctactgctcccctcttacatcctatatcctaaccaccaattctaaatattttaaattcccattacaatgtcttattttattcatgagttattaaaaaaaaaaaaccaaaaaacaaaaaaccttttaaggccgggcacggtggctcacgcctgtaatctcagtactttgggaggccaaggtgggaggatagcttgaggccaggaatttgagaccagcctgagcaacatggcgagaccccatctctactagattaaaaaatacataaaaaataaaatttaaaaaaaaaacaacttaaatttgtacatttgtaatttccaagtatattgttttaaatttgatcattttgttaattttaacttaattatatgttgatttatggcctatatcagggattgactaattacttctgtaaagggccaggcagtcacaattgtaggctctgtgggccatatgatctgtgctgttgtaacaaaaaaggagccatagacaacatgtaaatgaacgggtatggcttggttctaataaaactttatttacaaaaataagtgacaggttggatttgtcctgcaattcagtttgtcaatccctggtctaaattatcttaattatttacaaatttattaagacttgctttataaatatgtttgctttgaaatttgagtgcttttcatgtgcacttaaaatatattctgtattagctgggcacagtggctcatgcctgtaatcccagcactttgggaggccgaggcaggtggatcgcctgaggtcaggagttgagaccagcctggccaacatagtgaaatcctgtctctactaaaaatacaaaaaattagctgggcgtggtgccaggtgcctgcaatcccagctactcgggaggttgaggaaggagaatcgcttgaatccaggaggcagaggttgcagtgagccaagattgtgtcattgcactccagcctgggcagcaagagcaaaactccttttcaaaaaaaaaaaaaaaaaaaaaaaaaaaaaaaatatatatatatatatatatatatatatatacacacatatatattctatattaaataagtaattctatatatttattagattaaacttgttttgttgttcaaatcttttataactttgttgattttgtttgtttgcttgcttgatctaatggcagagaaaaatacatttaaatttattcttgtaatgtggatttgtcagagtatttctgtaggtctaacaattcttgctttaatatttagaggttaatttattagaatattaacatctggccaggcacagtggttcatgcctgtaatcccagcactttgggaggccgaggcgggtggatcacctgaggttgtgagtttgagaccagcctggttaacgtggtgaaatcctgtctctactaaaaatacaaaaattagccgggtgtggtagtgcactcctgtaatcccagctactcgggaggctgagccatgagaattgctccaacccgggaggcggaggttgcagtgagctgagatcgtgccactgccctccagcctgggtgacatagtaagactctgtcttaaaaaaaaattaatatcttaattttaagatattaattttaaatgattaaaattatttaattattaattaacataataattaaacatcaaatcattcaatcatttaattaataataattataactataactattatctttatatataattacatataataggatattttatatatctatatatatcctacatatatgtaggatggaagcgaaggattgataaatgtatcttctcccaaagaagacaagtatttcagcatgcttttatgtattttagtctctcttacccctatagcccatcatactgaaatggtctagaattttagttatgtgctattattcataaactttcacttatttggcttcctctaagtgttttgacggagagatattatgtggcaagctgagggtttaaatcactgagaatatttttattatgccatcatatttgaatgctaatttcgctggatataaaattctagattcaaagatccctttcttctgttctttaaatctattaccttattcttttcttgcatcattggttgcaagtctaatgccaatctggttcttgtttctttttgagtaatctgttttgtgtctctgaaagcatttaaaattttctttttggctgggtgaagtggctcatgcctataatcctggcactttgggaggctgaggcacgaggattgcttaaggccaggagctcgagaccagcctgggcaaaatgttgaaaccccgcctctattaaaaatacaaaaattagccaggcatggtggtgcccacctgttgtcccagctactcagaggctgaggcaggaggatcacctgagccttgggaggtcgaggctgcagtgagccatgatcatgccactgcactccagcccgggcgacagagtaagaccctgtgtctaaataaataaagaaataaataggattctactttagaaattttatctagcttttttcatttattattatatattacaaaaaggctttcccactctccatcttttgtatttttgtagctccttataagcctaaataaaatactatttaccacacaactgagtgctgataaaagtggtttgttttaggccaggcacagggctcacgcctgtaatcccagcactttgggaggccgacacaggcagatcacctgaggtcaggagttcgagaccagcctggccaacatgacgaaaccctgtctctactaaaaatacaaaacttagctgggcgtggtggcaggcgcctgtaatcccagctactcaggaggctgaggaaggagaattgcttgaacctgggaggcgaaggttgcagtgagccgagattgtgccattgcactccagcttgggcaacaacagcgagactccgtctcaaaaaaaaaaaaggtttgttttatagtgaactgtggagggataagggacaaagctgggcacaaaaatagatctgatggtagggttaggactgagggggcagaggaaatgagactgacatttcctagggaaactgacaggttagccaatgttcctattccaatccatcttcttggaaactgcctgccatttcctctgacatctgaagcacttgctgtaaagcactcactgcttacactatggctgcctggctggctttccttgagaatatgtatatttaatctgtattttgtctatgaagctttttgagggctctgtagttctactccacacattgcccactcacccatcccattttcctccggtagctgctacatggaaagtactatggatcaaattggaaatccatctctcctctcaaaggcagctaaagctatgtggtcaggctctgggccccagattccagtcctgatttctgagtctgctttccaggtcagggaatgcactggggctgacgacaaggctggaacgtcccgggattgaagcttggatccgaactgttggacggcgtctggagttttgcacaaaagagaattgaattgtagatcagctgggaagttactgtggtagtcctggtgccctgcggcctccagcgactggaaccctgtgggagcacatagctggcattttttgctagagattaggaagtcttttgcttcctctgtgaaaaggcttgaattcaatggactgtgtggtaagatgaagttgttttttttttcccttattgataaaaataaaacagagatttggcttgggttattacgcagtggtgggcacatgagcttgctctccagtgtttggcgggaagccagttgaagagcatgtggttacatttttgtccggcatcatcaagagtgtagagaagctgtgattctagcctcagaggagcgagtttttattgtggggtgactcttcaaagaccatctttatgcaagaaatgtcagaggcccatttcatagtaagtttctttggaagttttgttttcgtcgatgctatattatcactcatgggctgatgtcgtctccttatgatggtgtccctaagagccttcacaggcctagggagcactggttggtggtgggaggcccaggctgagaggcaggtctctgtgttgtatttcttcctgggctttagtctgtctctttctaaaatgggctaatcctctctctgccctcttcctcatgtggtgaagggcgttgggacaacatgcaaatatggttcaaaggagaagtgaagctgctcttttgtactctgtcacatttgcttgctctgaattgggtcttttgttagcacattctttgaagtagaacttgtccatggttgactttggtgtcttgatttggagaagaaattgagtagtgcccaactgcaggtagactgagaggctgaactgggtttgcatggggtttgcaggatgtgcagaatggttaaatgaatgtatgaatgaacatatgtagatcgaatgtttgatggggaacctcagaatgacccaagaaacatgtttctccagaaactaagtagatcttgggctgtgaagtatttagtacccataacaagcaatgatagtttaaatatgtagtccaaaaatttcttcctcatcagtcaagtcataaatgcaggacttaaaggaaaccacatgtgagaggtgtctgtgacctaggatattggaggcctgggtcacagttaggaatcaggacctcgcaaaatttacttaacattctccagaatgtggcccaatctacaaagccaccctcatgtcagctgctcagctggagagcacatgtgcttgaagtttctttcaccttcactcttgctttaataaaagcatgtataagtccaggagcttattttatactttggttgatcagcgattgtgtcttcactaagaaccacccatattgtcatccttgggcagacacgaggaaggatgaaaggattgacctgcgagaatctagagaactaaggccaagggaagcaggtcagatggaggtagattgcatctcagatttaactggccaatgatgaaaaaaggttttgttttttttttttagacagagtctcgcactgtcacccaggctggagagatctcggctcactgtaagctccgcctcctgggctcacgccattctcctgcctcagcctcccaagtagctgggactacaggtgcctgctaccatgcccagctaatttttttgttttgtatttttagtagagacagggtttcactgtgttagccaggatggtctcgacctcctgactttgtgatttgcccacctcggcctcccaaagtgctgggattacaggcgtgagccaccacgcccagcccggaaaaggttttttaaagagtgaggtagcacctacctggatcttgtcttgggtgggtgctatggtctgcatgtttatggccccccaaattcataattgaaacctaatctccgatatgataatattagaaggtggggtctttggaggttattaagtcatgagggtggagccctcacgaatgtgattcatccccttataaaggagaccctagagagcttgtctgccccttctaccagtgaggacggagtaagaaggctgtctttgagaaatgagccctcaccaggcaggcaccaaatctgctggtgacttaatcttggatttgccagcctccagaactgtgaaacatacatttccatcatttgtaagttacctagccaatggtaatttgttgtagcagcctgaacggaccaagacagtgagggtgggagtggaatatgatgtgctagattctttccagttttcaaataatatgcttttaccttctggagtttcatcccctgtgccactaatctctgaattgctaaaatctttgcatttttgtctcctactctccactttatcaaacaacctgtcctatgtctctgtatagctgcagactcttatcagacctctcaaaatatcgtttatgacttcctcttccatgtggaggacatgagagagtgagagagaactgggatcttctgtacttttaatgagtgaatccacatgattgtaggcatctagaatagggctctcaaactttagcaggtcacagaatcaccaggagggcttgttaaaacacagattcatggttccaccccaatgttttccattcagtaggtctgtggaagggcccaagaatgtgcatttctaacaagttcccacctaatgctgttgttactggtgcagggaccacactttgagaaccaccaccctagaggacggggaccaagccagcccactctcagtaaaatcccaaatgcagagggggcagattaataagtaccagggtgtgctgtcctcttcctcctctttctcttcctcatcctcctcctttatcgaggcttacctgatccctgcctcaggggcctccaaagaaaactctgacttagaccaatgtgtcccagattcaatgtcactttctataggaagccgttcatgaaccccaggattagatgttgtggcttcctatactttttcttgatagctatcatgattcacaatttgcaactgtgatttgtgtgatttcttaatctctgtttcctccagagaatgtaagctccatgaagacaggatatacgaatagtaggaaaaaaggaagggtttgggtggggaatggtggtgagtcacccttaggattgtgcacaataaaagagagtgaaacaacagattttgtccccaaagaataaaggaaggggagggaggaggaaggaaaaaggtggcctggaatatccattagaacgttggctgccaagtctagcccagctctctctggtgccaaccagaggtttgcctgctctattttggccacagagtgggcatttcatctctccacgcattttaaaatcctagttgtttctttttttagctctgagctacttacccgctctaagcctcagctacagcacccataaaacaaagaattaaggctccatggctgaagagacctaagtacaacacccagctctgctactgttgcatttccatgagtgcctgaattaactcctgtaagcgtcggcttccctcctgaaaagggtttctactcctaatcttgttgggacacttccaggaatcagggcacatgaagtccttagcacaatccctggctcaatgcacatgagtggccattgtcatcaccatcttcaatatcaccgtcctcctcaccattgtcaccatttctgtccccacacccaaggtttctgaggtctcaatgggataaaataacttcataaccatgaagcactgtctgaatgtcaagggcatccaagtgccccatcccctgcccacaagtcctggagtaacatccaaggatgccttccttccccaggacgctggcgcaggctcaaccccttgcaagcctttggtgactcttgattttacgacaaatacatcttttgtctcttctgttttcaggacttcaactaaccaactaaagaactgttccccagagcattgttcctgagaaggaaaagagtccaaacacctacccacacctgctttgtgccaagaatccacagttggattgcaaggacagtgtatgttgtccttttggaaaaatgagagtgagcccaaatgaagaacaagcaaaggtgtctcaagtcatcccaaggcaactagggggttgcctgggctgtgacggcctcacttctgcatgagactctctctctggcttttcgcattaagtagcttcctgtccttctctgtaaaacaaaatgaatgagctgggtgcggtggctcatgcctataatcccagaactttgggaggccgaggtgggtggatcacctgaggtcaggagtttgagaccagcctggccaacatggtgaaaccccttctctactaaaaatacaaaaaaaaaaaaaattagctgggtatggtggcaggcgcctgtaatcccagctacttcggaggctgaggcaggagaatcgcttgaacccaggaggcagtttgtggtgagccaagattgcgccactgcactccagcctgggtgacaagagcgaaactcagtttcaaaaaaaaaaaaaaaaaaaaaatgaatgaaggtataatctggcagggtgcggtggctcacacatgtaatcccagcactttgagaggccaaggcgggaggatcacttgagaccaggagttcgagaccagcctgggcaaaatagagagatcccatctctaccaaaattaaaaaaaaaaaaaattagcctgacgtggtggtgcatgcctgtggtcccagctactctggaggctgaggtggaaggatcacttgggcgcaggaggtcaaggctgtagtgagcccatgatcgcaccactgcactccagcctgggtgactgagtgagaccctgtctcaataataataataataatataaataaaaataaaaataaagagctggctgggtgtggtggttcatgcctgtaatcctagcactttggaaggccaaggtgggcagattacttgaggtcaggagttcgagaccagcctggccaacatggtgaaaccccatctctactaaaaatacaaaaattagccaggcatggtggcaggcaactgtagtcccagctactcaggagactgagggacgagaatcgcttgaacacaggaggcggaggctgcaacaagaggttgcaatgagccaagttcgcaccaccgcactgcattccagcctgggtgacagagtgagactctgtctcaaaaaaaaaaaaaaaaaaagaaaagaaaaaaagaaaaagaaaataaagagctatccaagtctcaggatcttaaaaggtagatcctggggtttaagcccacttattttacagatgaggcccagagagaggcaaacactttcccaaggatacacagtaatttgtaactgggccaaagctcactatagttaagtctttttgtttgaggtgactgagataatgccatctatgattttttcttttaaggcaaatgctgtgctgatattcctcacagtttgagacttgtaaaatgcctctcttccctgagtacccatctgtcctctactaccctcagggtttgggactgatgctctgcagttgagggacagtgtgcaagattggttaagaatggaggagcctgatttcaaatctcagcttggttagcttacagccatatgaccttgggaagctacttgactgctgtgagcctcagtttcctcatgtgtaaaactgggaaaatagaacttatgaggagttcttgtgaactaatgcctgtgaggtattatatttatagcagtgcctcgcagacaggaagtattcaataaatgctaatttattgaatttaatgacctccaagagagttgcttaagggcaaagtggaagtcaattgaatagtgggtacatcctctctgaaagcaaggctaaaactatgtaaaaaaaagcatcactggaaaggaagaaggaatccagctgcttaagccaagtggagtggctcactcgtgtaatcccagcacttcgggaagctgagagaggaggatcactggagcccagcagtttgagaccagcctgggcagcatagtgagatcctatttccctttttctgagacagaatcttgccctgtcgcccaggctggagtgcagtggcacaacctcggcttactgcaacctccgcctccagggttcaagtgattctcctgcctcagcctccagagtagctgggattacaggcactcaccaccacgctcagtaatttttttagtttttcttttttcttttttttaagacggagtctctctttgtcacccaggctggagtgcagtgacatgatcttggctcactgcaagctctgcctcctgggttcacgccattctcctgcctcagcctcctgaatagctgggactacaggtgccagccaccacgcccggctaatttttttgtatttttagtagagacagggtttcaccatgttggccatgatggtctcgaactcctgacctcaggtgttctgcccaccttggcctccccaaatgctgggattacaggcatgtgccaccgcacccagccgtgagatcctattccttaaaaaaacaaacaaacaggccgggcgcggtggctcacgcctgtaatcccaacactttgggaggccgaggtgggtggatcgcaaggtcaggagatcgagaccatcctggctaacatggtctctactgaaaatacaaaaaattagccgggcgaggtggcgggcgcctgtagtcccagctactcaggaggctgaggcaggagaatggcgtgcactcgggaggcggagcttgcagtgagccgagattgcgccactgcactccagcctgggcgacagagagagattccatctcaaaacaacaacaaaaaacaaacaaacaaacaaaaaacagaaaggaatccagctattagcaaaattcaaatgaattgtggatttttctgttattaaaatgtagagatatcaggatccctaaactcaagtaaatgacacaataaacgaagcatcaaatttgaagctgtgttatgatggtgcctgtgccagatttgggggaagggcaatacttggcttacacagatgctctagatcttgaagagggagagaggggcacagttctgcggcgacatgtgcgagtaccagagagagggccagttacttcggggtggagagtatatggagaatggaatgactagctataaaccagcttgcatggtgggctggtggaaacaccagtttctacatgacctctagaccaaacactctctagacaaaaagcaactctgctttgaatgaccttcaaagcgaatgccctgggccagtcccaagggttccttcccctcctcctactccgtctcctgggtaacaacattgtaagactgggaagaaaggaggtgatagcataatcttctctgtcatgttacagacccagggagcttttaagaaataaataccaatgggaaagaggtaacatgcattctctgcaagtactttggtaactcatagcagtgttttaactagactcgggaagttgcctggggatcagaaaggaaggcaaaaatgtgtgtggaatttgtcaaaatttgttaagcccatatagcataataaggagaacatctatctataaaaacaaagttaaatcataaattatagctgagtacagtggctgacacctgtaatcccagcactttgggaggctgagggaggagaatcgcttgagcccaggggtttaagaccagcctgggcaacatagtgagatcccgtctctacaaaaaattaaaaaattagccagctgtggtagtttgagcctgtagtcccagctgcagaggctgaggtgggaggatcacttgagctctgaaggtggaggctgcagttagtgtgattgcactactgcactccagcccaggtgacagagcaggacgctgtctcaaaaacaagcaaacaaataattgcaaggcatatattttatttttagatcacgctttacttttttttttttttgagatggagtttcgctctcgttgtcctggctggagtgcaatggtgcaatctcggctcactgcaacctccgcctcccaggttcaagggattctcctggctcagcctcccaagtagctgggattacaggcatgtgctaccatgcccggctaattttttgtatttagtagagagggggtttcacctcgttggtcaggctggtctcgaactcctgacctcaggtgatccacccacctcggcctcccaacgtgctgggattacaggcatgggccacctcatgaggcgcctggcctcatgctttgctttgaactaggggaaccatcagtgcctctgtcgaggaagctcatagagaaaccagggacaaatcctagaaggctttacgctttcagccagggctctccatatcattttggttatgcactccatcagtaaaatatttttgtagacacattgtattagtctgttttcgcactgctataaagaaatggccctcaattatgtcataataacatcacacaagtatttcagttgaaaaaaaagaaaagaaagaaaaagaaatgcccgagactgggtaatttaaaaaggaaagaggtttaattgacttacagttcagcatggctagagaggcctcaggaaacttgtaatcatggcgggaaggcaaaggggaagcaaggcaccttcttcatacggctgcaggaaggagaggtgcagggtgaagggggaagagcctcttataaaaccatcagatctcatgagaacccactcactatcacaagaacagcagggggggaaccgcccccatgatccaactccttccacctggtctctcccttgacatgtggggattatggggactatggggattataattcaaaatgagatgtgggttgggacacaaagcctaaccatatcacacattcctcagtacatatattttaattattttgagattatatatctttatgagtccacttatgcgaaatggccagaaggcaaattcacagacacagaaagtagattagtggttgccaggggctgggggaaggatcgaatgagaatggctggtaatgggtatgggtttccttatagagtgatgaaaattttctggaattagtgatgatggttgcacaaccttatgaatatacagaaaaccactgaattatacactttaaagggtgagtcttttggtatgtgagttatagctcattttttaaaaaatcacatataaataatgtgtacattataaagaatagccttaaaaagttatagggtgagattttaaaagtcgtaagtagactgaatgcagtggcttacacctgtaatcccagcactttgggaggctgaggcagggtaatcacttgagaccaggggttcaagaccagcttgggcaacatagcaagacactgtgtctacaaaaaaaaaaaaaaaattaaaaattaggctggcatggtggcccatgcctgtggttgcagctactcagcaggctgaggcaggaggattgcttgtgtccaagagttcaagtttgaggctgcagtgtgctacgatggcaccactgcactccaacctggtcaacggactgagactctgacttggccttttggagatgtctttgctaatttccacttctattggatttcctctccaaagcatgactctttctttggacatagtcataagcagagaaggttgtagttggtgacgaggtaccacttccagaccaggctccagggaatttcttctagaatgacaggctgccagaaaccttgactgggtgcagtagctcaggcctgtaacccagcactttaggaggctgaagtgggaggtttgcttgagcccaggagttcgaaaccagcctgagcaacagaagctgcagtgagctatgatggcgccactgcattctagtctgggcaacagagcaatactctgcctcaaacaaacaaaaggagaaactttatgacattttacctgggtttacgaatactctagaaatgtgtctgcactatgtcttggttctcagtattagggtgtttagcttcctaattggtgaggacaaaaatgagaccgacaatcctctgaccctgccttctttgaacttggcctttctctaggcgttcaagacccagctgttgagagtagaaaagcagaagaaaggacccgaggtcagcaagtgccctccccacaatggggcagatctgccagcgagaatcggtaagctctggtgtttctttctttctttctttttttgagacgtttttgttccatcgcccaggctggagtgtagtggcgcgatctcggctcactataacctctgcctcccgggttcaagcgattctcctgcctcagcctcccagtagctgggattacaggcatgggccaccacacctggctaattttgtatttttttgtagagatggggtttctccatgttggtcaggctggtctcaaactcctgacctcaggtgatccgcccacctcggcctcccaaagtgctgggattacaagccgctctggtgtttctttagcttctcagagggctcacatgtaccatagcctgctcaacctgctctccctggcagaggggtgtgttggggtccatcttagaggagggaaaactctgaccaagagcacagcaggaaagcgtcatgaggcaaggcaggagccccctcagacccagcctctaagtcttggtgcagcaggggccacttgtgttctgaccaagggaagcccagaggatcgttctgtatccccctggttaattgctttttagacagttatgctgcgaagtcatcagtgtgtgctggaaataggagtttggctttttcttctctaagagaagccccctctggctgaattttatattgccatgtaaaaatgggcttctgcccattaaaaaaaaaaatttttttttttttttgagatagagtctcattctgttgcccaggctggagtgcaatggcatgatctcggctcactgtaacctctgcctcctgggttaaagtgattcttgtgcctcagcctccctagtagctgaaattacaggcgtgcgccaccatgcctggctaattttgtatttttttgtagagatggggttttgtcatgttgcccaggctggtctcgaaaccctggcttcatatgatccgcccacctcagcctcccgaagtgctgggattataggcgtgagctactgcacccggccaatttttttttttttttttttaaattttaacagagacaaggtcttactatgcttcccaggctggtgttgaactcctggcttcaagtgatcctcccacctcatcctcccaaagtgttgggattacagtgtgagccactgtgcccagcccagaagcccgttcttacatcttaaagagctttgattctccccctggatgttgaaataaaccctggaaaatgtttataggataaattatgttctgagtagcgggctcatttcaaattaatctatgctgtaggtgggtccctctgaagcaaggactacagctgttccaccccgccccccaccaacagaacaatctgggaaattgagacacagtgggcttgatctcaaagacaaacacagtgctcatactaactgagtgccctgagcccagaacactctcagagccccatttaaatcactgcagtggcctggcctgtttgctttatgaagactttcccctggtcagcccttgggtggcaaattaattcctgattagtatctgaaagtggacaatacaagctcaaggagttgcttccacctcgaggcaagaggtgagggtcttgggcacgcctggggtggttatctttccctcagtcctacaagagtagcttacaatgccctcttcagcttctttgagaagggctttgcaaagtccagctcaggtgcatccctcctgcctcccagggtttttcgtttgtttgtttgttgttgttgtttttgaaacagaatttcactcttattgcccaggctggaatgcaatggtgcaatcttggctcactacaacctctgcctcccaggttcatgcagttttcctgcctcagcctccccagtagccgggattacaggctcccgccaccacgcctggctaattttttgtatttttagtagagacggggtttcaccaagttggccaggctggtctcgaactcctgacctcaggtgatccacccgcctcagcctctcaaagtgctgtgattacaggcgtgaacctctgtgctcagcccctctcaggcttttgagaggattgaattctgtcctgttcctaatgcccaactggaagctctcagcctcattctcctttgtggaatccaaggctcctgtgtggttgtcagtggggagtggaggccactaaatacagaaaatcaaaattcctcttagccgttgggtctcttaggcctcttccttttctcctccttcaccccgcaaccagagtgagaaaagttttgcctgctctgggaaagaaggagcccttctaaacctggaagcttgtttgggatgtcattgccacctctcatggcccccttcttgtgcccctgcctggctttgccagtcccaggcagaatgccaccaggaatttaaagcaggccaggccagccttggagaggtggcacaaagcagccagtgtcacaggcgccatgtggcagtcagcaggtttggactcctgcacccagagttcagtgtcaatctgacgacaggccctctttggtgcttggaggtccagggagaggagcacaggttctgggatctcagacacagatggaaatccagcagctggacgttgatttggtcccatcaattagcccagagcagttgtagttcttattgcctggagcctctgtcaatccatgatctttattgtagctgctgccatttaccaagcaaatcctctatgcccaccactcccaaaggcccagtgaagaaggtgtcattcccactttacagatggggaaactgaggcttagagaggttaaattcctttgccaagcttgtacagctggtcctggcagatccaggacataaactcaggactctctcactccaggactgtgctctttctacccaccatcaagctcaaggctgaaagtgaggtgtgtgactccaaccctatcttcctaaggatagatatattttgagttgttccaagcttagaaactcatgctcgggatattgaaatttccactgttagtgtaaggaagggccaaaaattgcatggtccatttggtttctttctcataggtttcctgacaattccaagccccagagagtatttttccctgttgccttactattaattctcatgtaggcttggaagtatctgcaagccttcattagagccatttcagcagggagttggctatcatgggggtgtcagtgtaaggcctaggcagttttggctttgggcatgtggaaaacctgcctggattgttctggaagctcagactgtctatgggatgctattttttgcttccgtagttttcctaggaccataattttttttaattttattttttatagatgggatattgccctgtcacccaggttggagtgcagtggcacaatcatggctcactgaagccttgaactcctgagctcaactgatcctcttgcctcagcctcccaagtagctgggactagaggcgtgtgcccccacaaccagccagtttttaatttttttttgtagagacagggtcttgctatgttgcccaggctgttcttaaatccctggcgtcaagtgatcctcctgcctcagcctcctaaagtgctgggattacaggtatgagccactgcacccagcttaggaccttgattatgtgaggtaggacaagaagtgctggaaagatcatccctgccctccaggggagatacacacatggattacccctgattcttacagggactacctgcatgtccatgggctgctatgcaagcttccaggaacttcagtctccttccttatagagtgggattgccccttgtgctctgtcactctgggttccatcccttctcacccactaatagtggggaggaagaagaagagctaatatttatgctgtgctttctgggtctgggcactaagataggaggcactttacaggttgttattacagataaagggctgaggagggcctcagtatttgtattcgtatttttcccccagttttcccccaacctccaatgctgcagagatacctgcaggggtgagtggagattgacaatcagaatcctatgagatctccaagttgagagcagagtcctttgaagtccctaggcgtcaccaatatacttgagtttgggctacatctgttctgacttggggctccccagaaagtttgtctctagcagccctgagattggttgggaccaggacccaccctatcccctgctagtggtaggtggaaaggtggggtgaggctctaatccatctgattcatctcccctttcactggacaagactgatttggcctccactggctccagagcaggcatgctggctacactcccaacactcatttctggaggtgtgacttgagcccattaccaagcatttttattcacccccctgctccctatctggcatcttctgtatgtggggacgtttatcaactctgtgctccttgggtagccttcttctgtgcccagtgacacaggacagctcagttcccagcctcagccagatgccctgggcatgttaggcaggtgggctggtactcacatgtgcctgaggttcccagcctcagttcacctccaataggtctaggtttccttttccatgaagtattccagcaaccagaaagtcaagcatctaaacaggccagcttgcacatgatttttggagatactggaggaggaaggaagatatctccaagatatgtatgcactgtcatttctgcctccaaccttgaaacccttctctgtatcagccagcttttgctatgtgtgtggtgtaataaatcaccttaatacttagtggcttaaaacaataatctcttatttaccggcaatcctgtgagttggtaatttggactgagctcacctggaacggctcttctctgtcccatttactgtcagactggctccctcagaggtctgcaggcagcttgaggtctgtggcttctcttccacatctgaaagttgactggctgtaggcaagggtggtaactgggccatgtgccacacatgttcagcagaataactggggctcattcacatagtggtggttgcaagggttccaagagcagcatgggaagtcaagccccgaagcacaagcatatttctttcttttttttttttttttttttttttgagacagagtctcccactttggctcaggctggagtgcagtggcgtgatctcggctcactgcaagctccgcctcccgggttcacgccattctcctgcctcagcctcccgagtagctgggactacaggcgcccaccaccacgcccggctgattttgtgtatttttagtagagacggggtttcaccgtgttagccaggatggtctcgatctcctgaccttgtgatccacccgcctcggcctcccaaagtgctgggattacaggcgtgagccaccgcgcccggccctgcacaagcatatttcaagtgtctgtttgcatggcattgctattgtcctatgagcccaagcaagtcacatggccagttctggagttgctgtgagtggagactatgtaaaagcatgggtatagggaggagaattagtgtggctgttttttgcaaacaatttaccacaccctccctatccattcagctatcatcaggaaaaaattcatatgagcttttctcttgattggcagcagcttccaaaatttgtgaggcaaaggaagttataaaaaagcagaatctgccaggggcagtggctcacatctgtgatcccagcactttgggaagttgaggcaggtggatcacttgagcccaggagtttgagaccagcctggtcaacacagagggactccatctgtgcaaaaactaaaaaatgtggccaggcacggtgcctcacacttgtaatcccagcacttgggaagctgaggcaggcagatcactcaaggtcaggagttcaagaccagctgggccaacatagagaaatcccatctctactaaaaatacaaaaaaaataattagccgggtgtggtggcggatgcctgtaatcccaactactcagaaggctgaggcaagagaatcgcttgaacctgggaggcagaggttgcagtgagcagagatcatgccactgcactccagcctgggcaacagagcgagactccatctcaataaataaataaataaataagccaggtgtggtgttgcacacctgtagtcccaactacttgggagggtgaggtgggaggattgcttgagcccgggaggtcgaggctgcagtgagccttaatcatgccaccgcactccaagcctgggcaacagagagagagagagagagagagagaaagagagaccctgtctcaaaaaaaaaaaaaaaatagcgaggggagggcagaatgctaactcatctttcgcagaccctgccaagagctggtcactgcttgatggccatgttgcctccttgctcatcagggaagcattgcatcttcagggtgggagacacagcggggcctgcggttcagtagggattagatgcctgtgctcccacagctcctctccaggcctctgccgcagctccggtgctgctgcgcttccattactgaccggcacatctgtctttcttagtggattgtgggctccttgagggccgaaccacggttgtctttcatcttggactctccagcttccaacacagtgcctggtacatttgtaagaacctagtgtttgtgtgaataaattcatgaattgcacatgactgagctctgctgcatttcatccagagaactggtaatcatgatagaatttgcttagacattccaaggttacttgtaattacttttgttttctgagcgtgattgattagttataagcatcaatatgttgtgaatgcaagttgctaaaatgcatttgtaacactttacttgtcctgtctttctctaaggctacagcagctgaaaaaccaaaacttcatctacttgctgaaagtgaggtaagaaagctatttttttttttatttccttctgtaacattttctgtaaaagatagtgcgtggcaatcccctttgggataatgattttcagccagccaagcagctgtgcagtggcttctccagggtgtggagcagtattgacctccaacttgctccctgctggactcagtacacctgaacagggaaggtgctttccaagggtgcctagtaacagaggcccccttcttagccctttcttggaagcagaatgctaattgtcagagccaaacacaaggccttcctgccttggggatgcatggtgtcctgattgtgagagaccctgggaggggaaatggaagggtctctcccctcccgtcttttccattttacagtcaggcatgccagaaacttggcacccatctgctctgcacttcaatatggacaagtttcagatctttcctgtcgacatatcccatttagccccaaatcaaagagtttcctgcgctgtttgtgctgacctaccctcttccctcccattccccaagcacacagcttactatctctttaaagtggcaacagagtggatctgagatgggttgcttcatgcgaaggtggtgaggtgtacactttatgaatcagcttgggagaaaagcacagaaactctcgatttcccctgtgtccggggccattacctagtcccaggtgacggccaaagctgggtgtggattcaacctagagccccagagctctgccctgctcctcattccactgattgcgtagctatattcttgttcttttgaaaataaataagactcggtctccagcctcaaaagacttaatgactgagaagtgaagctcaatattttttcaaaagagaaagttacaacataggtgaaacgtgctttaagagccgggtgagggagtggtcaaccccgtcttgggtccagataacaaaggctggatagaggtgatgagatttgcagagagtcttgaagaagaggaaagcatgtgtcaggcgaggaagggcatttcaagcagagagagcagcatgtgccaaaacagagcctgcaaaaatgggaaaaagctggggagactgaggaggttggatgggactgggattggttgtccagttgagaaactctgacagcatggcctgaaggatcctctaggctgaggagtcctgtgattacattgttttctgtctggcagtagcaaggagcttgagctggaggaagccttgggcatccaggaaaccagagagggggtagggggcataagtgtagtgagacctccaggatgtgtgctgtgcaagatgatctacttcccagtgggaagaaagtacagttgaccctgaagcaatgagggggttatggacactgaccacccccacatcatgcagtagaaaatccatatataactttctactcccccaaaaccaaactgctaaaactactgttgaccaaaagccttactgataacataaagtcaattaacaaatattttgtatgttttatattctatattctgtattcttacaataaagtaagctagagaaaagaaaatgttattaagaaaatcataaggaagagagatagatttactattctttaagtgggagtggatcaccatgaaggtcttcatccttgtagtcttcactttgtgtaggctgaggaggaggtagaggagggcttagtcttgctgtctcaggggtggcagaggcagaagaagatccaggtgtaagcaaactcctgcagtgcaaaccggtgttgttcgagggtcaactgtattacaattccattgtcaccaactttttaaagacaaatcaacgttggtggccttgcaggtacccaggactctcacaatgaggaggggttgatagtggccccctcctttatttcctagaccatctttagcatattctgaagcatcgcagctttagaattgcttggttgaggccggatgtggtggcttattcctgtaatcccagcactttggaaggccggggttggcgtatcacctgaggtcgggtgtttaagaccagcctggccaacacggtaaaaccccatctctactaaaaatacaaaaatttagccagacatggtggtgtgcatctgtaatcccaactacttgggaggctgaggcacgagaatcgcttgaacctgggaggcggaggttgcagtgagctgagatcctgccactgcactccagcttgggccacagagtgaaactctgtctcaaaaaaaaaaaaagaaaaaaaagtgcttggtcgggccaggtgcggtggctcacgcctgtaatcccagcactttgggaggccgaggcagatgtatcacctgaggtcaggagttccagaccagcctggccaacatggtgaaaccccgtctctactaaaaatacaaaaattagccaggcgtggtggcaggcacctgtaatcccagctactcgggaggctgaggcaggagaaatgcttgaacccaggaggcggaggttacagtgagctgagatcatgccattgcactccagcctgggcaagaagagagaaactccatctcaaggaaaaaaagaaaaaaaaagaattgcttggttgaagtagtcttacgtatcatgttatttgggtttaattagactgatcctcacaaaataggcaagtggttttaaaagatttctgcataaaaaatgtgggttgagacaggtgtagtgactcatacctgtaataccagtgctttaaaagaccaaggagaggatcacttgaggccagggtcttgagaacatcctgggcaacatagcaagacctcatctctaaaaaaaattgtaaaaattagctgagcatggtgatgtgtgcctacaatcccagctacttgagaggctgaggcaggagaattgcttgagtccaagagtttgaggctgcagtgagctatgatttgtgcccctgcaccccagcgtgggtgacagtgagaccctgtctcttaaaaggaaaaaaaaaagtagaagcttttgaagctaacacaaatgaacaatgagaaaataagatggctgataattttcctacccctggtacagactattcagctacatcatggggttgaaagaagataaagatcttattagatataatgccaagtcagtcaaaaaattaaaaattagcaggctatttaaattctggctttacatatgatattgttaatgatgaactaatcactatgtgtacagagtgccttgagagaattagctaatgacactactaggccaccaaattttaaaatagttcatctttatctctttatttatttattttttggaaacagagtctcactctgttgcccaggctggagtgcagtggcatgatctcagctcattgcaacctctccctcctgggttcaagtgattcttctgcctcagcctcccaagtacctgggattacaggcgtgcgccaccatgcccgacctatgtttttattttttttaaatgaaagtataatttactaccagtcaaacacacaaattctgtaagcttaataagtgtgttgttgttgaaacagggtctcgctctgtcatgcaggctggagtgcagtggtgcgatcttggctcactgcagcctccaccccgtgggctcaagtgaccctcccacctggtctcccaagtagctgggactacagccatgtaccagcctgcccatttttttgtttgtttgtttgtggtttttgtttgtttgtttgtttgtttgtttgagacggagtctctctctgttgcccaggctggagtgcaatggcgtgatctcggctcctgcaaccttcgcctcctgggttcaagcgattctcctgtctcagcctcccgagtagttgggattacaggcgtgcgccaccaggcccagctaatttttgtatttttagtagagacggggtttcaccatgttggttaagttggtctcgaactcctgacctcgtgattgcccagctcggcctcccaaagtgctgagattacaggcgtgagccaccgcgcccagctttgtttgtgtttttttgagatggagtctcactctgttgcctgggctggagtgcagtggcgcaatctcggctcactgcaacctctggctcctgtgttcaagcaattctcctgcctcagcctcccaagtagctgggattacaggcgcctgccactacacccagtaattttttgtacttttggtagagatgaggttttaccatgttggccaggctggtcttgaactcctgacctcatgattcgcctgccttggcctcccaaagtgctgggattacaggcctcagccaccgtacccggcctatttttaattttttttttcagtagagacagggtcttgccatgttgccccggctggtcttgaactcctgagctcaagcaatccacctgcctcagcctcccaaagtgcttggattacagatgtgagccaccatgcccggctgtttaagaagttttaacacacgtatacacctatgtaaccgttgcccagttcaagatatagaacattttcatcaccccccaaaatcccttcacagtcttttccagtcaatacttcccatttcctgtcctgacagtatcactattctgacttctatcaccagagcttttccattcttgaacctcatataaatataatcatacatatgtactctcttgtgtctggttttaatattttaatgttgctgcatatatcaaaaggttattcctatgtaattttgttttttgcttttttttcatgaggcattttatttgtaaatatgtataacatctctagaaaaagaatcccaggattttccttcctgtgtgttttcgtcttgcttctttatggtccatgatgccagctgagactgtcagtacaatgaaatcaaactggccagatggaagcagattattctgcatttctctagatctttgagttgcacatcaaatctggggctgatcatgccacacttgtttagactgcctgtgaggttcacaacaatttgcctagctctgtgatcatccatgatttcaaattcgccaatataaccatgcttcatcatcacagtgagaaaccagacgatgactttggagcatggcctaagaacctggtgtttgtctctcttttcagcattgttgatgctcttgagagcatcagccaggacattaatgtgcaccactgtggtggcgtggaaagatggcaaaaagagccctgcgtgattttgtacgtagaaaatcctagaatacccacaaaaacctattagaactaataaacaatttcagcaaggttataggatacaagattaatatacaaaaatcaattgtagccaggcacggtggctcacgcctgtaatcccagcactttgggaggctgaggcaggtggatcacaaggtcaggagttcaagaccagccttggtttcagactggtgaaacccagtctctactaaaaatacaaaaattagccgggtgtagtgttgggtgcctgtaatcccagctactcgggaggctgaggcagataattgcttgaacctgggagatggaggttgcagtgagccgagatcacgccactgcactccagcctgggtgacagagcaagactccatctcaaaaaaaaaaaaaaaaattaaattgtacttcttctataaaattgcaatgaacaatataaaaatgaaattaagaaaacaattcctggctgggtgtggtggtgagtgggtcacctgaggtcagaagtttgcaaccagcctggccaacatggtgaaaccccatctctactaaaaatacaaaaactagccagttgtggtggcacacacctgtaatcccagctactcgggaggctgaggcaggagaattgcttgaacctgggaggtggaggttgcagtgagctgagatcacaccagtgtactctagcctgggtaacagagtgagactctgtctcaaaaaaaaaaaaaaaaaaaaagaaaagaaaacaattccatgtataatagcatcaaaaagaacaaattacttaggaataaacaagagaagtatagacttttactctgaaaactacaaaggattgttgaaagaaaataaagaagatctaaattaatggaaagacatcccatgttcatggattggaagacactattgttaaggtggtaaactccccaaattaatatatagattcaacccaattcctatgaaaatctcagctggcttctttgcagaaattgacaagctgcttctaaaattcatatgaaaatggaaggggtgccgaatagccaaaacaatcttgaataagaagaaagagaactcacatttcctgatttcaaaactttaaaagcaggctgggtgtggtggctcacacttgtaatcctagaactttgggaggccgaaacaggtggatcacctgaggtcaggagttcgtgaccagccttgccaacatggtgaaaccccatctctactaaaaatacaaaaaattagccaggcgtggaggtaggtgcctgtaatcccagctacttgggaggctgaggcaggagaatcacttgaacctgggaggcagaggttgcggtgagctgagatcacaccattgcactccagcctgggcaacaagagcaaaactccatctcaaaaaaagaaaaaaaaaacttataaagctacagtaatcaagacaatgtgatactaacattaggataattatatagctgcatgaactgaaattgagagttcagaaataaacccttacatttatggtataatgatttttttttttttgagacagagtctcactctgtcgcccaggctggagtgcagtggtgcgatctcagctcactgcaatctccgcctcccgggttcacaccattctcctgcctcagcctcccaggtataataatttttgacaaagatgtgaaaacaattcaatggggaaagaaaagcctttcaacagatggtgctaagactctgtctctacaaaaagtaattttaaaatttcctgagagtggtggggtgcatctgtggtcccagctacttgggaggctgaggtgggaggatcacttgggccctggaaggtcaaggctgcagtgagctgtgattgatccactgcactccagcctgggcaaaacaatgggaccctgtctcaaaaaaaaaaaaaaaaagtttgtaggtttcatttgtttgctttgtttgtttgttctgagatacatttacaggtagaattcttagggtttggtaacaggttacatgtggagcccatgggagtggaaggagttcaaggatgatggcagattttcagcagaggcgatgaggggctagttctgcctggaacactcttttcctagacactggcatagtgtccctcatcttattctggtttctgctcaaatgccacatcttcagaggtccttccctgtccatcctgactaaaatgaaatccctaccctttatttgttcaacgtgtgtatcagttagtattagatttggctggcagtaacagaaaactccaaaatagcatttggataaacacattggaattttgtttttctctcaaattttagaaatatagaggtaatgtggtggggggaggggggaggctgatatggggcagcttgatgacaaggatgcaggttctattctattttgttgctttgttttgtatgggcatcattcccagagttatctcttttttttaattagaataacacacatgtattatctacgatttttgtaaccacccagagggttcactttgcccactgcctagacagagctgatttatcaaggtagagaattgcaatagagaaagagtaactcatgcagagctggctgtgtgggagaccagagttttatcattactcaaatcagtttccccaggactatttctctattgcaattaaatccatgcaccatgggtcagcagtgaccggcctgtagagacagtagcggagtcaacccccagtccaagagaagtaggcggccacttggactggcctctggatccgtcaccagagggaggctaccgaaccaggattacccttatggcaggtagtcttaagggcaatcctggacaagctcccaaacttgtaaccgcccaacaggttcaccttgcccactgcctagacagagctgattcatcaacaggggaattgcaataaagaaggagtaattcactcagagtcacctttgcgggagactggggttttactattactcaaatcagtctccttgagcatttggggattggagttttaaggataatttggtgggtaggaagcagccagtgagtcaggagtgctgattggttgggtcagagatgaaatcatagggaattgaaactgtcttgcactgagtcagtttctggctgggggccacaagatcagatgatccagtttatcaatctggggggtgccaactgatccatcaagtgcaaggtctgcaaaatatctcaagcactatcttaggctttacaatagtgatgtaatccccaggatcaatttgggagggtcagaatcttgtagcctccagctgcatgactcctaaaccataatttctaatctttttgctaatttgttagtccttcaaaggcagtctgatctccagacaagaagagggtttgttttggaaaagggctgttatcatcttgttgtatttttatttttattatttatttatttatttatttatttatttatttatttatttttgggggacagagtctcgctctatcgcccagaatggagagcagtggcccagtctcggctcactgcaacctctgcctcctggattcaagcgattctcctgcctcagcctcccaagtagctgggattactggcgcccgccaccacaaccagctaatttttgtatttttagtagaagcagcgtttcaccatgttggccaagctggtctcgaactcctgacctcaagtgatccgctcgccttggcctcccaaagcgctaggattacaggcgtgagccactgcgctcagcctcatctttgttttaaactataaactaagttcctcccaaagttagttcagcctatgaccgggaatgaacaaggacagcttggaggttaaaagcaagatggagttggataggtcagatctttcactgtctcagtaatattttgccatgggtgtttcatgtttgtgggtcaggagttgggataagctgagctaggtgtcctgccttgggtcatgctttcctgctcatgtggttgtttgcagcgttcggttccttgtagctgtaggattcacatcttgcttcttctgagaggcctggaggctagaagtccaaattcaaggtgttggcaggcttgtgctccctctgaatcttggagaagaagaccctcccttgcctcttccagcttccagtggccccaagcgttccttggcttgtggcagcatcactcccatccctgcctgcatctttgtatggtcatcttctttctgtgtatgtcccttcacatggcgttctccctgtgtgtcccaaggttatctcataatccaagatgattgcaggatctccagccactctgcctgtcctccagtcagcgggaaggaggaatggcaaagaagcaggaaagccacagaatagctgtgtctcttaagggaggctccagaagctactgagacactctcactttcatctctggccagagcttggtcacatgcctgcatccgactataggggaggctggaaatggaatctttattctgggaggcctgagttcacctaaaaattggagcattgattagtttattaggacaaaggggaaatggatattgtgggatacagctgtgtcagctgcgcctgccttttctcctagtgcctggcctaatgtatatttaattagccatttgtttaccatctgtctctcccgatcagaatgtgggctgtgtaaaaccaaagaagaaaactgaggtaccagttaaaaaaaaagaaaaagaagaaggctgggtgtggtagttcacacctgtaatcccaacactttgggaggccaaggcaggcagatcacctgaggtcaggagttcgagaccagcctggaacatggtgaaaccctgtctctattaaaaatacaaaaaattagccaggtgtggtggcatgcactgtaatcccagctactcgggaggctgagggaggagaatcgtttgaacccgggaggcagagtttgcagtgagccgagatgatgccactgcactccagcctgggcgacagagtgagactctgtctcaaaaaaaacaaaaaacaaaacaaaaaaaacaacaaaaaaaaataagaaaaagaaaaaaagaagaagaaaatgactgaggtgagtctcaatcaatttagagttaattttgccaaggatgagaatatgcccagaaaaaagagacataagccacagtaggatctgtgacccacactttttccaaagagggtttgaggacttcaatatttaaagaggaaagggtggggctgggtgcggtggctcacgcctgtaatcccagcactttgggaggccaaggcgggcagatcatgaggtcaggagattgagactatcctggctaacagtgaaacaccgtctctactaaaaatacaaaaaaaaaattagccacgcattgtggcgggcacctgtagtcccagctactcaggaggctgaggcaggagaatggtgtgaatccgggaggtggagcttgcagtgagctgagatcgcaccagtgcactgcagcccgggcgacagagtgagactctgtctcaaaaaaataaaaataaaataaaataaaaaataaataaataaaataaaaaataaagaggaaagggtgagcagtgcaggaaagaggaaagggaaaaaagggaagggtagataaaagagacaaggggttgcattcttttgagactttgattagcttagtgttccctgaacccacagttcacatgtgaaatgaggagggtggaggaacagtcagctatgcattcatactcagtgaatgtgcatttttacataagtaaagtaagcatagaataaaggaagcagtcaaatatgcgtttggcgcaggtgaaggaagggataacttctagtccagtccttgtcctgtacctgtgatggtaagctgtcagtgtacattgtttgggtgaaattcaacagaattctgttttagggtaaagggatttcctcatgagcaaattgtgagggaagccccctgggaagatatgtggcctacctttgcagctacctatgtagggacaaaatgggaggtgttttgggtgacacagttcccaagctaaacactttcctttggcatagggagtttgttggatttttgggttgttcaccacatttccagtgactaggaaagtgcagggcagattaggtgtttcacaaatatgtgttgggtgaataaatgacaaggaggggaattgagaagagtaagtttaaggagaagaacatgactgtgttggaagatactgagtttcgggtgcccatgggacatataagacttgattctcataggcagctggaaatataatcacgaacttgggagggagatgtggctgaagcccttgacaagagtgattctttgggaagggcatagcgagacagacctacagaaaacagcgagagaggagacatactcagcccactcagtggaatcaacccaagccagaagtctccacccccaccccccgggggagggcaacttcttccataacccacttatagcccctctggccttgcagatctgcctctctgtttggtttgagaattccccttataaaggaactctgcagggcccagatccacttgccacgctttaggaatctaagccacgactcagtctcctcggtgcaggttcttggaccccttcactggacctgagtgaaataagagaaataaggacaatatagtaaaataaatattgcattttgtcggaatgacaaggtgggctggagacacactgccttggcttggatcccagcttttccattcagttgctgtgtgaccttgagaaagtcacttaatcaccccgtgattcagtttcctcatctataaaatggggatattacgagtatccacctcattgtgttgttttaaggatcaatcagtcaataaataagtaaataatttagaacaatggtgtatagtaagttctacctaagtgctagctattaatataaagccaaatgtatttagcttacaaagcaaccattatttttacttctctgttttaaaatatattttcttttctttttttttgagatggagtctcactctgtcagccaggctggagtgtggtggcacgatctcggctcatggcaacctctgcctccccggttcaagtgattctcctgccccagcctctggagtagcagggactataggtgcacaccacacgcccagctaattttttgtatttttaatagagacggggtttcatcatgattgccaagctggttttgaactcctgacctcaagtgatcgacccacctcagcctcccaaagtgctaggattacaggtgtgagccaccacgccccgcctaaaatatattttcttttaggaaagcggttcccaacctttatggcactaggcactggttttgtggaagacaatttttccacagacccgtgtgtgtgtggggatggtttcggggtgaaactgttccacctcagatcattatgcagcaggacaagctgcagacaaaactcctcagacaccgagttaaagaaggaagcggtttattcagccaggagcatcggcaagactcctgtctcaagagccgagctccccgagtgaacaattcctgtcccttttaagggctcacaactctaagagggtccttgggagagggtcatgattgactgagcaagcagggggtatgtgactgggggctgcaggcactggtaatcagaacaaaacagaacaggacagggatttttacaatgcctttccatacaatgcctggactctatagataacataaacggttaggtcaggggtcgatctgtaactaccaggcttaggtcaggcagggccaggcctggtttcgggtctggttccttgctttcgggtctggttcctgggcgccaggctacctgcctttagttttgcttctctttctttttctgagtataaaacaatatgagagggtctgtctctcttctctcaattaggcactagattctcataaaaagtgcacaatccagatcctttggatgagcagttcacaatagggtttgtactcctacaagaatctaattgcactgctgatctgacaggagacagagctgaggcggtaatgctcgctcacctgctgctcacctcctgctgtgaagctcagtccctaacaggccacagaccagttggggaccctactttaggaaattatgattataggatatgaaaatcatacacctaaaaaagatcctggtctggcatggtggctcatgactgctaattccagcactttggaaggccaagtcaggaggattgcttgagcccaggagttcgagattgcagtgagctatgatcataccactgcactttagcctaggtgacagcaagactttgtctcttttctttctttcttttttttttttttgagacagagtctcgctctgtcccctaggctgaagtgcaatggcatgatctcggctcactgcaagctccgcctgctgggttcacgccattctcctgcctcagcctccccagtagctggaactacaggcacccgccaccacgcccggctaattttttgtatttttagtggagatggggtttcactgtgctagccaggatggtctcgatctcctgaccttgtgatccgcctgcctcggcctcctaaagtgctgggattacaggtgtgagccaccgcgcctggcatgactttgtctcattaaaaaaaaaaaaaaaaaaaaaaaaaaagccgcgaggtggctcatgcctgtaatcccagcgctttgggaggctgaggtgggcggatcatgaggtcaggaaattgagaccatcctggctgacacggtgaaaccccatctctactaaaaatacaaaaaattagctgggcgtggtggtgtgcacctgtagtcccagctcctcgggaggctgaggcaggagaatcacctgaacccgggaggcggaagttgcagtgagttcagattgcaccactcggccaggcgaggtggctcactcctgtaatcctagcactttgggaggccgaggcaggcagatcacctgaggtcaggagtttgagactagcctgaccaacatggtgacaccccatctctactaaaaatacaaaaaaaattagccgggtgttgtggcgcatgcctgtaatcccagctacttgggaggctgaggcaggagaattgcttgaacccgggaggcggaggtcacagtgagccgggatcacgctactgcactccagcctaggcaacaagagcgaaactccatctcataaaaaaaaaaaaaagagattgtaccactgaactccagcctgggtgacggagtgaaactccatctaaaaaaaaaaaaaaaaaaatctggccaggcatggtggctcacacctgtaatcccagtactttgggaggccaaggcaggcagatcacttgaggtcaggagttcgagaccaggctggccaacatggcaaaactccctctctattaaaaacacaaaaattagccgggtgtggtggtggatgcctctaatcccagctgcttgggaggctgaggcatgagaatcgcctgaacccatcaggcagaggttgcagtgagccgagatcgtgccactgaactgcaacctgggtgacagagccagactttgtctcaaaaaaaaaaaaaaaaaaaaaatcctttctaagccatataaaaactcagaatctaatttttgtttatatgtttaacttgctgacccatgtcatcttagagcctaggaaccctgcctaggtgttgacatgaactctgtgtgagcattttccagtatatcttggtgctgttgataaagagtcagtctgtaaaatatttgaagagattattctgagccaaatatgagcagccagtagcccatgacacagccctcaggagatcctgagaacatgtgccccaagcagtcaaactacaagtttattcatttcaggaagacaataaaatatcagtcaatacatgtaagaggtacattggttggctgggcctggtggctcatgcctgtaatctcagcactttgggaggctgtggcaggcggatcacctgaggtcaggagttcgagaccagcctggccaaaatggtgaaaccctgtctctactaaaaatacaaaatttagctgggcatagtggcaggcacctgtaatcccagctactcagggggctgaggcaggagaatcacttgaacctgggaggcggaggttgcagtgagccgagactgcaccactgcacttcagcctgggcaacagagtgagactccgtctcaaaaaaaaaaaaaaagtgataaggggttgtggagaccaaggttttatacagatgaagcctccagatagcaggcttcagagaaaagattgtaaatgtttcttattagacttagagagtctgttctattctatcagtctgttgatgttaatgctggtcggatgggactgaattccaaaagggatgaaggtatgatgaagtatgtctgacacccccattccatcatggcctgagctagtttttcaggttaactcttgaatgccctggctgagaggagaggttgaatcagatgatgaggaggatggtgggttagaattttatttgtggtttacaatgctaactcgaaggaaaggattgaggactttttcctggccctgtgaaggtcgttgtgtgtgggtgctgggagaactatcccaggaaactcagggtaactggcaaggtgatttgagattgctctggtccaaaagataacgatttcatttggggaaaccatttcctttggagagctggctgagataaggagctagtctgaagcctgggaaggcctcaacaatctggttaacccttcctcctccaggatacaattctttctttttttttctgagacggagtcttcctctgttgcccaggctggagtgtagtggcacagtcttggctcactgcaacctccacctcctgggttcaagcaattctcctgcctcagcctcccgagtagctgggactataggtgcatgccaccacgtgcagctaatttttgtgtttttagtagagatgggatttcatcatattggccaggctggtctagaactcctgacctcgtgatccgcctgcctcggcctcccaaagtgctgggattataggcgtgagccaccgcgctcggcccaagctacagttctttacgcctatgacttttgtcaggctcagaggcaatttaatgaggatgggatgtctagaaagggacagggtgggactcggatttccttggctcttctgaggaacttttaccttcaaaggggagtagaagccactgcagggtggaaggaaaacttccgcttccccctccgtgaatttgctgaaaagtcaacagacaaaagacgattaagagaaaaggcatacacattttctaatatgcctagaagaaaacacagtgattaccctaacccttcaatggagtacagaagcttatatagccttttatttctgagacagaggctcactctgtcgcccaggctggagggcagtggcatgagcttggctcactgaaatctctgcctcccaggttcaagtgattctcctgtctaagcctcctgagtagctgggattacaggcttgcaccaccacgcccagctaatgttcgtggttttaggagagagatggagtttcaccatgttggccagcctggtctggaactcctgacctcaagtgatccacccgcctcggcctcccaaagtgctgggattacaggcgtgagccaccgtgcctggccatatagcccttttttttttttctgaagctggtaaggagatggggaatatgctaattctgtaattctgcatgatttctcaggagaaagaagggatcagagaattgagattaacttgtaaatggctctctttggaaactgaataagcccgagagacagacaggcattttatccctctaggggtggtgacattcttcagtcttcttttctgcaatagagaatcagataacgggaaggggaagggaaaaaattgttcccccaggggcatccttctggtcttttggtctttcccctttggaggtggggcagtctcttccagtgtctgttgatctttaagggcctttcattcaaaatactctttacacaagggagccgtattttggggtgaattatgttggtttccttcacctccttgggaggtgggaaatgtgtcctgaaaggtcagggcctctctgagtggagatgaacaggtcagggttgagtaaggaggaggctggcaggggcctttatgatacctgagaggactggggcttggatggagcaagagaggcactgatggagtaagattcaggtacaagacttaagtcttgcatcctaggcacggctcttgcctcatcctcatcccagccctaataatgggaggctttttgccggtaaattcccattattaggagctgaaaatgtcaatgccttacaggcgccagtcagcagtgtcaagcagtgggctgggtggggcctgggctggctggagctcccctaccctgtctaaagggggcggtggctgctcagctccagcatatgcggggaaggcgctggctaagataaggagctagtgccatgatgaccacgttgccacaggatcaagtgggtcctgtgtggtgtcacctttaggtgcctgaaatctagattttattttatttattttattactatacatattttttgagacggaatttcgcttttgttgcccagactggagggcaatggcgcaatctcggctcaccacaacctctgcctcccgggttcaagcgattctcctgcctcagcctcccaagtagctgggattacaggcgtacaccaccatgctgagtagctgggattacaggcatgtgccaccatgcctggctaattttgtatttttagtagagatggggtttctccatgttggtcagtctggtctcgaactcccgaccagatgatccgtctgcctcagcctcccaaagtgctgggattacaggcgtgaggcaccggcctgaaatctagattttaaagtgaaatttcttaatttttttttaagggcaggcacaaatttataaaacatcaggtgggccaaataaaatgttacaggccacagttttagcttggtggttgctgatttactgaccctgttataatattggaggtcaggactttgggcaaatgaaagagaaaaggaggcagactgagaatgtgattttacaactccagcctctccaggggctgggtggccagtgtctcctcagcagccttctcccgcaggaagcagaactgtctgcaacgctgatggagtcacagtaaccttcaccccactgagctcaggatctgcagagccactaagaccctggagcaactgccttcagcatccaacagaagctgctaaaaggattatgggtcaattcattttagacatttcttccagatgttcccatggaaagctagggtctaaatcagtggtcctcattcctggcagcacctgagtttcacctggggaactgttagaaagtgaaacttggacggcattcacattagtccagtctctgggtggggcttggacatcagcatttgtagaagctccctaggtggctttggtgcagccaggttggaaaccactgatccaactaatagaaatgctaggttgggatctcttccgaggcatctctttaggacaggctgtgcatgacagtcccatagtgtcagggttctaagatgctccaatggtttaggcactggtcttaattttcgttttttcgctctctttgagaccttaacaaactctatagggctgggcacaatggctcacgtctataatcccagcatttttttctttttttctttttcttctttccttttcttttctcttctcttctctcttttcttttctttctttttttctgagactgtctcactctgtcgcccaggctggagtgcagtggcacaatcttggctcaccacaacctccacctcccaggttcaagcgattctcttgcctaagcctcccaagtagctgggactacaggctcttgccactatgcccagctaatttttgtatttttagtagagacagggtttcactatgttggccaggctggtctcgaactcctgaccacgtgatcctcccacctcagcctcccaaagtgctgggattacaggcgtgagccactgcgcctggccaattccagcagttttagaggtcaaggcaagaggatcccttgagtccaggagttcgagaccagcctgggcaacatggcaagacctcatttcaatttaagaaaaaaaccaaaacacccaagctctataaccttcacatcctcattgactgattaagtgcagataatgatatttgcccttctaacctcaccaggctgttatcaggagaaatgaagcaataaatgagaaattgctctgcaaactgtcaacgttatgtaaacattgctattcagagtgtgctcccaggtgcgggaggtacagctgttatctgttggagatcactcctgaagtaacattcctagtgccatgggtcagatgggaattggtacagacattccaacttagaaggcagcctttattgtcttataagcaggtgcgtttcctggggtggcagcctggcactggtcactccaaccccaacttgtgtaggaggtaccacagtaaatgagtagagagagttcaggggacttgaagggaagtggagggccatctggagagggagggaactaaggactccctgtgggttggggtcttcctgaggatccagggagtaactgtcaaggagccttagcagggatctaagagctatgcaagagcaaaaagaggcaaattattaaggaaattagtgaagtcagcactggaacaacagagaggggacacagcagtgcagcatgggccctggcctcaggaagctgtctgattggggcagataggaccagccccctagaagacagtcacccatatcagttaggcagtcatgactcagtgttacttatctgaggcccaggttgcatgaggggttgggggtgggatggacagagcactggctgggcatcaggactaggctggagtcctggctcaaaactctaccacaacctgacactgggcaagatggcccacctgtggcatcccaggttcctgccctgtaaagaggagtctgggtgtatatccagatggactgtgagcacagcctgagtttgccctgtcgaggtgctgaggcctgggagattggggtgagtagctgtggtccagggaaggttggcaagctgggccttagatgagaggggatgcttggtcaggcagaggtgagtggagaaggcagggcaaggaagggaatatgagcggcgaacaaatggagtggacatggtgggggcagaggatggtgggaagtggccttgttgcggccagagtggaggaagagataagtgggaaagagtggagtcgattacagaaggcctcggaaaccaggcagagatgtttaaattggctctctcaggaaggagagggccatgaagggatttagggaagggtcatgacatgattatgctgcattttagcaggattaatgtgacctggtgctcagaatgacttggatggcatgaggccaggagccgaggaggacagttagaagactcttgtaatatttctggcacagggagatggactgggagttgggaggtggcaataggtcaggcctagagacatttctcaggaaatattgacaggccttggggcctggttgcattcatggagtggggaggaatgagtcaccttgagaagcagtttccctctcaaaggccagggaagacaaagcagaggcagctttcctgcctgcaaacaggacatttcagggtaacctggctcttccaagcgtcagcttctccctggctccagctcagataggagttgtaacaacgggttgggcatgggtgatggcaccggctggtggctgggttaagggccatgtttttgattatgcattaggcttattcagcctgccaagtgccaggccctgcgcttgtgtaggagacagagcaattagcaaaacatagtcctccatcctcaaggagtttccagccctgtgagcttggcagatctgcagaactcaaatgaaatggcagttgagaacaaccatcttgttctcattcactccattttgcttaacggccatgtaggtagttccaaatgtttgatgtgtaccagaaaatctctctcttcctggtttataattatgatccagggcaaatccaggttttgttgggcttgaaaattaaataaattggcactctctatggaaaataattcaaatataaatatacaaatatcacactgctaggccctcccagggcctagaagggtaggaatgaaagtgagagtccctgaagctttaaccgcattaacttttcagtcagttctatgatacctgccattccttaagtgtgtattatgtgcacgtattttgcgtacagtattacacaacaatcaaggggaggtgaggtgggcattagtgtcttcatcttatggatgaagacacagtctcagaggtgattcaagatgcccctctgcataggccctaaggcagggggtggggactgtgacctggacaggaagctggggcctcaggactgcatctaagctcctccttttctgtgggtgatggtggctgtcaggcccctgaacctacgtcatccctccctctgatttgactgtacctttgctaggcctggtcaagggctagggactcctaaagtcaagagctagggtagaggttgggggttggatctcagggcaccatatggtgcagacttggttgcaggaaagtgacctatttaggcagaggggctctatacaactgggaccacagcaaaccctagaggtgagcacctgcttcaaagactcacagatccaagctgtgatcctagatctacaacttcctggctgtataaagtccagcaagactgaggcctcactgagcttcaatttccttacctgtctaaccagaatagcaacaacttgtttgtatatttgagctcattacatgtcattttgtaaggcactaaagctcctggaggcttccggaacacagaaataattaatctaagaatcctaaagtggctgtcctggtagcacctctagggagtcctcccatcctacgtaacttcctctgggaaagtagaaaacacggcacctgggaaggggcgctgaaccgtgccccaagtcccagtgggcctggatgcccaagagcaagaggaggcccagaggatggggacaggccacgacctgtggcccaagtcccgcccagagggagtgcgccctgagggagagccaccggagctggtgactcgggggcgggtgctctggggtgtcgctttgggttcagcaatacaaatctgccagctggagattaggcggggcacgccggggagaggtgatgcactgccgctgaagacccaggtaggccggtgcgttcggcctgggtgaggaaggcgcgggacccgggtgcgaggactgcgtagcgtccccggctcccgcttccgcccgctttccacgcccacttctgcaagtcccctccggcacctcggcgtccaccggactcctaggggcgagccctcatttccgaggaatgggaccgccttcgtgcccccggggctgccagtccctagactagccctaggggcttctcgtcccggcggagccgggcggtgcctcctgcctgcgcctcgcacctccccgcctggcacggcccacccgggcacggcgccgccacgcgtgaaggcccgcatcggctccctacgtgggggacgtgcaggatgatgcggggtcgggggggatttcgctgcgtcgcccgccccctttccggcgcaggagggagcggccgccgcgtccccgctccccggccgggacgccaccgccgggcgttgcagaggcgcgccgcaaccaatgggcgtggaggaggtgggtcggctggcggctgtcaccctccaggggacgggagcgcggagaccgggagagcgcgagctgtcgccgcgccccgggccgagggggaggagccgggggaggaggaggaggaggagccgccgagcagccgccggaggaccacggctcgccagggctgcggaggaccgaccgtccccacgcctgccgccccgcgaccccgaccgccagcatgatcgccgcgcagctcctggcctattacttcacggagctgaaggatgaccaggtcaaaaaggtgagcccccgcccgcgccgccgctggtcctggccgcagccttgcgttccggcatccgctcgccgcctccgctgcctccatcctccggcgcccggccttctccgggccagcatcgagttggactgcagggcgcaaggaaagccttcgccttcgattctaccggcattgtcagtgtctctgtgtgtgtgcgtttttgggaggggggcaatcgggcggaagacccccgagaccgggctgcctgctgcagtgtccttgaaacgggccctggatgtcagataggcccccgggctgtgcggggaggtggccggtgggcccttccgcagggcctgttcgggagggtccgagcgccgtgggaggaggtgtgatcatggagatgctggggaggtgatcgagcagcaggcgggggtgctggctggaggccaggcctcccatatttggggttcctggcggagggtgtcgggtgccccggagaagctgtcgccgggctctcccagttgtttgagctgctcgttaatctgaggacgaggtgacccgcccggcttcccggaacggggaggggcggcgaggccaccggaaactttgctcataggcctcgtgtctggagcggcacgtctgaatggaattttttattcctcttaagctgtaatttctagccagcacaggagctcaaataagcgactggtcatttgagttgggtggacgcctgtggcatgcttgttctagcacttggacgcatgcatcctcctgtcctgaggtgttgttgcctttgacatcttagtgtaaaatactgtccgctggcaggtcttaaaggtgtatttgtctcttctgccagctgtgctaccatattttaaagaaacagcctaagctgtagggaaagacgcccgttttatcagtgccaggtctggtacaggctccaggcccacccaccctgaacgtggtgacgttattgctggggttagctgggatggactggcaaagtcatcttgactttggcgttcagacaggtggagttctacaggtgaaaggcaggagtgacaggccttgattttctgcccggcaagccatagggtgttccatcctcttcctgtgcatctaagacgactccctcatctggcaccataggaaacaggcctactgagggcagcgaccttatcaaggtcacccagtgagttagaggcagagccagtcagggggatccaggtctcccagtgcctccacccaggaacttcaccagggtcctcctggaggtcagcttccaggagggagtgggtactgagagacaaagccgctggggaccctgccgtgatcttggatcccatggtgggtggggaccgggagtgaggtaggtaggagataggcttgggaatgccatctgccattgctctttatggctttaagcactctggggttgtcaaaccgtggcactcgaaacacttgctcctatggagcaccctggagcttccctctggccactgacctgggagctgtgcgtgcgggtgtgtgcatttcatgagttttctctagtggtgttgtgcatcactgatgttcttcccattggaccagggagacagttctcccggcatggcaagaagtgcccagaacaggcctcctgaagccaagagttcactgtcctcctgcacgtggtgtcctttatagctcaagacagtgggctgctgggctggggggtgcctgggtgaccttgtaaacctccagtgtccacacccaccaccacccacaacagactgctggctgttggctgccggtggcctccagcagctgagctgggctgaggtttggactccattcagtgggacatgttttctcagacatacagtgtctagggtgggcccagagctctccactcctgtgggtggctcaattcacatctatggatgcacagtctatctcctaggcccccgtaggtacctgagtgtgtgattcagttgacccttccatccctcctcactccgagtttgggattctgatgttcttcccttctcttccccgagaaccttgctggaggaaggtcttaaggccaaggtttccaccagatattatttgtcaaggagattcttaaaaacaagatgtttgcttgcatttcaccacggacttcctatgctgctttctataggggagtacgtggattcctgccagggggtccactcattttgcatagtggactgtgtggcacagccatctgtgggtgtggtcctggctatgattgcgccaccgcactccagcctgggccttctaaggacagtgacatagtgggtacttgctccagtgacctactcagttttgcccaagtgtgcagatgctggggaccacatctgctcttctggggcccaggatttcttagagaccagctctttccacgtaccactcaccataggaaaggctaggtgaaggtgcgggaccccctgttcttcctgtggggctggactctgcctgcctcccagcagggacctgctgaggatggttcccccccagcgtgggcagccatgatgattcagccctccagctgtaggcagcctccggggctctggagacagacctggcatccctcagtaactctcatctatcttcttgccctcagagccagaggtaggagaagggaagctggggaccatgccggggaagtttttgggattgcttagaatccaaacgtgatcatgaaaatggtgtcatttctttcttcattgcctatgaggcacatcaataattcaactccataaaaatatatcctgggttgaaacagttcaggtgtctgacttcccagcttggaaccccattatccagacggcatctgcataaattggttaatgggtgctgttgaagagggtgtactggcattaggctgagctaagcacaaaacacatatattcctttcactcttctagtgcctgtaggaggaaagggaggcatatgtgtgcttgtgaaggattccattcatcagaatcccagacatctgccagttctgcagctagaggctgggttctttgacctctaagtaactttaaacacgcatctcatctcgccagcttcttccactcggtttagccattaggagcttggagcagggtgaaggattgcatagtgctctgtttgtttagaaagggaagatgggtccaggaaggtcagaacttggcttctaaagaaagattagacttcctttcctccaggcttgtcagaatggtgagcaaatgccagtggattttctctgggcgagatccccataacgctaagtgatttccactagtaggtgatcatgaaaagggtgtcatttctttcctcattgccttgaggcacatcaataattcaactccataaaaatatatcctgggttgaaacagttcaggtgtctgacttcccagtttggaaccccattatccagacggcatctgcataaattggttaatgggtgctgttgaagagagtgtgatttgtccaatggccgaactcaggagtccttgagtacttgacccaggaagacaggggagagtaggcttagcaattaaagggttgcccaaggtacattccttagagcctatgtgttccagctgcaaaagcaagcattaaaaataaataaataaataaaaggccgatgtagtggctcacacctgtaatctcagcactttgggaggctgaggcgggtggatcacctgaggtcgggagttcgagaccagcctgaccaacatggagaaaccccgtctctactaaaaatacaaaattagctgggtgtggtggcgcatgcctgtaatcccagctacttgggaggctgaggccggagaatcacttgaacctggaaggcagaggttgcggtgagccgagatcacgccattgcactccagcctaggcaacgagagcgaaactccgtctcaaaaaaaaaaaaaaatgcccattcattattgctcaggggtgagagaggtgatagttagaaaattgtgaaaaatctggctgggcacagtggctcatgcctgtaatcccagcactttgggaggctgaggcaggtgaatcacgaagtcaggagttcaagaccagcctgaccaatatggtgaaatcccgtctctactaaaaatacaaaaattagctggacgtggtagcatgcacctgaagtcccagctactcgggaggctgaggcaggagaattgcttgaaccggggaggcggaggttgcatgagccaggatcatgccactgcactccagcctgggcaacagagcgaaactctgtctcaaaaaaaaaaaaaagaaaattatgaaaaatctgtgggttcttgcagtggcaaagaaaaaaaagaaaaaattatgaaaagtcagcctgggcaacaaaattaaacctcatcttaaaaaaaaattttttttagcctgctttggtggcatgcacacacctgtagtcacagctactcaggaggctcattgagcccaaaagattgatcccaaaacagtgagctgtgatgctatgattgtgttaccgtactccaggctggatgatagagcgagactctgtctcaaaaaaaaaaaaaaaaaaagaagaaagaaaattatgagaagtgtctcataacctctcaattctgatgttgtacaaatattcagtgagagcttcttggtgaatcttgactttataatccctgcctttcctaccttagatactcctagggtttctcccaagagaagccccatcactttatctggttggatagtttgggaatgtcatgaaggaataaactggcaggcagggtgtctgtgaggtgctttcacatctggccaagctgtgccatgctcccacgctcctactgttctccggagaagacataggcagctttccccttacaagactgatttggcatgactgggactgtctgtgtgtgtctgcagtcagggattcctggcagacagatttagccactggaatcacctctgagcatgcctgagaaggtccagggaagacatggataaagacagggagctgtatacctctgcatccaggaatcagttgtggtcagactgctggcacctgcttatggatttgtttttatttttttatagagacagggtctcaccatattgcccaggctggtcttgaactcctgggctcaggcagtcctcccgccttggcctccctaagtatgcttattgatttgaaaaccctgaagatcaaatctgatcacaggagctcaatcatttctttaaaaaatgtttgatttttttattatgtgcagaggactgtgctaggctggggtgacaactataaacaaggcagaaacggtcccagttctcatggagcataaaatatttgctggccgggcgtggtggctcatgcctataatcccagcactttgggaggccaaggcaggctgatcatttgaggtcaggaggtcgagaccagcctgaccaacatggtgaaaccccgtctctactaaaaatacaaaaaaggtgccagatgtggtggctcatgcctgtagtcccagcttctcgggaggctgaggcagaagaatcacttgaacctgggaggcggaggttgcagtgagctgacactccagtctgggtgacagaacgagactccatctaaacaaaaataataattaaaaaaaaatgaagtatttgctgtgttatatgtgcaaagcatatgggctatgagggcccacagcatggtgtggtcataccttgggtgggaaatccctaggctaggaactgcttacagctaggctgcagatgttagctccttaagtgcttcaggaagctgctcccatccccagttctggggatgtgttagtctgtttggagtagcaggacaggtgcccactgccttctggcctaataaaccttaacaacgggatcttttgcaaccacttaatatacactgggttgtgttcattgtatttgatcttaaagaaaaataggtaaaaattttacagtttgattggtcttgatttctggaaataacattgacttctggtaaacagtacacatcagggatattatacttagaaactttgtaaggtggagtcaaaattaattgtcacaaaaatgtgtattttttttttttttttttttttttgagatggagtcttcgctctgttgcccaggctggagtgcagtggcacgatctcagctcactgcaagctccgcctcctgggttctcgccattctcctgcctcagcctcctgagtagctgggactacaggcgcctgccaccactcccgtctaattttttgtatttttaggagagacggggtttcactgtattagccaggatggtctcgatctcctgatcttgtgatccgcctgcctcgacctcccaaagtgctgggattacaggtgtgagccaccacacccggccatgtattttcttattctttttttttgagatggagttctgctctgttgcccaggctggaatgcagtgatgtgatctcggctcattgcaacctctgtctcctgggttcaagcgattctcctgcctcagcctcctgagtagctgggattacaggcaccagccaatgctcctggcctgcatttttttttttttttttgagatggggtctcactctgtatcctgggttggagtgcagtggtgtgatctcagctcactgaaacctccatctcgcgggttcaagtgatacttctgcctcagtgcccccccctgccccccagtagctgggattacagtcgcctgccaccatgcccggctaatttttgtattttaaatagagactgggtttcaccatgttggccaggctggtttcaaactcctgaccgcaagtgatctgcccgccttggcctcccgaaatgctgggattacgggtgccagctactgcctctggactgcattttttttttttgagacagagtcttactctgtcgcctgggttgtagtacagtagcacgatctcacctccctgcaacctctgcctgccaggttcaagcgattcttctgcctcagcctccctagtagctgggattacaggtgcctgccactacacccagctaattttttgtattttttgtagagacggggtttcaccgtgttggccaggctggtcttgaattcctgacctcgtgattcacccgcctcggcctcccaaagtgttgggattacagacgtgagccaccgcgcctggccgctttttttttttttaatggctttttgtctctgggcatcctggaacacttcgtgagtgtcatgtcgggtatgaattatatatatatgtaattgagattacactataaatgtttctgcacacaactatactaacatatgtgtaggtgtgtgtatgctttcatatgctctttcaaaagcctcagcgaggttgtcagtacaggaagtattattcccgggcttcccagcacggctccctccccagggcatcctgctgcctgccttgtgtgttgcagacagaaggcaagcaatttattccccatttagaaacagagactgaaggcccatccagaggagataaaacatttttctaaggtcgaaagaaaatcaggaataggattcagagggctcttcttgcttcctctgtttccttcttttaggagaaaaacctgtccttgttgattttaatgttttaccttggaacctgtattttaatactgtcccctcacaaatcaatacatttgagttaattttttattatgaaatatttgaggcacataaaagaagattgaggttcacataaacacctctgagtctgctactcagcttgagaagttatagacacaattacaattacattacagacacagttgaagccctttctatgccatctctgagatagtttgctgcttctcccttcggaggtgacctctgtcctgaatttggtgtttatcttttcatgcatgtttttacgcttttattacatatgcatatgtctataaacagtatatggtattgctttatagatatatggttttgatcttttgtaaatggtgctatactgactatgtgtttaagcaatatatggtattgctttgtgtggttttaaacttttttttttttttttttttttgagatggaatctcattttgttgcccaggctggagtgcagtggcgcggtctcagctcacagcaacctctgcctcctgggttcaagcaatcctcctgcctcagcctcctgagtagctgagatcatacctggctaatttttttgtatttttagtagagacggggtttcaccatgttggtcaggctggtctcaaaatcctgacctcaagtgatccacctgcctaggcctctttccaaagttctgggattataggcctgagcccccacactcagccagttttaaactcttataaatggtgctatactgtatgtatccttccgccatttactttcttttagctcaacattgtatttttgagattttaaaaatgttgatctacgtaactgtttcattaaactgctctggtttcttacagagtataaaagctccctagttaattcatctattctgcttttgataggcatttgtgtttctaatgtttcaagtgacaaacaatgccttggtgaactttctctagaacaactcattcagcgcatgcacaagtttctctaggctctaagctgtgtacctagggctgagatcaccaggcggagagatgtgtgcgttttcccatatacgagattctgccaagttgccatccgtggtcatgccagttcacactcccatcggaagtatgtgcaggttgcctttgttccacaccaacccttgttatggtcaaacctttgcaaatttgtaatagatgagttttagtctgtttccttcctcagttgtttccattcacatcacagtattcgagctgtgtttaaaattagcccatttcctgagttaccttatcagagtccttgcttcagagtcccacggactgaagttgacagctccatggactgctgctgctgagatatctgcactggggagggatagttgatgcagggaaaggcttaggatggctctccatggcccctggtgctgtgggctgactccgttaagcttttctgggagttgaaacacacatttgtgagctttcacttgcacacactttctctcttcccgggtggatccgacccgggtagggcaggcttatctgttgcgtaaatgtgcccagctctgctcagagaaaactcaagccagcagcctctcagaccgtcttccgtaaaaggagagggtggctgtacccacgtggcagggaaaactgaaccgtgaagtcggcggctcagccctttgcacacagaagctgagctgtccctgtgcgaggcagaaaatgtcggctcatgttcatcttgagtctatgcctgattacaggctccagactcggagacctcgagggtgccttacagggaagggggcattcagtgcctactaggcgcccggcttttctttttcttagcaggggtcttatttaatcatttctagtactcatatgaaccaaagccaacattcattgttgtattcattgccatgtactgtgctaaaggcatcgtgagcctttgcttagttcatccccacaacgcccttgtgaggtgggtgtgatttcagacggtgaggcccagatagtgaacgatagagccagcattcagcctcatcaaggctgatggcagagctcctgcttttattattttctcaattgagttataattcacctaccatgaaacgcatcattgtacagtgtacaattcagtggtttctaatagatttacaaggttgtccgagcaccatcaccatctaattccagaatattttcatcaccctccgaaaaaaactacccgttagcagtcacttcccatttcttcctccacctagcttctggcaaccactatctacctttttttttctttttttttaaatggatttgcctcttatggacatttcatataaatggaataatataatatgaggccttttgtgtctagcctcttttatttagcataatgtcttcaaggttcatccatgtagtagcatgtgttagcacttcattcctttttattgctgaatgctattccattgtatttatctactacattttgtttttccatttgtcagttgatgggcatttggactgcttccactcttttcggctgttatgaataatgctgctctgaacatttgtgtgtgaatttttttttgtatagacatgctttctttctttcttcttcttttttttttttcagatggagtcttgctctgtcaccaggctggagtgcagtggtgcaatcttggctcagtgcaacctctgcctcccgggttcaagtgattctcctgcctcagcctcccaagtagctgggactataggcgcatgccaccatgcccagctaatttttgtattttcagtagagacggagtttcaccatgttggccaggatgttcttgatttcttgaccttgtgatccacccaccttagcctcccaaagtgctgggattacaggcgtgagccaccgcgcccggccagacatgctttcatgtctgttgggtgtatatgtaggaatggaatttcttggaaaacccctgcttttaatcgatttaaggaggaaggcatcaactccattcagaaatgagcaaacgaaggccccccaggtggtgaattgactttctgatgaccacacaactcatgaatgacagggataggaacactactgctggtcccctgattcagaaatccatgttctttccaccattacacccaactctcattgtgcagtttagggaaacagatgcaaggagggaaagactggggtgggagaggggtggaattggcttgggatcctccaggttccctgccccccatctcctgcccctccccagcaccagcatggtgtctcctgcctgtgcctgctgcctcacccccagccccatttgcttagtgttgatgagccccttccacttgggaaggaaatggatccgataaggtcattaacagtgaaatgttaggaatttgccctgtttttcaaatctcccttttcatttgtctccctctcccattcttgtctgcatttaaaagaggaccccccaggagggcaatgcttaacctgcatgaaaaccccctcaatgctccttgcgatgcccactcctggcctctgcctgggggtactgtaagcagctgtcgattccatcaattgattgacacatggggcttgtcttcagccatgttattcacccagacctcatgtccctgatgtctcctggtgccttctaggaccctgtctgggtgggtgtggtgagtgaagtaggagacccaggctactgctgtgataaagacaccacctcacctttacaaagttctgtttcatttataaaatacttgatttaatcagatgcttactttagttggatctttccatcaagcttggatgtaggaatttcttcctgcatcttacatatggggcaggtgagtcccaggaagtggaattcatgtgatctcggtggccagaaagcagaagagctaggatgggtacacagacctccctaacgccagtgggcaattcttgcagtacctgcagaaccagaacggtggtccagggctccagactccaaagccattgatggggttcaggacatactatccccaaatagtaatatggcatttgagaaaacagcagaagcaggaaggtctctcacctttcccctcccttcttccctgatgcagactctcattcaagaaggtgtctaccttatacccagaagaaagggacatccttatctctggagatacagggacacagagaagaacaaacagggcctgccaagttctcttcagtttatcactattagatcatatcccctttctccagtcacacttcttcacgatcatccacttcttcatcaaacctgacatagggaaatatgcagacttacctgtttcttttctttttttctttttttttttttgagacagttctcgctgtgtcgcccaggctggagtgcagtggtgcagtctcggctcactgcagcctccaccttcctggttcaagcaattctcccacctcggtctcctgagtagctgggattacaggcatgcgccaccatacctggctaatttttgtatttttggtagagatggggtttcaccatgttgactagactggtctcgaactcctggcctcaagtgatctgcccgcctcggcctcccaaagtgctgggatcacaggcatgagccgccacgccgggccagagttacctgtttctttggaccttcatttccttatgaaggcttctgcgtcacctaaaaacttagattaatttgtatacattgttcttgttactctgtcttttgttataggggcctcagccataaacctaagatgggaaggaaggatatttcttttcagctactgcgtgttctacatttcagcggccttcttcatagaaactgtcacccaaggctctgataatggagatatgtcagaaatgctggggctgtgtgtccagaatagtaggcgccagccataggtggctgttgagctcttaaaatgtagcaagtctgatttgagatgtgctgtggcatataaactccacacaggttttcaaaaatttcatgtgacacaaagaatatgaaatagcccgttaatagttttctaatattggctgggcatggtggctcacacctgtaatcctggcactttagaaggctgaggccagaggatcacttgagcccaggagcttgagatcagccagggcaatatagcgagacctcatctctgcaaataattaaaaacgtcagctgggcatggtggcacacatctatggtcccagccacttgggagtctgaggtgagaggattgcttgagcccaggaggtcaaggctgcagtgagccatgattggagtgcactgcactccagcctaggtgatggagccaagaccttgtctcaaaaaaaaaaaaattttttttctgatattgattagacatagaaacaacattttggatatactgggttaaataaaatacattatttcatttgggagtctgaggcagaaggattgctttgattgtttgaggctgcaatgagccttgattgcaccactgcactccattctgggtgacagagtgagattatctaaaaaacaaaattaatttcatctgttctttttaaatgtggctagtaggaaacttaaaattgcatatgtggctcatattatcttcctgttggacagtgctctgctagatggtaaattccatggctcaggagtttgcactctgcatttaaagcagtgggtttctgggcatccttgggcctcagtttcctcatgtgtaagccgcagtttcctcatctggaatccattatctcgaaaggacccatccagcttgagcagtattgtgaggtgaccatcaagttccctaggcctcattttctttctttctttctttctttctttttttctttttttgagacagactcttgctctgtcatccaggctggagtgcactggcgcaatcttgactcaccgcaacctctgcctccctggttcaagcggttctcatgcctcagcctctctagtagctgggattacaggagcgccgcaccacacccagctaacttttttttatagttttagtagagacgggttttgccatgttggccaggctggtcttgaactggccaagtgatccacccacctcagcctcccaaagtgctgggattacaggtgtcagccattgtacctggcctggcctctgtttcatctgtcagataaggtaaatgattcctgccttgttctctgcccccacttttcaaatgagagaatggacgaggaaatacttggaaagtgtacacaactgtacaaatgccaggtgttatcattgtcactcacccagctcacacctgtagacaccttgagtagccaagtggaggacggcagcttcctggctaacagagtaggcagacaacagagccctgagcctgggcaggggtcctgagtgccattctgcctttgccttggattgtgtgagagctcctggaccatctgcatgtctgtgtgccctggccaaatggacagatgaaaatgacaccatgggctgctgaaatgccatgttctgaggactctaaagtgtcatggagctcctgtgtatggtatgtgaggccagaaggcagatttcatgattgctgttttactgatggaaatacacaagagatcgaagtgacttgctcagggtcatagagggaggcagtgcccatggccgaggcctgaggtctttcgatttctagctcagtccagtcccaccactgcagtatctccaagccacagcattgggatttggttgtctcacagtgaaagtaaacctgtctgcactcagatccttttctccctgttgtcgggaggtgctgggacagtgggaattgtgagactggaggtccagaggctggctgtttgctaagccatccaccaggaggctgagaagtaagcctgttgtgcctgccctgccacattccagggctgttctgttctccccgagggaatgggggcctgctttatttttagctagttcagtgtgacagccttgttctctttctgggcaaggacttggccacttttaccagtcaggaagctccctttagaacctccaggccctactcaggttctcctaggaagagggggccaagggaaggggagctgaagttggagtgccgctctgcttgctgggggcctggggcatttggcttaactgcacagccctaggttccacctgcctcatgtggggttcataacagctaccttacacattgtgcagatttggatggaggagcttagagcacccagcgtgggccctgtccacattcacgttgctagaacgtcagtttcttcatcaagaatggggatcctggctgggcgcagtggctcacgcctgtaatcccagcactttgggaggccgaggtgggcagatcacaaggtcaagagatcaagaccatcctggccaacatggtgaaaccgtgtctctactaaaaatacaaaaattagctggacatggtggtgtgcgcctgtagtcccagctactcaggaggttgaggcaggagaatcgcttgaacccgggaggtggagtttgcagtgagctgagattgcgccactgtactctccagcctggtgacaaagcgagactctgtctcaaaaaagaaaaaaatggggatcccattttcctcatgatttgttgtgcgtaaacagagttcattgaaacagaaccaacagtttacacatgctgagagacacatatgaacctggaagaagagaccgggcaaggctgtgtccccaggatggggtttttgagtgcctgagggatggttttggctttggtgatgatctcacacagacctgtcactgaggagccctgcggtggaattgattatcccagacacagttcctctggtagcttgcaggtgactcagcttgaatatgggagtgggaatcccgattatctttaggcccctctgtccctctgggcctcagccatgcagtggtgaagtgctgaggggaaggcaggggttagaagtgcctggaactctgtaccttaaagtgagaggccgctgccgggggagaagggctgggccattcggggaagtctccgggccttatctgagccagcaaaccctctgagacctccctaggctagtcattactggaggcctcccgcccagcacaggagccacccaacctggcccaggagccaccacgtggtgcctcctagggctcctgggcacacaaagggcccagagggcatggctcctgtacccctggcactcacggtctagctggcggtgtggaccatgcatgtgtccctgcaacgcccaggaaagacacacaccacgaagtgtctcccaggcagatcgactcctacatagtgaacacctaaggccgaggggatgctgaggagaggagtggacggtgtggggtggggcggatcatggcatgtgctcctgagaaggtgagttgggaggtgagctttgggaggaagaaggagctggggacggagaggcccaggaggcagactggacggggcttgcgaggaaggacctttgaggtgatgagccaccatcagggtgctgggggttagtggttgctttagggaccccactagatcagggctgcctcccctcgtggccatttccctccctgctcagagaccggctgccgagagcaggacagaaactaggttcccggctgccacccacactactgaggtggggctgggcagccgcagaagccatgtgcagtcaggaagaggagtccggggctgctgggcgggcacagaccacggtgcgggcccaggctctcagcttgctatggctgttgaacttccttcccagactgtgtgaaaggggaaggagcagatcggacagcttgttgtggctctgatcccagctggaggggagaagaggcctcctggaggtcacactggagtggcgtgcttttggcaaggccaggcagccatgctgttcttgggtggctggagctgtggcggtgatagcccctgtagtaccgcatctccctctccaggaagcccctggccctggctctccctggactgagaggatagagcacaggaccaggaatcagggagcttgctgtccaccccagtctctgcaagtatgtcgccctggccagttgaggaacctcctggccactcattcttgcccagggtgttggaagtgatggtacctgctctgcttctgcagacaggatgctgtaaggaccaacaggtaaacgcgctgtgccaattagagaggcctttataggtcaaagtcataggaacgcacccacttgacagatgggaagactgaggtgcccacaggatggcagagccagaagtcaaatgcaggtgtctacatggccccgactgtgccctgtcatcggaccgggaggggtcctgaggaagtctttagtacggctttgctagtttgagtcttagagagtgtctgcaggaaataggaagcgggaagtaggtttttaaagaaaaaagtgtttatgatataattccatttttgtaaaacaaaaagaaccatccatctctttatgtatgagtgtttgtttagggaggaagatagtcctagtacatagagctctaaagtccttgtacataaagcagggatatctctggggagactgggggaagaattaataatttttacttttatgcatttttatgatgttggaatatattttacaataagtatatattactgttattgcttcttttttgttgtttttttgagatggagtttcgctcttgttgcccaggctggagtgcaatggcgtgatctcggctcactgcaacctccgcctcctgggttcaagtgattcttctgcctcaccctcccaagtagctgggattacaggcatgtgccaccaggcctggctcattttgtatttttggtagagacagggtttctccatgttggtcaggctggtcttgaactcccgatctcaggtgatccaccagcctcggcctcccaaagtgctgggattataggcacgagccaccgcgcctggcctattattgcatctttaaaaaaaaaaatgaaacagtgtaaatgtttcaagtagttttgttagaatctttcatttgccatttttttcaggcatattgcctcccagctttagttttctaccaatgggtcaatagcattttggtagatgccttttttttttttttttttttgagatggattctcgccttgttgcccaggctggagtgcagtggtgcaatctcagctcactgcaacctctgcctcctgggttcaagtgattctcctgcctcagcttcccaagtagctgggattacaggcatctgccaccacacccggctaattttttttgtatttttagtagagttggggtttcaccatgttggccaggctggtcttgaactcctgacctctcaagtgatccacccgcctcggcctcccatagtgctgggattacaagcgtgagccaccgtgcctggccggtagatgtatttttcaggcattgagatgaaaggagttaggggtacatgattatgtcacttagggatgggagggagggaaatgacacttgatgcttactttgtttctgcacattaaaatcctccccataaccctctgaagtggaggatttattatctccatcttaaaagtgagactcagagagattaagtaacttgtccaaagtcacacagctaataaatcggatttgaacccagctctctgtccacagccctgtgtactttccaccatgtgaggaaaatggaaatgcttaaggtgaagccccaaatgggaggttacgagccctggaatctagacccagctgccatttctaaactccccaacttagcttgaatcatgggtctgtttcctctcctagataatggagataatgatgtctttcctgcctacttcactgggctgcagtgacaggagaaagggaactagcattaaagcacctgcttcctgcgtggcacttggcatccacaagctcatttcacttctttctacacagttcaaatgggataatgtatgtgaaggtcctgtatctgaagggccagtgcacatgtgagccattgctaattgtgatgttaataagcacccaggacccgttctctctgagtcagtgtccttagcaaagggaagtgaattctgatgttgaaatctctgtcctcccctaagctaacatctttcttaacccttcagggtgcacgccacaatttccttttgtaagtggagcgccttgcttggaaagttcattttaaaggcctgcgtcagcagcttcagtcacgcctgctgttctgcagcattctcgatcctcacgggagggtggatgagagagggagtgaaattttccatggctgtgcacccttccacggggtggggtgaaaatggctgggatggttaccagtggttactggtgcctcctgctgcgaccggcctgttcacttgggcatgtccaatcttgcgtttgttttttgtgcatgttctgttgggagcaggaggtggggctggggtcgggcacagaaatgtttgtgagttgattgcagtgctaggccattgagttctttccttggttggagggctctgagccagggaagcttggcgaggctgtgtgttctctgctgatgacatgtcctcctgctctgcgggggtccaactttgggagccgctgagagcttcaaggcccccttggtccacaagaaggagaatccaggacaagtgtctggaaagtgtttgagcaagagcgcccgccctgtgcagccggtctggctaccctcataggaagggctcttcactctgggcagcggtggacagaggccctggaggctggatgcgggttctcaggcaagagtctgagggacccagctcggtgtctgatgtctggtgtctgggactgggcgccttcccatttccatcccagcctgaccagactgaccagagtcccacatattcgtctcagacactggtttgagagggagcatttgagggcctgggtttctgtcatgactcctgggaacctctgtcttctgatagatggtccacagaccgaggcttgcagtggaagcagctggaagtggtgctgtgcggtgtcctccccaactcccaaatggagtgtggggagggattcttcgggcactgatgtttggctggagcagtaaagcagcggtgatgtggaggcagcacctaagagaaggggacaggattatggagatgtgagtgtgtgtgtgtgtgtgtgtgtgtgtgtaagtacttgtgtgtgtatgtgtgagtgtgtgagagtgtgtgtgtgtgagagattgtgtatgtgagagtgtgtgtgtgtagagagagagggaagaggggaaaaggaaggaggagagtaaagatctggagatgctgtggagaggaggacagaaatagaaaagttgaaaggccagactttggccaaatccccaaagaccaagagtcagcctttcttcctgggtttctggcagagatctggagcaactgggcaggagagatttctccaatgccctttcttcctccctctctccttcaacccactgcccattcccagcctctttcccagggagacaggcgtggtccagtggagtgccaggaggggctggtctgaacgaggaagatgcgttttgctcagtgaagtgctgggttctctgggcccctggaagttttctgcaggtgtctctagtcatgtgcttttctccagtgcctccgggccacttaaaggcccacagtccagaggggcatgtctgctgagtcctgcaccaggtgcctgcctggctgggcagtgtggcagataccagggagctgacttctcccctggcagcccagccccaggcctagggtatttgctggttcagtggccccttctgatctcccgaggaccagtggaaagaaagggcttcccttcattgtcctcattcatgtaaaatccaggaggccccagtttcagttccggccttgcctcaattgggcctcccttttggccccagtattcatgtctcttctgagaggggttgtacctcatgacgactcatgaacctgaacaaaaggaggaaaaccctccctccatagcagcttgaggaccaggccgttctctgtgtctgcagcctgctttttgatttgagcttctaagctttatttggatttagcttggttgtcctgaaacgttggggtttttggatcaatgtctgtgtgctgagctgcaccttgacttagaaggcaggatagctgtggagttatggagagctgccttttctagaagcttctcctgtccagcgggaaaaccccaacagctctacttggatctgccttctgcagagcaggggaccagtctttcttaaggggcagggatgattgtatggaggagccttagacttgcaggtataaaacctcactcccccagctgtgtgctttgaactaatcacttagcttcttggaccatcagtttctgtgtctgtaaaatggggattaagaacatctcccagacagttttgaaggttaaatgacatactggatcttgatatactgatatactgtaagccacaagagaattatatagtattattccaggatccagcattgtttgaattcctcctttgtgtcaagcaactgggtgagttccaaaggtctattcaatatgttttctttccctggggaactcacgcagtatcataggagatggacagcttggtaaaaggataatcatgatgtgtgaggagtgtggtcgttggggcgtgtccaaaatgctggagtagcaatgtaccttttttaaaattaaaattaaaaaaaattttttgagatggagtcttgctgcattgcccaggctggagtgcgatggcgcgatcttggctgactgcaatcttctctacctcctgggttcacgcgattctcatatctcagtctcctgagtagctgggattacaggcatgcaccaccatgcccagctaatttttgtatttttagtagagaccgggttttaccatgttggccaggctggtcttgaactcctgacctcaggtaatccactcgcctcggcctctcaaagttctggggttacaggcatgagccattgctcccggccttaaaattaaaattaaaaaatattttagaggtgcgatatcactatgttgctcaggctggtcttgaacttttgggcctaagcaatcctcctgcctcggcctcccaaagtgccaggattacaggcatgagccactgtgccagctagcaatgtagcttttattgtatgatcttgcgcttgctcctccattctccacgcagcagacacacaactctcatcatggttgtaatcagtaaagccgtcccaaggctcgctgtgctgtgggatcccgcttgtatttgtttatgtggctcatcaggccctgtgtggttgagctctggacagtctttccaggcacaccgtctgcttgttcatcacaaaaaccaccctccctccccttcggacttcacacatgcccttgcttgtgcctgggcatgctctccaacttcgcctctccaggaagccttctctcccatgcttgcaacgtggctgtctctccctgcagacccagggcactatgatggcaagggctgctgatgaatgccaccagccagaatagggcatggcttgtctctcctcccagggccatgtttttggcaattttatttcctttaaaaaatatatatacatatttctttctttcttttttttttggagactggatctaagtctgtcacccaggctggggtacagtggcaggatcatagcaccctgcaacctctgcttccccagctcaggcaatcctcccgcctcagtctcccgagtagctgggactacaggggcgtatcaccacgcctggctaatttttgtatttttttagagacgaggttttgccaagtttcccaggctgctctcgaactcctggccccaagcaatctgcctgccttagcctcccaaagtgttgggattacaggtgtgggccactgctcctggccaattgttaattttttttttttttagagacagtctcactctgtcacttaggctggagtacagtggttcaatcatggctcaatgcagcctcaacctcttgggcccaagtgatcctcttgcctcagcctcccgagtagctgagactacaggtgtgcatcaccatgctgggctaatttttattttttgtagagacagggttgttgcccaggctaatctcgaactcctgggctcaaatgatcctgctgccttggccttgcaaagttctagaattacaggtgtcagccaccatgcctggcctcttctggcaatttctattctggctcttggtggttcctgattgcccttctttgagctgctttattgtaaagggaaaaaggtggtagggctagtggttaggagtgggggcaaggatcatccttgggcgcagagagtgttggcagacattttgggaggcctaggtgggtggatcacttgaggtcaggagtttgagaccagcctggccaacatggtgaaaccctgtctctactaaaaatacaaaaattagcagggcgtggtggcgcacgcctgtaatcccagccactcaggaggctgaggcaggagaattgcttgaacctgggaggtggaggttgcagtgagccaagattctgccactgcattccagcctgggtgacagagatagactatgaaaaaaaaaccaaccccaaaaacaaacaaacaaacaaacaaacaaacaaacaaaggaaaaaacaccagtgttaaggtcttttcagccttgtggggctgtaaatctgtctctctatccagtgggagccttctgtgtgcaaggctccatgtgaggcactggggaggtcagggtgacacgcatggaaagctgggatccagaccagaccctgcctaggggtcagtgctgaaggagtggtgatatccagcctgaaggacttggacatcttcaggaggaagtgacagttgatttgaaccttgaaggttaggtgagctgggaagaaaaggaagggcatttcaggtagaggtgacagcagaaggaggagagcctggagcacctactaggaatggtagaggtggtttggccggagttcagagagcacagagccacacctgcagagggtaggtgccttggcagtggggaggcattgcaaggctttgggcagaggcatgacttgattagggttgcactttaagaggctgatgctgcagtggtgtagaagatgggttggaaggaagagattgaagataaactgttacagtggatcatcagcaatccaggcacacagagcagcagaaagagtggatggtgaaacaaaagaaccttcctcggtggactctacagggatagtgccatcaggacaggtgtctagctcaattctaggcacctagctggtgcccagtgaatccttttttgggagaataaatgcgaagatgccatgaaggacaaacaattagtgatagccagtgacaacccagggtgcctaaggttaggagcctgggcagcttgaggagaacggggaactcaggaagaggagcaggttgggtcaggcctggtgaagggtgggagtagtttgactcggaggtgcagggcccatggcctggcacacaggcccggcacatgggtatgggagcccaggggctgtctccattcattgaggctgggtttaaggtttctgtgctctgggcctgccaccctgtgttctcagaagggtcctagccctttggccgccatttctgtctttctagaagtcttgcccatggacacctgccagtactactgtctcatgttaataataatagctgatgtttattgagcagttactgtgttctaagtgcttgtgtctcatttgaacttgtcctatatgttaggtcctatctatcatctcagtttttcagttgaggaaactgaaattcacacagctgttaagctctggggctaggattgaacccagttggctggctccagagcccttgttcgtagcctctctgtcattcccatcccagtgagagtgagccagccaattctcagagagagaaggaggcttgaggtgttcctgatactggaggaaacctacctccatcaagtacttgggggttgaagagcagcttccatgtcatatttgagggttggaaaggatcttagagatatcgggttcattttacaggccaggaactagggctcagagcatttgcaagcctgttctgggtgacatggatgacagcagttgaatgaccttccgccatgcgatgtgccagcgtgcgtgttcctgtgcctgtgggagctggctatctcagcgggtgggtgcctcaccttgccctgtcctccccctcgacctcactctccttccttctcatccccctccagattgacaagtatctctatgccatgcggctctccgatgaaactctcatagatatcatgactcgcttcaggaaggagatgaagaatggcctctcccgggattttaatccaacagccacagtcaagatgttgccaacattcgtaaggtccattcctgatggctctggtaagtctgtcacccagagattgaaccctgagggctaaatgttctgtgaaatcttccttctaacttcatttgttcatacatttgctcattcattcattcaccattccatcaatctgctctcccatccatccatccatccatccgctgatccatctgctgatccatccatccatccatccatccgctgatccatccatccaatatgtgtctactgagaccttatgccagtcactggggataccatggttgggcaaggctgacctgctgtcattgactttactgtctagtggcttgtgatactttagaaagtgtagtgtttatgggtctcgcagatactgtgtgggttgctcttatgtcttcagaacatgaagaactccagaacaaatgaagggttcattttagggaaatctctccatcagggaatcaaagcttccctctcttcttatcccagataatagcaatcctaatggacaggtgggtctcagacttaaaggcagagattccagaccccctttggacagatttcacagatgcagaattgaggcagcccccaaaacaaagaaatacagaggggaggtagaattgaaagaaaaattgtatcctttcactctgcatcctgtggctcataccctgcagtggggcgttgggggagggccccctgaggattgtctgtttctcctccccagaggagtggtatcagcccctgcacctggctgagcggagactgagaagtcgcagtctggcctgctcagtggaagctgttcttcccggcagacccgcagttactagtttgtggaggtgaatgctgtgcttgctccagcgtggcgccctcacaggaatcccctgttagctgtgttctgtgctctagggtggggctcacctgctgtaggcagcagagggagggagagcaggaggaagtcaggtttcccttggggttgtgagtacacgaccagtgagtacagctttcacacacccctgcgatttcttccctgctctcgaggctcttatttaaaggagtgatttggggcatcttgtatgcagcctgcaaaatggacgccaggaaactgcagctgttgcaactgatgttcttgaaagatgggcaagtgggagtaggctggttgcagcaggaaaagacctctgctctctgcctgcagtcatcctgaatgagatttggacgctgataaagaggccttgtgctgttcactgtggccacgggtggggtctacttcatgctcacatattagcatgtatatctctgatgtaagcctactccacctccacccttttgtttaggtgttgattactagcacctacttctagctttttaagaactactgaagagattctggccatcagagtgaatagactgtggtctaccctgggtgtgttcgcttgtctctggctggagaagaaagaactttatatatagttcactcttgctttttcccagccatggatgtcacctacagccaggagcactggaacctttccaggatgaggagagctatgtagcagaggcatggctctgactgcttccagctgagagaagaggaaggagcggggaggggagggggtatgggcagcacccaggagagcacctgctttggctttgcttgggagagctcagaaggctacctgatccctgcgaggcacctggccctgtgtgactggctcagggcagacacaggggaggagacactttgcctcctacccactgggccctgctctcaagccagctgtgtcccagggacctatgtcagcaggggtgctctccctctccttcacaaactgtttccaggattgagagtctcaaggtgtgatccaagtgcagtagaaatccagccatttgccatattggctactcctccaaacaaggcttagaactcatactcatttgtgaaatgtatttttcacccccttttagagattcatagaaacggcacccccccattccaaatatttatgggtgggttcagttcatgtgccccagagcccacacttcgcttgcaatggtccctacagccccgcaaagacattgctgttgatgctaaggacttggatacccaacccccagtccacttcctgccccttcgtgttgtgccgggcttctgtcttcacctccccctgcctcttggctcctttatcatccaagaatcaggagatccctgcagtaatcagaatctgggtctcttaatagtaaatccatagtgctgttccctttttgaaatgttaatcactgcttcaactgtagtaattagtgacagaattagtggtaatcccaaaccacggagggataaattggcgctcaccatggtggagcaatgcctaagtggtgatgtgatttccaaggcaaaggaaggaaacaagcctttcctttcttgctgaccttgaccctggtcgactagacacagagttttggaactcaactgactttccagaagcatttctgaaaacatatctgatacatacattctgatacctatcagcccatttttaattagtttctttcttttttggtcattttttttttaatgggcagtgaggtttttgtttttggtattttgtagagatagggttttgccatgttgcccagactggtcttgaactcctaggctcaggcgatcctcccacctcccaaagtgctgggattacaggcgtgagccacctcacctggcctgtttttatttttattttttagttgttcttcaataatctgtatatcattaaaaaaaccccaaaaacctaaagtggctttttgctgctgcatatcatttttgaggtagtggatgaatgaataataaagaaggaaaatattgaagcctcttaacattggtgatttggctaaatagaattccctcttcaaagctactgtagggagcaagggaaaacgtcccctttgccctctgaatgttggctgaaaaatcagctcacaaaaggcagattaataggagaaagggcatacacatttattaacatgcatgtgggagaatcacagactgattactcaagtatcccggtggggcccagatacttacatttcctcttttcttttcctttttttttttgagatggagtcttgctctgttgcccaggctggagtgcagtggcacgatggttcaagcgatcctcctgccttagcaccccctacgtagctgggattataggcacctgccaccatgcccagctaatttttgtatttttagtagagacggggttttgccatgttggccaagctggtctcgaactcctgacctcaggtgatccacccgcctcggcctcccaaagtgctgggattacaagtgtgagctactgcgcccggccacacatttcctcttttcagaggggaggcaggagacagggaacagtaaatgattactagggagaatgaagatatcagggaacagagattaaccagtaccggttctctttggaaattgaataggagacagattttttttttttttttaagacagtctcgctctgtcgcccaggttgcagtgcagtggcatgatctcggctcactgcaacctccgcctcccgggttcaagcaattctccggcttcaacttcctgagtagctgggattacaagtgcgcaccaccacgctgggctaatttttgtatttttagtagagacgaggtttcaccatgttggccagactggtctcgaactcctgaccttgtgatctgcccgccttggcccctcaaagtgctgggattacaggtgtgagccaccacgcccggtttaggaacagacatctttaaaaaggtccattcaggtgtggtcagattcttcagtcttcttttctgcaatagataatgagataacagggagggtaaggataaagttctccttggagggtctgcgtggtctttatgcagataggagaaaagcattttccagcatctgttgatctttaagggcctttagttcaaaatactcattataccagggagccatattttggggtgaagtattttgggtttccctcactacccagtctcttgggaattgctgtccctctgtgcccagcctcccccattcgcgaagtgtcccttttttctccttttctcatttatccctaaggatattgtaagcactaattagagtgtaagcttttggaggctaaataggaatcgatacttcttggtttcggcttcattgttcctacacagcctttacccaaaagagaagtttttacccaaaggagaagtaaaaaaaaaaattttctagaagcttggatgtgccattatcttttttcatgcaaagcagagccatttacagtgtagtcacggttgttttggggccctaaatattcatactactgttttccagtcaacggaaggaaaatatttaccttctcttcttgcagcatttgggtggtctcagttttcttatatggaaggatagttgggttatctcaagtattctctctatctgtgaaacctcctgagttgaaggcgtggagttcccatcatgcagctggattgtagatgggcaggaatgcctgtgtatctcatgtacagaattaattcattgaggctgggcacggtggctcatgcctgtaatcccagcactttgggaggccgaggcaggcggatcacctgaggtcaggagttggagaccggcctagccaatatggcgaaaccccgtctctactaaaaatacaaaaattagctgggcatggtggccggtgcctgtaatcccagctacctgggaggctgaggcacgagaatcacttgaacctgggaggcagagttgcagtgagctgagatcacgccactgcactccagcctgggcaacagaaactctgtctcaaaaaaaaaaaaaagaagaatcaattcattgagctggactcaggcaggcatttcccgcaggcagagtttttgcttgccctgtattccagcacaggctggtactcgagacacatctgtcctgtgtttgttttccattatttgctggtaataatggctgtcattagaaagtggagaattgccagtagcccttcggatgtgttgtttaatgagctttctcttgagcggttctcccagcttcagtggaaatgagaaatgtgaggaaaggtcacaggcaggaggccccagtagcaggaagcaaggtttgagaccaaagattgaaagaggaagttgggaggaaacctattactgcagaaagaggctgagcttgtagccaaagagaaaaggaaataaaaatctagaacactgaatcggtctctgggtttgccactcccaacctgtgtgaccttggagaagccacttaacttctgagcctccatttcctcatgggtaaaatggccatggtaatccctgccccacctgcctcaccaggctatcatcaggatcaaatgagagtctttggaaactgcaaaccaccgtgagttatggtgcgtcatcgtcatcctcatcagtcttatgatataataactggctttggaagaattccttgggaaagtctttcctaaccaatggagccagtccaaggaccgcacccagcaggcctgaatgtgtaagccgagcccctgcaggaaggatgcagagtttttcaggattcgctggcatctctgtgatgttacaggggaaggaggcagagaaaaggggcaagccaaggcaggctgtctcacccccaacccctgagctagccacataaaatgtgggtgagaccacaggctacagctccagtacctctgcaagggggtgactggacacgacagctctgaatcagggagccaacccgaggtaaaagggactgataggtcccttttgttatggagggcaagtgggtatttgggggattcatttcctgacaaagaatattgaactaacctggaaaccttctggttgtagctgaaggaaatctgactcaaatttgtttaagaaaaaaagagaattctagtttcctataactgggaagtctcgctgtgagttgacttctgtatctagggattcatctgtctcttactagttcagtcagctcctttcctgtgtgttggcttcattcataggccatctctcctcttacagtggcagggacggcccctgcagccctaggctgacccctccccttatagccagcgatctctgtgcaaagagcaggccttgctccccatggacctgtgatggtcttggagagggctgtgattggcttacttgggttatgtgcccatcctgaaccaatcacgatggacaagatgggtgacttgggatgcccctggatcccatgcctggattacgcattggtacccctggagctggagtggggattcagccccacttccaacctcataggtgaaaaatgggagggtagttatctaaagagatgctggacatccaggaaagtttatcagttatcttgttgtccttaacagacatcattcctcagtgtcttttgcccggcagcgtataggaccagcactttgggaggccgaggtgggcggatcacaaggtcaagagatcgagaccatcctggccaaaatggtgaaactccgtctctactaaaaaatacaaaaattagttgggcgtggtggtgcatgcctgtagacccagctactcgggaggctgaggcaggagaattgcttgaacccgggagttggaggttgcagtgaaccaagattgcgccattgcactccagcccgggcaacagtgtgagactccatctcaaaaaaacaaacaaacaaaaacatgaaataaataaatgtttaggtgaacattaaaacagcaaattaattaagtaaaatattaaaataaaaagtaccgatcatttcatctcagtgtagtatttgcttttgtgccccttttccccctatgcacaagtggtttatagttgtttatcagactgagctttcactgtcttcattagagaatgaagcaaaataaaaccaaagctggccgggcgccgtggctcacgcctgtaatcccagcactttgggaggccaaggcaggcggatcacgaggtcaggagatcgagaccatcctggctaacacagtgaaaccccgtctctactaaaaaaaaaaaaaaaaaattagctgggcgtggtggcgggctcctgtagtcccagctacttgggaggctgaggcaggagaatgatgtgaacctgggaggtggagcttgcagtgagccaagatcacgccactgcactccagcctgggcgacagagcgagactccgtctcaaaattaaataaataaataaataaataaataaataaaaccaaagctaggccaggcacggtggctcacgcctataatcccagcactttgggaggccagggcagtcggatcatctgaggtcaggagtttgagaccaacctggccaaggtggtgaaacctcgtctctactaaaaatacaaaaaatgagctgggcgtggtggtgggtggctgtaatcccagctactggggaggctgaggcaagagaatcgcttgaaccccggaggcggaggttgcagtgagccgagatcgcgccattgccgtccagcctgggcaacaagagtgagactccgtctcaaaaacaaaaacaaaaacaaaaaaaacaaaacaaaaaaacccaaagctataaggaatcatggaagttgaagagccccagaaaagaagtgtagccattcctgatgtgctgaagtctctctctggcccccacttttccttggggatccttgtccctgagttctgtccaggaggcagttttcatggttatacattatggcttcggattcaaatgctgactctgccacttactggttgtgcgtttgggcaagttatctaacccctctttacctttacttgctcatctgtagaatgggcatcctgacagtactgacttcatagggttgtgaagattgaaaataaaaggatacgtataagcacttagtgattggtacagaaagactcagtgaatgttagctgatggatggtcaaataaaatgtttctgatattctagtgactcacctgcgaggagctacttcatactgaattcaattttttcagttatttcaatttttttttttttttgagacagagtcttgctctgttgcccaggctggagtgcagtggcatgatctcggctcactacaacctccgcctcctgggttcaagcgattctcctgcctcagcctcctgagtagctgggattacaggcacctaccactacacccagctaatttttgtatttttagtagagacagggtttctccatgttggccaggctggtctcgaactcctgacctcaagtgatccacccgcctcagcctcccaaagttctgggattacaagcatgagccactgcgcccggctgaattcaattttttaacctagtggtggtgtaaagtactgttggagttaggactccaatgggagcccaaagaaaattctatattgatttgaacaatgccacaaagtcggggtcagaatttccaccaaatctatgacacctgcttcccagcattctcccttgttctctctctttcctttggaccacaaataatttaaaaccagtggcttcatgtgatatatacatataatggaatataatcggttcataaaaaggaatgaggtactgatccacgctacagcatggatgagccttgaaaaccttatgccgggtgaaagaagccagacacaaaggacctaatattatacaattccacttatatgaaatgtctggaataggggcatctgtagagcagaaagtacattagtggttgctgggagatagggaggttgggaggaaatggtgaatggttgttaatgggtatggaatttcttttgggatgatgaaaattttctaaaattagatagtggtgatggttgcacaactctgtaaatatgctgaaaaccactgaatttttcactttaaaatgggtaaaaattgtatgctatattattatatctcaataaaactgttattaaaaaaacaaccaaccaatatgtgaaataataagaaatatacatgttggtctctgcccctagtctctagcatttagcttctaaaacccttgtaatttcttgagcaatacaggtgctaggagaatctttgatcctggtcctgactcagagctcctaaatcccttggaatttcttgggtgataggagagtctcttttgttccttggtgggaccctggatagcctcaggatggggggctggttgccagggggaaccaaccatgtgatcagagggttgctgtcagccccaacccccatgccgcctccagggagggagagagcctgaaaatagagcgaataaaccaatggtcgatgatttaatcaatcgcaactgtgtaatggtgcttccacaaaaacctaaaacaggccaggtatgatggctcacgcctgtaatcccagcattttgggaggcccaggtgggtggatcgcttgagcctaagagtttgagactagcttgggcaacatggtaaaaccctgtcactacacaaaatacaaaaaaaagttagccagatgtggtggcacgtgccggtagttccagctactcgggaggttgaggtgggaggatcgcttgggctctggaggttgaggctgcagtaagctgtgatcatgcaactgcactgcactccagcctgggtgacagagtgtgaccctgactcaaagaacaaacaaacaaaaccaaaaaaaaaaaaaaaaagcaaaaagaagaaaacctagaatgactgagttctggtagcttctgtctagctgaacacatggaggttcctgggtggcacatctggagggggcatggaaactcctgccctttctcccatgcccctccctgtgtatctcttccatccagttcttcatctgtatttattgtaatatcctttatagtaaatatgtaaatgtaagtgaagtgttttttctgggtctgtgagctgccgtagcaaactaatgcaacccaaggagggggttgtaggaaccccgatttatagtgatcagccagaagcacaggccacaacctgtgcttgtgactggtgtctgaagttggagggagggcagcctcgtgtgaacgagccctcgacctgtgggatatgatgctatctccaggtagctagtgaaataattgaattgaattagagagcatggagctggtgttcactggagaattcactgcagaattacttgcttggtgtgtggggaaaaacccacatgcatccagggtcacaggtgtgttctgtgttgtggtgagtagagaaaaggaaaaacatactctggtttttcctctgtgtgtgtctcacatgatggcgtaactgctttgtgcttaataaacagcaagcaggggtgctgtattagtccgttttcatactgttaaaaagaactgcctaagactgggtaatttataaaggaaagaagtttagttgactcacagttcagcatggctggggaggcctcaggaaacttacaatcatggtggaaggagaaaaggcatcttcctcacaaagcggcaggaaggagaagtgctgagcgaagggggaagagctccttataaaaccataaggtctcatgagaacccactcactatcacgagaacagcatggggggaaccacctccatgattcagttacctccacctggtctctttcttgatatgtgggcattgtgggggttacaactcaagatgagatttgggtggggacacaaagcctaaccatatcaggtgccttgaatgaatgaatggaccaccagtccctgtgaccaggcagctaatgagcatttgctgagctgtcctgggtgccaaggacagagaatcccaagttgtggtctttccctcaaggaacttgagaacgaagataggaacaggctgggcgcagtggctcatgcctgtaatcctagcactttgggaggccaaggcaggtggatcacctgtggtcaggagtttgagaccagcctgaccaacatggtgaaaacccatctctactacaaaatacaaaaattagccaagcatgggtggtggacacctgtaatcctaagtannnnnnnnnnnnnnnnnnnnnnnnnnnnnnnnnnnnnnnnnnnnnnnnnnnnnnnnnnnnnnnnnnnnnnnnnnnnnnnnnnnnnnnnnnnnnnnnnnnnnnnnnnnnnnnnnnnnnnnnnnnnnnnnnnnnnnnnnnnnnnnnnnnnnnnnnnnnnnnnnnnnnnnnngaacagtgacattcaatgtgagaattccttggtttgttgtttatttctttataccttcattaattccacaagtatttgctcagtttttacctacattccaaacaccattgtaagttccagaaatatagcagtgtgtcagggcttatagcttggtagaatcaaatacaaagataagtcagctttattgttaaaaacagaaagcaaaccttattttgtgttgaaaatcaaaagctcaagggacccagaataaccaaagcaatcatgaaaaagaagaacaaagctgaaggaatttcactgccaatttcaaaattttcagcaaagcaacagtaatcaagacatgtggtactggcatgaaggtagacatgcagactaatggaacagaatagagagttcagaaataaatgcatacaggctgagtgtggtggctcatgcctgtaatcctagcactttgggaggccgaggctggtggatcacctgaggtcaggagtttgagaccagcgtggccaacatggtgaaaccccgtctctactaaaaatacaaaaaaattagccagttgtggtggcacacgcctgtaatcctagctacttgggaggctgaggcatgagaattgcctgaacccgggaggtggaggttgcagtgagccgagatcatgccactgcattccagcctgggtagcattccagcctgggtaacagagtgagactttgtctcgaaaaaaaaaataaatgcatacattacggtcaattgacttttgacaagaatgctaggactattcaatgagggaaagaatagtcttttcagcaaatggtgctgggacactggatatccacatgcaaaagaatgaagtttgacctacacctcataccatatataaaattaacttgaaatggatcaaatacctaaatgtgggagctaaaactaataaaactcttagaacgaaatacaggtttgaatctttgtgaccttggatttggcaatagagtcttagctacaactccaaaagcacaaacaataaaagaaaaaacgtaaaactggacttcatcaaaatttaaaacttggccatgcttggtggctcatgcctgtaatcccagcactttgggaggccaagcaagaggatcacttgagcgaaggcatttgagacagcctgggcaacatagtgagaccttgtctctaaaaaaaattaaaaattagccaggtgtggtcgtatgcctgtagttccagctacttgggaggctgaggctggaggatttcttgagtccaggaggtcaagggtgcagtgagccatgattgcaccattgtactccagcctgggcaacagagcaagaccctgtctcaaacacaacaacaacaaacataaaatgttactgcatcaaaggataccataaaaaaaagaaaagacaatccactgaatgggagaaaatatttgccagtcatatgtctgataaaggatttgtatctagaacataaaaagaacttttacaactcaacacataaaagacaaatgaggccgggtgcggtggctcacgcctgtgatcccaacactttgggaggccgacgcaggcggatcacaaggtcaggagttcgagaccagcctggccaacatagtgaaaccccgtctctactaaaaatacaaaaattagccaggcgtggtggtgcacgcctataatcctagctactgaggaggctgaggcaggagaattgcttgaacccgggaagcagaggttgcagtgagtcgagattgagccactgccctccaagctgggcaacagagcgaaactccatctcaaaaaaaaaaaaaaaaaaaaaaggaaaagataagccaagtgtttaaaatgagcaaaggatctgaatagacatttctccaagtggccaataagcacatagaaatgtactcaacaccattagtcatcagagaaatgcaaattgataaagaagtcagactgtaataagtgttgatgaagacatggagaactgaaaacttcatgcattactggtaggaatgtaaaatggtgcagctgctttgaagaatggtggtaattccttgaaaagttaaacatgggttactatttgacagcgattcttgtcctaggtatatatacccaagataaatgaaaacgtgtccacacaaaaacttgggcacaaatattcatagtagtgttattcataatagccaaaaggtagaaacaaaccaaatgtctgtcagtaacaaatgaataaataaaatgtgttatatctatagagtgtaacagccattaaaagggataaagtctcatatgcactataacatgatgaaccttaaaaacattttgcttagtgaaatgagccagtcatacaaggtcatataccgtatgatttcttttcttctttttttgagacagggcctcgctctgttgcccaggctggagtgcagtggcgtgatctcagctcactgcaacctctgtctcttgggctcaagagattctcctacctcagtctccaagtagctgggattacaggctcacaccaccatgcccatctaatcttttttgtgtttttggtagagacaggggctcgccatgttgcccaggttggtctcaaactcctgagctcaagcgatccacctgcctcagcctcccaaagtgctgggattacaggcatgagccaccgcacctggccactgtatgatttcattgatatgaaatgtccagaagaggtaaatctatagcaacagaaaatagattagtggttgcctagggctggagaaggatgaggggcttgggaggtgatagttaaagggtatagggtttctttttgaaataatgaaaatgttataaaattggctgtgctgatggttgcataactccgaatatactaaaaaccattgaattgtatactttaaatgggtgaattatatggtatgtgaattaaatttcaataatgctgttacataagatataatgataaagatctttccctgcctaggaaaatgatatgccccaaagcagtctagtatttactgccataggattgagagcttggtggatcatgtgctgtggaaggcaggggtggccgtcacccctggcgtggtagatattaggacagtggggatgtcaccttagcatcacgagtgaaacatatcttaactgatttttctgggagcatcgtgaggataactaatgagatgaagggtagagaatgtttggctgtggcttaatggttggaactttgcccatggccgcctgcctttgctgtccgatggtctcagcctacagtcctgctctgccccctgaggcccaccccagtgctgcacatgtcactcccgagggaggtaaccatagcagaccagtactttggccactggtacttttatgtgaccaagagggacttctgttaaaagcatcctctgggtggaaacaacccaagggtccatcaacagatgaaaggataaacaaaatgtagtggatccatacaatggaatattattcagtcttaaaaaggaatgaggctgggcacggtgactcacgcctgtaatcccagcaccctgggaggccaaagcgggtagatcacctgaggtcaggagtttgagaccagcctggccgacatagtgaagccctgtctctactaaaaataaaaaaaattagccaggcatgctggcggatgcctgtaatcccagctactcgggaagctgaggcaggagaatcacttgaacctgggaggccaaggttgcagtgagctgagattatgcctctgcattccagcctgggcaacaagagcgaagctctgtctcaaaaaaaaaaaaaaaaaaaaggatgaaattctattgggggcagggtggctcatacctgcctatagtcccagttacttgagaggctgaagtgagaggatcttgggagcccaggagcttgagactgcagtgagctttgatcacaccactgtactctagcccaggtgacagagcaagaccctgtctctattaattaaaaaaaaaaagagtaaaattctgaaaatatggatgaaccttgaaaacgttatgctaagaggaataagccggtcacaaaaggacaaataactgtgtgattcttcttgtatgaaatatccagaataggcaagttcatagagacagagagtagaatcgtggatgctggggactgagggtgaggggaaatggaaattattgcttaatggttatagagtttgtgttggggtgatgaaaaagttttgaaaatagtggtgatggttgcacaacattgtgaatgtacttaatgctactgaattgtacgcctgaaaatggttgcagtggtaaattttatgctatgtgtatgttaccacaataataaaacacaaccctgaggagtaagcagaaccctggaataattgatgtcagagctgacatgcagagacccagggcaggcactgggtggacctcagatgtagggctttgtctgagttgaaatgcggtgtgattttttatttctgcatagcagtgctgtttttgaaataggttaagaaactagagaaacatggggtgggaatttgtacttaattcagtacttccattcccctatagtcagaagtaagagactgggattgcttgaagctatttctgtctaaggactctggggtaggatagggtttcttttgcctactctgcgtatatggcagtggttggatgaagtttgcatgattgctgctttctggctgataacagcatgtggcagggggaggcagacagggcctacgccctgccaggaagcgggcatggtatgtggcttccccttaacatttgaatctcatgtgatacctgttgtctccctaaacagaaaagggagatttcattgccctggatcttggtgggtcttcctttcgaattctgcgggtgcaagtgaatcatgagaaaaaccagaatgttcacatggagtccgaggtttatgacaccccagagaacatcgtgcacggcagtggaagccaggtgggtccctgctccctccgggtcaccccgtcgggccagcatccccttggttacctccaggaaccaggcctcaaagcactggcatcccaagcccctggaagagggttgctggaaagagtccctcatagatgcatatgtaaaaggactcctgggcagaggatgtgacagcctgcatgggggccctgcttaaacagaggctctccgtctgggcaaactggtgtagtggaagtgggctgcttggactagcagagtctgggtttgaggagggaggctccgcagctctgttgggtaaatgcactcattccctgtggatcctggggtcggttccccagtgcaggtttagcagagccctgggtgaaaatgcccttttctcctggtcattggcctcacccacttactggaggccccggccttgtagggtatggctgtggccttgtcgggcaggaatgaggtctcacagctctgggctatttgggggcttcttgttacctgatttagaataccattgcacaagcccttggcacagaaagcagaggaagcagggaaatcacggtcccctccttttacactcctgttggggctccccacgctgggcccccaggaagggctgcccttcctccctgcccaaggggctgtgggcatgcctaggaagggcctgtccacctgccccctcctctctgggtgcggggagtggtgggtctgtagctcactgaggaccctgtgatcagggctcaggcagcccactgcaggttttcagtcatttctgggtccctaagcccgtcgtggggcaaggtgcactcctcctctctcctgtagacattctggctcctccagtctggctcgcctcctgagttgtggctgctgtccagcatatgtactcagagctggccaaatgtttgctttaaggagggtgtgctcaccgcaaggttcatgactaagatttccagggaactctggttctggggtggacttcgagatgagacccaggagccttctcttgactctactgtgctcttaagttcttgtgggtgggacctggagcaagccaccaagccttttctttgtccaagagacaagggctaatcctggctaacctgctccctgggatttgggttcagagcccttcagattatgtcacagtgagtgtcacaggtgacactgtcactagagcaggtgagccactttatagtaggccaccaaagctgggtgcatcactactggatggccctgcccaagggctcccctgctactcccattactggggctgcagagactggcccatccatctggcgcctgcacaaaggctgccagctggtaggtctcttgaccatgcccagttggctgctgcattgcttctccttgcaggtggccagcagcccatggtttggcatcctgcactttctgtttggaacacacactggcctatcactctgtttcccaaggtccttgggttgagctacctaagcctggcgcattcaacactgagactcaccctgtgctgcaaacattccctgtgtgttttacaaacattccctgtgtgttttggcttgaccttttaggagcaaggtttgttaattaagggagtaccctcaccttcttaccactgccctcttcgtctctcccagcctctatccccatcgtcccctcttctcagtcctagaatcactttatttcctactgtctctgtttcttcctctcctccttttaagcagcctgaaaagaggatgatgacgataatcatgataatgtagtaccattatagcaaattcttttttttcttcttttttttaagacggagttttactcttgttgcccaggctggagtgcagtggcgcgatctcagctcaccacaacctccgcctcccgggttcaagtgattctcctgcctcagcctcccaaatagctggaattacaggcatgcgccaccacacctgactaattttgtattgttcgtagagatggggtttctccatgttggtcaggctggtctggaactgcctgttcaggtgtgagccaccacacccagcccagagcacttttaagctttaataaattcagaagcacaaatggaacattcttaaaatatcacttacttagttgtgggaattttgaatagtaaatgttttaagtttttgtattagccatcatttgccatctttaataagagtgactgagtctttatttttattttaaattattaaaaaaatttttttttaaagatgggatcttgccaggttgcccaggcagatctcaaactcctggactcaagcgatcctcccactttagcctcccaaagtgctggattatagatgtgagccactatgcctggccatagtgtgtgtatttctcaaataaagagtgtgttgtcaggcaagaagagaaaataatgtttttttttttttttttaagacactaaagctttgagttcagagcggttaggtgactttttttcctggttgatcgcagacatagtctagcctggggcgggtcacttcctgcctctttgggcaggcttgtcaccctggatcaccagcactccagaaacggcctttccttctcaatggtgcactctggggagttgtgtttggcctggatccgggaactggtgacaggtcccattcatgggaatccatttgagttctgccccttcctgaggcagccttcccttcacccggccttctctcccgaggctgcaggagagtctggagcctccgagtgcagatggcgtggggcgccaggaccaacttagtaatgagtttatatcagtctgcaatgtaggtcgcaggaagcttagccggcttctctggggagggtcatgtgtcaactcagcctaagatgccagctgctctgcagcctgagtaatagtgactcagggatagaaggtcctacattaaaattgaccaggcgttctattactctggcaacaaagtccgactttagagctggcttgggggggatctggggaaagatgggaacagcagtaatgacttctggccccctcatgaggccctgcaagtaaagccttcaggcagctggccttgtctgggagttcgggctggggccacttcatgtgactatggtttggctctcctaagacagccttcttctgggttccaaaaagctccatggctgtgtcactgccatgtgtaagggaggtctagtgtcatgagagtcatgtgaaagagacaaggggttagctaggctgtggcatggctgccaaaagtgtatatatatacgctcaggttggattactagaggcagagagataaagaagggaggttcttagttctactaaccactcttctggttagaacacacatagaatattatcttctgttctgattatattttgagacagggtctcactctgctgcccaggctggagtgcagtggtatgatcatggctcactgtagcctcgacctcctgggctcaggggatcatctcatctcagcctcccaagtagctaggactacaggcatgtgccagcatgcctggctaatttttaagctttttgtagagaggaggtctcactttgttgcccaggctggtgtcaaactcctgggctcaagtgatcctcctgccttggcctcccaaagtattgggattacagacgtgagccaccatgcctggccctggttatattttagagatgaagggaattattagagagatccaaaaagattaccttagaggtgttgagcctctcctcatgggcagtattcatgtagaagctagggacccagtgttccaggctctttctagcagattcctaagatatgtatgtacctgataagtcatagataacatgttatagcacaggcaagcttaagctacagtgcggtagataaattgtggtatattcataccaaggaatactgtgcggcaatgagaatgaacagttgtcaaagacaactccgtggatgactgtcatccacatggtgtcgagtgaaagaacacagacaccaaagagcacacacggtctcatttccctttagacacaccaaacaaacaggcagatgtaactgagggtgatagacgtcggggtggctggcagttgcccttgggctgggtggtagcggtagtgactgcaggggcagaagggggcatattacaggtgtttctccatctcgtgtttctccatctgggtgctggttacatggatagctgcagcttgtgagaatccagtgaactctgcacttaggatgtgtgtactttttggggtatgcataagacacttcagtaaaaagtaacattatgacagtctgaattgttaagtcactccagtgggctagaggctgtggaattgccctcagagtttctgaaattttcagagagcgtggcgtcgggcggggcgggaaggccactccacctggtggctggtggagatccgtgacctgtgtgttatgaaggcatagctggttttctattatttttccatttttctcagtacccagatgttgcatattagtgaccactgagaggccagttctgttgaaggctttgaattgcttcttaagagctgtacttgcccacagggtagcttttgaaaagtgactcttctctgcattcacacacagcatggcttttcagacagggccaccaggtcccaggagtacgagcactttgtttgggtagatgtattcctttctgtgtgtgtgggagggaatggtttatatttttctatgaaatgctaagcctgctttggggccccctgactgctctcatgtttccttcagctttttgatcatgttgctgagtgcctgggagatttcatggagaaaaggaagatcaaggacaagaagttacctgtgggattcacgttttcttttccttgccaacaatccaaaatagatgaggtaaggatgttctgggattatcgggctctgcagatgccccgggatggaaaagctaacaagcccttttctccacaacttttcccctttgttggcagaatggtttgcatgtctggtatttttaaagaaacatttgcagaagttagtgtggtatcatgatatagtgtttactttttcacttaaacttcagttatttatgtatttttggagacaaatcagggtatttttggccaccaggtagacagaagcatttattaatcttaggcaagcaaaggaaaataaagtagttttaatggtggtggagagaggtgggaaagctctttgccagaattgcatggtgtgatgtttacctggaaactgccctggttactgcgaatatgctcagggccctgtccctcaggtgccagggctgcctctccatagtggagctgatcagtggctccagccccagggatgcccttggcgacctccgaggtgacttgttgtacccaccttcctgtttgtcatctatttgttttttcattcgttcattcattcagcaaggatggactgtgatgataacactgaacttcagcactgcaggaatacaaaataaatacatacagccttgttctttttttacatggaaagacagaaaccacacacaccacaaacacaaaccacccatgaataaacttctaataatatgaattctggggttgggtgcagtggttcatgcctgtaatcccagcactttgggaggccgaagcagaaggatcacttaagtccaggagttcaagaccagcctgggcaatctgtacaaaaagttagctgtgtgcgttaacatgtgcctgtagtcccagtgatgtgggagaagcttgggagatcgaggctgctgtgagccatgattgtgccactgcaccccaacctgggggacagagtgagaccttgtctttttttgtttgttttttgagacagagtctccctctgtcgcccaggctggagtgcaatggcacgatctcggctcactgcaacctccacctcccaggttcaagcaattctcctgccttagcccccctagtgctgggattacaggtgcccaccaccatgtccggctaatttttgtatttttggcagatatggggtttcaccatcttggccaggctggtctcaaactcctgaccttaggtgatccgcctgcctcggcccctcaaagtgctgggattacagacgtgagccactgcacctggccaggctctgttttaatacatacttcacaggtattgcacataatcttcaagcatctctatgagttaagtgcttatgattcccactttacagatgaggaaactgagtctcagaggggctaagaacctgtccaaggtcacctagccaggaagattccatgctcgtaactggtctactctgctgcaagttagtagcatttgggctcagggcaccttccacacttgcagggagcacccctgggtccctttatgccattagggtaagcgtcctttcctgggcactgcttcctgtggctggaacccttacatctgtaaaatctgtggaatcagcaagaaggggcttgagagcacagcaggccaagatgagcgcagaggtctccccagggtcacagggcttattaatggcaggccttggaccagggtcccaggccccacctcccatccagtgctccacccacctccaacatgtctaaatgcctccgagatgttctgtctgacctgttatgctttcaggaagctgtggccatatgtagactcttaatctggttctggtatctgagaacgcccctccaaggtgttcagatcagtttggcctccactgtgtccttccaaaccctttggcaaggcctgttttcagtacaagtttcccttggcttttgagaactgagacatgacagtcactcccccttccccttcccttgtgagaggtgggcctggaatgaagagactttggtggactgcgtttcaccgttgtttacatgtgctctctgcagctattgactgagtgccatccctgtgccaggcatgggctaggccctgggagagaatggccagagtgtatttattttgtattcctgcagtgctgaggtttaatgttaccgtacagtaggtcccgtaacagcagatgtagcctgttccccatgaaggtgcagccttctatggacagaagtgttgcaggaggtgggagggaatgacttcctgggcacgagagcctgcagggtggagcagacatgcccaagagggggcattgtgaacagagaaggagccagaggtggggggtgtccacctgccagccttcaccccctctggagaatgcttcctaggctgggccagggtacttgctgtggcgccagtggagcacagaccctcaatttcccatccagaggcctgtgcatgttaccccttagggctggctgagaacttcaagattgtccacttctagatcagctccctgtttctagaggagcacagtgaacctcagaggagtgaagggaactgcccagcaggaaatgggcagacagtatgaagtgggaccaggtctccagattgccagccccacctttgtcccacaacacctggttctctgaggctttggaggaggaagagggctgcttgagaggaggcagatagtgtccagggcttttgcagttcctgacttagcttagttgctgctgagcaaagaaccaccagttctcatcaagggctgccctccctggtgcatactccagtctgtgtggctcccaccgtgagctggggcggggcccatgtgctcagaatgctatccctgagctacctctgcaggcctgcggggcctggaccgtgaatcttccaaccctgctgcatttatagtgacttgccccattcagagtaaaacagccaagtataacaattatttttctgttctcatatctttttagtttttttttaagaaagcaaaagcaatatgtaaaactatcaaagtaagataaaattatagaatgtttaccattggatgtctatccttgatgtttctctgctaatatgcaaagtgaaataggatcatactgtgtaaataggggagtcaccacttacaaatggcggttaagtcccaaagctggtgaagaggcacaaatcatgtatagtccacatcattccctaaatgtctgggacctggctcttaaaagctcagcagccaagaattatcttagcattttgtttctttttccaatttggctctggctttcttttcccagggctgtggaagccggggtctggttgggaagtggggaagggggccagggatttctcttgctcccttttaaaataggtctggctgcgcagttggcatccagttagattggcaagccatgtggcattactgtccccacatccacttgctttcttctggagtgaactggatattgtgagcaggtttctccccaccctatctttgcccccagagaagcccattgtgtggatgatcgggagatggaaatgagtctgggcccctccccaagcccagtgtgatctgggaggagccacttggcccctatgggcttctgcttcatccctgtcctggagcaatgcccagggccttggggtgctggaggcctcccagccctcatccagccccatccattcttctttgcaggccatcctgatcacctggacaaagcgatttaaagcgagcggagtggaaggagcagatgtggtcaaactgcttaacaaagccatcaaaaagcgaggggtaatttctcctgggccctctgcctcagccatgcaggggtgtggggagcagggctgcattctaaaacagaccagtgcccttcctggggggcagtagtgccaaagcctgaagacccaggcaggggagagttgagggctcacagtgtggaatgatgaggatggggatggtgcaaagcccagctctcggaggtgctgcctggagcacccaggcctggagcagggggtcacctcctgacaggagtgctgggctattcagggagtgggtgtcacggatgcagcctgctgtgcttagaacaagggcagaggagcccgccttatcggggacgtggacctcctgtggaggtttgcagaggaatgtagctccatgagtaaaatccccactacccaaagactcttaagccaggtaattaaggaaactgtgaggttttcatcatttaatcaccatgctctgatctagttaatttgagtaccagctgtaatgaaaccagtaccactcacaaaagcaggggttctgaaaacgggagcacttctgccaagcgctgttaaggtgtgtgatctctgctcccatgtgtgagtggacaatgacaccccgttatctgtccccaggactatgatgccaacatcgtagctgtggtgaatgacacagtgggcaccatgatgacctgtggctatgacgaccagcactgtgaagtcggcctgatcatcggtaatgcattcccctttgcccatccatttgttcggcccatctttccaggtggctctgcaccctccccgttgtgtggtcatagcttctgatcttgtcctgcccaggcactggcaccaatgcttgctacatggaggaactgaggcacattgatctggtggaaggagacgaggggaggatgtgtatcaatacagaatggggagcctttggagacgatggatcattagaagacatccggacagagtttgacagggagatagaccggggatccctcaaccctggaaaacagctgtgagtccttgacttttgcttctaaccacatatgtgagttaggggacatttgatgaaagatttgggatgggagatgaaaagggcataaagccaagtgatcacaaacagaaaagcctgtcacattttttttttgaggcggagtcttgctctgtcacccaggctggagtgcagtggctcaatctcagctcattgcaacctccacctcctgggttcaagcgattctcctgccttagcctccaagtagctgggattacaggcatgcatcaccatgcccagctaatttttgtatttttagtagagacagagtttcaccatgttggccaggctggtctcaaactcctgacttcaagcgatctgcctgcctcagcctcccaaaatgctggggttacaggcatgagccacctagcgcggcctaaagcccatcaaatttgcattatttgttgctccttgtttggtgagatgcacagctgtagagtctgtagctgaaaagcacctttaaaataatcttctctttgtttaattacactatgattgtgtccttgtaaaacatcatgaaaacaaaaagcacagaggcattgatgcatcttggtgtggggctcacaatgaacccatctgatggggaatgcggccagagttgagcaggtactggtggtcaggggaggagatcaagaggtgaatgggagcccaggagctcagtagcccctgaaaaaaaaaaatcctcaaattatcccctgctgcatgaaaattaataaatatgaatggttcaaaaatgcttccccaacaaagcacaggaaagttagtgtaaatgtaaggtttaaaaaatatctctatgctgtagtcacgagtgttgctgttcatggtaagagaggccaacatggtatgtggggcatctaagggagatgagtgtccattcattcatcacatatttattgagcacttactatgtgctgagctctgtgctaggctctgaggatccaaaacagcaccttccctcccaagacttacaatctagatggggaggtagggcagacatgcaaatatctgttgtgcagaggagttggggtaagaagagtataagtcatgtagacgttagggagaatggagaagcaacctccattcttactatggcaatctccgtatctccaatgtcaagcataaatagacacaccagagttgataaagaacagaagtaagagtgatattattcaggttagagtgggtattgctttctctgagccacttatttcctgaagtgcctgctcacatttctctgtgatgctggcatgctgctagctctctctgatctacccagcctcccagcagccttatcccagagttggatactgtcaacctacagagagatgttcactgactctgtagacctaataacccttatcctgatgctagagggacaggaatttactagccatattgaaatgcatgacccaaaagatctcagtactgcagggtggacagttggcctttccacctgaattaatggattttcatcaatggcgagctccccaccagtggaggtggcagcagtgaataaactaggtttctcagtgagggaattcccaagttcttacacccagagttgagcatcaccattgcaggctgagactgtggtaccagcttggtgacaagggaccccagttccaaagctctgacagtcaaaggttttttaccatacccccccccaccccgcccaatccattgaccccactggcatgacatgaacttattactgtgcctatttgtatgtttcactgaatagccctgaatgtgcttgatggcagtgctgcctcaggcacctctggaggtattctgtgacacatggcatgtataccctgttgcatctctaaaattctcaaatctccacattcccaagcacatgtgaccccaaagggtttcagataagaggttatgtacctgtagttactatcagtcacttaatgagaagtctcttttcttagaagtgcaggtggggcatgccacttgtggtaactcgacaggtaatgcccaggcccttatccttggttcccagtttgggaaccctgcatggcttgggtgtaaacttggatctctctgctgtccattgatgtttgcctgaaattttccaaagagatgaactgtatcccaaggctaaactataaactgtgtttacagttggcttgcaataaatatttttgggatggatggatggatgggtggctgatgatggatgagagatgagtgggtggctaaatgggggtacagatgagaaagtgaaaggttggggcaaaatctcttttcttgaatatgtttctcagttgtattagtctgttttcacactgcctataaagacatacccgtaactgggcaatttacaaaagaaagaggtttaataaacttacagttccatgtagctggggaagcctcataatcatggcacaagtcatgtcttacatggatggcagcaggcaaagagaaattgtgcaggggaactcctctttataaaaccatcaggtcttgtgagacttattcaatatcacgagaattgcgtgggaaagacttgcttccacgttcagttatctcccactgggtccctcccactacaacatgggaattcaagaagagatttgggtggggacacagccaaaccatatcactagtttactgcatactgtaggccaggtctcattgagaacaattccaaggaaatgacaaattcccaagttgcatcacatattcctggaaataggctgtaggctaaagagtttttttgcctaagcaaatttttgctgtgcccccaggcttctatctgaatctttggatcttccctatgtcgtttttccatggaatgcctagttcttgaaagccattttaccctctttgtggcagggaaagacgtttgctccatttgactgatgggaaaattatggccctagaataggacagaggtgacccaagactcattgttgaggtgtggtctggtgtaggtttggggatttttgccctgtttgaaggtttgaggttttcagagtgagcttccagaatcttttctcattggtaatcagggaggatctagggaagtgatttttcatctctgagtacatgttagagttacatagcggtcttttaaaaaaaatactgatgtccaggcatcctctcactaatgattcagttggcctgggttgcccagtcctctgtattgtaaaagctccctgggcgattccaatttttaaccagggttttttttttgttgttgttgttttgttttttgagacagtcttgctctgtcacccaggctggagtgcaatggcgcaatctcagcttactgcaacctttgcctcccaggttctacgtgattctcctgcctcagcctaccaagtagctgggattacaggcgtctgctgccacgcccagctaattttgtatttttagtagagatggggtttcaccatgttagccaggctggtctcgaactcctgacctcaggtgatccagccaccttggcctctcaaagttctgggattacagacgtgagcccccgtgcccagccattaaccaggttttaaaatctcagtgtgttagatttgtgcaaaggctctcagtgcccaagtgggctctagactaccaacagctactcattccatttgctttgattggagttagcatttaactgagtacctactgtatacagtggacagggaggacattgtcataatagctatgtggctcctgccttcattggtagttactgcatttgggaggcagcagaggaacctgctttgagtgttcaggccccaccttgccccagagccagaaggtctgtttctaaaagggatcagtcttttggtttccttgtctcgcccttatattccaggcctttgatattcttgccacatgcttgtcttatactgtggagttagccccaccttttatatcatttttaattctccttcccttttgtttccttgaggtttttttttttttttctttgagacagggtatcactctgttgcccaggctggagtgcagtgatgtgatctcagctcactgcagccttaaactcccaggcttaggtgatcctcctgcctcagcctcctgagtagctgggaccacaggcagcagtaccatgcctggctaattttaaaatttttttatagagactgggtctccctatgttgcccagctggtctcgaactcctgggctcaggtgatcctcctgcctcaacctcccagagtgctggcattacaggtgtgagctactgcacccggcctgcttgggcttcttgctcttctgctcttgctctgtgttctgcctggaatctctgggatcttgaatcctttttccctgtgattccttatcacatccttcaaaatgcagagcccccaccccacacaacaacacagcaacagcagtgactgcaacagcaaacgctggtggttggtgttcaggagagctctttggcctggatggtggttgagtaactgtgcgccttcaagtcagcacccagatgccttttctttctgtggttctgctgctccatggaatctctcggcagctccggtcctggtttgcttggccatgggcctctgtctcttttctttccttgggcttctacctgaagcagacccagggtgctgagggctcctctttggtgtgcaggtccttgcccatgacttctcgtggttgatgatgctcccctcccccatctcagcccttcctgggcccaccagcaggcagattggttggaacgctgccacgccgcctctcactgcctgtctgtggtcgtaggtgtctgactgccgagacacctgggcattacctgttcagttatcacaaggaaaagggcccgggcgttacccgttcagttatcacaggtggcatgccctgagaggcagatcatgacttgctcgatttcattaatttcacttgagcagatgggaagcacgctgttggaacaggagccggtctccatgagccttggtttgaacagagagaagctcgtgagaggtgctatttgcttgttctgctgctctaacagggcctttagggactgggaaaggacagaccctggccgtgggcctctatctggaaaagggggtatcactatccatgtgtgtaataggccatgtagaaaagggagcagattgttctgggcgtctttagaaggcagagtgaaaagcagcgggcagagggtgccaggaggctgatgttagcgcatcctatggggaatgccctttctcttgtcacactgcccaacagggaaggctgcctagggaggagaacaggcagagaagctggggtagggtggtcctaggtggctgctagcatgatagtgacagctaacattgagtgacacggtccatgagacaggcaggaatgcacagtggttaggagtacaacttctggtgttagatctaactggattcaaaatgtggattgccacttgttagccctgtccatgggcaagttatataacctttctgtgcctctgtttcctcatccgtgaaatggggataatgctaatgtctccctcctagggttgtaatgaggatgaaaaaagttaatacaggtaaagtgctgggaaaagtgtcagacacataggaagggccacaggcactcattgttagccagatattgtagcactatctgacctatattaacccatatcctccatataaccttacaggaaagcagtcagtatctcattgcacaggtagggaggccagggtgagtagctcagtagtggctctgccaggcctccaccagtgctgagattcctgttcagggctacacagaggctgttcccacaggagcctggggtggcaccagacttagaagggcactgtcctgccagggatcctctgcctggctgcagccaggcggtcacgtctggttctgtcaggagcaggaacaatgaggactgtgtttttaaggaggctctgtgccctgtgctgatggttgagggccgggtgctcaggtctcggcagcatccttggcttctgggcggctctggttggaacagattgttttgctgtgtcacagccagctgtgggtgtgccagctgggctcccgcagaggagcggcgggctgctctgatgtgcgcccacctcttcaatctgccctgctcaggggttcctcctggcccctcgtcagccaggatgtgggggctgaatctggctcacatatggcatcgagccctggttcttgccagctcccggctgggccttcagcaatgcgtgttggcttctatctctacacctggctgcctctcccctgcagcattgggctcattctgtcattggtcggtgcttgaccggggctggagctgtgcggtgagctgattggctgtcagtatgcagagcccagccctggagtttagggtaacatcagtgggggaggagtgagttcctcaaagcaaattcttgatccttttggccggagaaggagaaaatcatgccagggaggtgcctaacaaatgtcctgacagcggccccagggggagtggctgcctttccctcggagaagctgtttaccctttctgagctgggaaatggggagaatacttcctggccacctcctatccacagggcttggggtctcccataggagtggaggtgaaagttctttgaaaagtatagcatacaagccaggtgctgtagcttgcatctgggagggtcgcttgggcccatgagttcgaaaccagcctaggcagcataaggagactccccctctacaaaaatttttaagaattagctgggcgtggtggtctagctactcaggaggctgaggtgggaggatggcttgagcccaggaggttgaggctgcagagagtcgagattgtgtcactgcgctctagcctgggcgacagtgagaccctgtctcaaaaaataaataaataagtaaatacatacatacgtacatacataaagataaaaaataaaaagtatagcatacagtttaggaggagattatcatattttgcacatttctatctggggccttcttgacatctgcaatctaaatccaaacgctccccctgccttcaggcagccttccctgcctgctcctgcccatggtgttctcctagtcacaggcatggggtctggatgactcctgccctctccacagtcggcttggcttccgatccctctccctctgctgttcagtcactcaagcacatggttttgcctgccagcgaggctgggggctggtgaggggtgagtcggggcttcccattccttttatgtctgtcccagccctcgtgtgtggggcgcagaggaaggctgacaagtgccggtgtgcctttctccacaggtttgagaagatggtcagtggcatgtacttgggagagctggttcgactgatcctagtcaagatggccaaggagggcctcttatttgaagggcggatcaccccggagctgctcacccgagggaagtttaacaccagtgatgtgtcagccatcgaaaagtaggtaccatcccctcaaggctttcttggggtgttggggcagagaagagcaattggtcccttgttacttcttgagtccaagtttggtggcttttccttcaagagtgtcatggctttctgggtccgtgtcctctcactcttagttgacccattctgggccggactccctgaaggcacttgtggcggttcattaaagaatgacatagttagcctcaagtgcacaggtgattttcctgtctagctacaagagcagcctcctctcccacccccatcagcccatcacccccaccctccacacacactcagggtaagattagcgtccaggaagcagactattcgagcaaggagcaaggagctggtaaagcccggagcctgggtttttggaattccacctcccacttccagtctggagacctccagactgtgctgagggcactaagggcaccctagtaacctcaagatgttaattaggtgctccctgaaaaaagacttccttgaccaataggattgggaatatggcacatttatcttccagtttacaatattatggtaaaataaatacagactcacagtaaaaaagaataagaagtataaagtataaaaatacagatttatagtatcatcaacacattaaagaaaacccagtttgctttgacttgtcatttcccaaacttcttttgtgcttgaaaccaccccttccctgccacacacacattctttcagaggaaacctgttaacagccagaaatgtgccctgacgtgcaagtttgagaaacaccggttaacagatgagacaggacagttagaaggaaggacagagccagccagcaactaactgtagccccttggcatcacacaagaaacccgggattctctgtctccttgtgaagatttgcatcagctctctttgaggttagagaaggcagctgctggaagaggaaaggggtttatctggaccaactcttctgccaaatccatgtgctggagtttgttgtatgatcactctcctgagtttccagctgtcccttttcatgagtctcctggtcagtggctgggaaggaaggggagcgggagactcgtggattgtcttgaaaatcactggccaagtcaggaaatgcatgccttcctcttggcctgtttctggtattgactctttggttaccaagaaacacaaacccagctagctcaagaaagcatgtatattataataaaggctatctcaaaaaaaaaaaaactataaaaacatcctacaagagcagatgttagaggcattctctaaaatcaggagcgagacagtatcaccagtttctatttggcatcgtactggagtcttagccagtgggttttcgtttttgtttttgtttttaaagaaaagacgagagataaattaaaggtatgagaatcaaaaaagaagtgaaactgtcattatttgcaaatggtaaaagtctatatggaatacccccaaaatatctacagacaaatgaatagaatgacgggagaggttaaaaagatgtctggatggggtttcaccttgttggccaggctggtctcaaactcctgacctcaggtgaccctcccactttggcctcccaaagtgctgggattacaggtgtgagccactgtgcccagcccccatcctcttctatcatttttaaaatctcttctcccatcataaaattaatttctctcatattttttggtcaggtagaattgggaaagtcccacactctcctattctcgtattaccttaacatcccaagcttcctttccttttttggtctttatgaatatatttatatggacagaattaagataaacaaaattgatttccccattctctcacttccccatcttgtcttcctagaccccacagagttaaaacttgggactcccccgaccctcccagaacacttgtatattgtttgtttgaggttcgtgccgcagtaacagacacagtatttgattgcacatacagatgtttgctgggtatattcactgtacattttatttaatctggttttttgtttgggggttatttggggcgaggttggttttgtttttaaatattaaaaaaaatctgtcaaaaaaagatgtctggagataagatacagaagtcaactgtatttctatcagcaataataaaaatatgtacatattttaaaacacatttttaagaataattttagatttacaggaaagctgcaaagatagagtgtatgtatatgtgtttgtgtgtatgtgtgagtgtatatgtatacctgtatgtatacatatatattttaaaggcaccatttgcagcaataacaaaactataaagtacttcagaatgaatccaacaaaagatacacaaaacacgtgtacagaaaattacaatttcactgagagacatcaaggaaggatgtataagcatccaggggcaactcacagaccccacgagtgggaggttctcctgagcctcatgagccctgggtggtggcagccatttcgccacctgttcagaggccacatagtcttgcctctccacttctcttcatggtcctggcttggcatagtgcaacctggtacagtttttcctatcactacctggcatttcttatggaggagaacccttcctgggctcttctcaggcatttgacagtcttcatcccataccatcccataccatcccacacatggtaagtggggctgtccctttccagcacctttgagcctcagtgctttgcactgcctcatgtggtcctcagtgcatcagtattggcttctaacttcacaggaataaggaaggcctccacaatgccaaagaaatcctgacccgcctgggagtggagccgtccgatgatgactgtgtctcagtccagcacgtttgcaccattgtctcatttcgctcagccaacttggtggctgccacactgggcgccatcttgaaccgcctgcgtgataacaagggcacacccaggctgcggaccacggttggtgtcgacggatctctttacaagacgcacccacagtgagtctgccctttgctatcattggcactctgtacccattgtgggtagggaccttctccagagatcagacttttgtacccggtaaacgtttttcggcagacaagacaatggtggtcgggggctgtggctcatgcctgtaatcttagcactttgagaggccgaggcaggaggaaggagtttgagaacagcctgggcaacatagtaagacctcatctttacgaaaaattgaaaataaataaatagataaataacatgcttagttctgggcataaggtcagcgtcgcccccttgggaagtatcgcccttagtcgattcttgctggtattgcttctgcactctgtcgttacctcgccctgtcaaaagtcgagatggagatttctgtagctgtcggctcctctgggtggaatgtgtctgtctctcgtccgcatttcatcaggaggaccttgggtcataggtgtggtacccacattcttgtttcagaagctcctgttaaaaccccccaaaccctcagactttacttttttaaatgggcagcttgtctgtgcttggcctctgagagctggagctgcaggagctgtaagttgtccccattggcaaggaggtgctttgttccccacacagccttctggtctgtcagtggccccagccagtcctcatgccatctcaccttagttttagaagccatgttgtcctgtgagaacgtggcttatactttttttaaaaggctaaagggaaattctaagtcattatttaataagttttaatgctagcctgtgacatgattgttttgcacaggacctcagagttgtttcccactgtacatataaatacaatgtgcatgtgaagcacccatgtcagtactgcaccttcacacccagttctgttgatggctcaaagaatgtcgacttcaattgaaatagttctggcctggcatggcagctcacacttgtaatcccagcactttgggaggctgaggcaggtggattgcttgagcccaggagttcgagaccagcctgggcaatgtggctctacaaaaaatcatacacagctgggtgtggtggtgtgcctataatcccagttacttgggaggctgaggtgggaggatcacttgagcatgggggtgcagaggttgcagtgacctgatgtgcctctacactccagcctgggggacagaatgagctcctgtctcaaaaaaagaaagagagagaaatagttttgtgttgctgaggggatagggtttgagccaaggacgtaattgtatttttaaaatatttttaaagtatttgcaaaaatcttgataatgaaacttttattagccatttctttcttttttctttgtaatttcttggctaattttttggacaagaaagcctagggatttgcagcatcacattagaatttttttagattgtggtaaaatacacataacatgaagtatatcatcttaacctttttttttttttttttttgaaggcagggtcttgccctgttgcccaggctggagtggagcggagtggtgtgctctcagctcactgcaacctctgcctcccaggttccagcaattctcctgcctcagcctcccgagtagctggaattacaggcatctgccaccatgcccagctaatttttgtatttttagtagagacggggtttcaccatgttgnnnnnnnnnnnnnnnnnnnnatgagagaagaacgagatgatgagaaagagtaaagtaagagaaaatagcaacaaacgatctgacaacagtaagagagaacataagaagaaagatagaaaagagatgagagaggagaatgaagacgaaagaagaaaaagtgaaagaagagaggtagatagaatagaaggacaaaccaacaagcgcacagacagcagaacagcggccacgaaagcgacagagaaggctatgacatccagactgcacagcaacacaagtaaggagtagacgtgaagagatcacatcaaacgaaaagacatgaatcattctaagacatgagaggggaggaggattatgaagacagggtcgtgccatgagtgcccgaggtggagtggagcggagtggtgtgctactcagctcacatgcagacctcgtgcgtacccaggttccagcaattgctgcctgcctcagcctcccgagtagctggaattacaggcatctgccaccatacccagctaatttttgtatttttagtagagacggggtttcaccatgttggccagactggtcttgaactcctgacctcaggtgatccacctgccttggcctcccaaagtactgggattacaggcatgagccacctcgcacttggccccatctgacttttgaacaccgtgcttttgaccactgtgctgtattatcttcctgtcatggtggagggcaaaatctttttagacctggaattttttgtatgtgatactcatgtaataatgagagtcttctctttttatgtgtgattatgaacgatttcatttttcctttttacctctctgcatttgctaacttttctacagtggatgtatatgatttgtgtaatgaaaaaagcaggtgcagaaaatggaattaggctgggcacagtggcccatgcctgtaatcccagcacttgggaagctgaggcgggtggatagcttgaacctagaagtttgagaccagcctgggcaacatggcgaaaccctgtctctactaaaaatacaaaaaagttagccgggcgtggccccagctactcgggaggctaaggtgggaggatcacctgaacctgggaggttgaggcagcagtgagctgtgattgtgccattgcactccagcctgggtgacagagcaagaccctgtctcaaaaaaaaggaaaagaaaaaagagttaaagagtggagaaagaaagggtggccggaggtccccaataaatgctcagtccagctgttgtggaatgtcccccctgcccccataaggtattcccggcgtttccacaagactctaaggcgcttggtgccagactccgatgtgcgcttcctcctctcggagagtggcagcggcaagggggctgccatggtgacggcggtggcctaccgcttggccgagcagcaccggcagatagaggagaccctggctcatttccacctcaccaaagacatgctgctggaggtgaagaagaggatgcgggccgagatggagctggggctgaggaagcagacgcacaacaatgccgtggttaagatgctgccctccttcgtccggagaactcccgacgggaccggtgagggcctgctgggggctgacatgcctgtcctgctcctgccaggaactgagccgcagtgggggaggttggattcgccagtggatgccttcacactggtgatgcacgattttgccagagctagaaactccctcacatctctgttttccatttttattaactgatttgtcatgtgtgtgactcagggcagtttaattttcctggtcagacctcccaggcaagtgctatctctaaaaccacagccctgctcagaacagtgctcttagctgggcaaggtgacacacgcctgtcatccagctacttaagaggctgaggtgggaggactgcttgagcccaggagttcaagaccagtctgggcaacatagcaagaccctgtctcaaaaaaaattaaatgaataaaaaagaagtgttcttaaaagctgggcaaatcccacagcactgattaggttttcccaaagccaaggaaagccagcagaaggataaacactcagtgtacccttcttaaatcttgatagagtatgcatgaggcattcagggcctggggagtttcgcattcaggcaaattgtagaacaaaatccaaccctttatgctaaccttggtagttttcactggagctgatcattatggggaatctgaagagcttttcaggtgggtccttggagtaacgaatgtttgtgacaggaatgtgtcctatgtgtaagttacctaataccacattataagccaccctcacacttagtggcttaaaacaaccacgctttattattgttcatgcatctgtgggtcagttggacagttctgctcatcagggccaggattggctgacctctgccggcctcattcctgcatctgcagtcagctgttgagtcagctgggaggcagatctcagacgcccttccccacatgtccagcagttggctgtcagctggggtgcaggggcccctggccctgtgtctcatccttcagtgggccacctggctgttcaagtggtggcagcaagggctgcgagggagaggggaagacttcaaagcctcctggaagcccaggctggggataggttcagctttgcctctgccacactctgttggcctgaacaatcctagggctgggctagatcccaggggaggagaaattgactccatgtttcagtgggaggaactgcagtcatgttgcaaagaaggattttgcacatgcagggaagggaatgatgcagctgtttttgcaaataccccacaccttgacataaattattattttttgtaggagattttcattgttgcagccctggtgaagtctgtgtattgtgacaggtggtttactcacatgctctcctcccagtgtggctccaagtctgtggtggtcagagatgtggtgcccactcttcctctgagtctgtgctgtgtcctaaagggaggagttgcagcttctcctctatgtttgctatggggttctccccttgaaagtctggagtcttggggttactggctgccaagaggcacttagctgtttttgacattctttacgcttttgactgcaacagagaatggtgacttcttggccctggatcttggaggaaccaatttccgtgtgctgctggtgaaaatccgtagtgggaaaaagagaacggtggaaatgcacaacaagatctacgccattcctattgaaatcatgcagggcactggggaagaggtgagattacaaaaccatagtgcatgtgcactgcacacacggccagtggcaccggcagtcacgtgatgaccaaaatccgccacggggtgcccacatggatttgtgtccttgtggcccagaagcaccagatgctttttgccatgcctggcttgtgacactctggtggctgagaagattctggaaaaggaggctcactctgcatgtgtgtggggtgtgttttcctacgtgtgtgtgtgtatacacactttggtccatgtgcactgataaaattaaaaccacagagagcacgggcgatcctttcttttcccctgcagctgtttgatcacattgtctcctgcatctctgacttcttggactacatggggatcaaaggccccaggatgcctctgggcttcacgttctcatttccctgccagcagacgagtctggacgcggtgagtctctgttcttagggctcagtgatcaggcagcactgagtcccctgtggcctgggtgggctggcccttgaggccttctccagcctcagtgtcattcctagatgacagtcacagtcacagtgggttgagccaggctttatttcacagcctgcagggcatactgagactcttctctcttcttttctctttgaaagtgtcaccttttctgggaaaccttctggtcctccaagcaaaaaaagaacctcatcctcttctgtgccccctgttcatttgattgttgccttgcttataacacttcttacacagttagttcttagtgtcttttgtttctgctagtggtagactccgtgagcaaggacctgtatccctgcacgccctagcacagtgtccaatcagaggagataataaatgtttgttcaatatatgagatgaatcagggtccaggatcagagcttgagcacctgctgactactgattggctgggctcagagctgaaggttacagctcctgtcctttggaaggccacagtctagtgggggagccgagtccctaacaccagcggctccagctccatgctgtcagggctggggagtggattctgggcagaaggaaccaatggtgcagagtcacggaggcaagacccagcctgtcacgctggaagagctgtaggtagctctgggtgtcacaggtggagacgtgaccaggcaggagttctggaggtgggtcttaggccagggtttaaggcttaatgagcagccctaggagagttaggtagggtcacctacctctgtaaaccagttaatccagttacatcgctgacttgggacttttttcttctgaaacccttttagagctcaggagttagatctgtttgtttgtttttaaagcatttcacttataccttcaccttggattcatcatagtcaacacacacccagtgtactttcttccccaggaagtgttttaacttcaatccagtgaaagctaaaatgtactttaggtagacacagtattactaaactcttaggatccttcagttatagtgtcagtagactcttctgtacagctggttatgccagtggcagcaccaggcttggaatcgggtgatctgggctcttgtccagtattgagtgccgtctttgccgtctgctgagtgaacttagacattgctatttacctaatgtgcctcatgctccatctgtgaagtgggattatttcaaacccctatgaggatggtgaggagggtctattcatattttattggtttgtcctcagatgtttgaactccgtctccgatgttgtaagccctcagcagttgttgactcaggagggagggttggaattttgtgttctccccttccaggttaattacacaggactctcctggtgctttttatgttgtagggaatcttgatcacgtggacaaagggttttaaggcaacagactgcgtgggccacgatgtagtcaccttactaagggatgcgataaaaaggagagaggtaactattaaaagaatgttttttaaaatctttactgttttaggggcttctaaaaagtgtatttgcctgttgtaaagaattcaggccaggcgtggtggctcacgcctgtaatcccagcactttgggaggccgaggcgggtggatcatgaggtcaggagttctagaccagcccgggcaatatggtgaaaccctgtctctactaaagttacacaaattagccaggcgtggtggtgcgcacctgtagtcccagctactcgggagactgaggcagaagaatcgcttcaacccaggaggaggttgcagtgagctgagatcacgccactgcactacagcctgggcgacagagcaagactccatctctaaataaataaataaataaataaataatacataaaaaagaattctaacaatacagaagtatgtgacctggccaagaaaagctccctatttcctgactccactgcccgcaataaaataagggctcataggtttgtgttgttaaaagattattattattttttttttagaaaggcaaatcatgactctcatacaaattgaaaaagagagaagcagcccctgacaggtgggcacagcctggcactctcagttaggccttggtgttctcctgtggaacacaaacaatttcacagagtccacaaacaattgcagagcagaaacatcagacacagccactccgtccgggaccatgatggatttagacaagaataagaccagtctgtaaccatagaattgcccctggttcctgacaatatccaatccagagcaaagccccacttctttaaaccttcccccaaaccacaacacagacacagatccaaattaaacttttttaaaaaaaatttttagaattttaaagtttccttttttgagacagggtcttactctgtcacccaggctggagtgcagtggagcaatcttggctcactgcaacctctgcctcccaggctcaagcgatcctcccgcttcagcctccctagtagctgggattacaggtgggcatctacatctggctaatttttgtgtttttggtaaagatggtgttttgccatgctgctcaggctggtctccaactcctgggctcaagcaatctgctcgccttggcctcccaaagtgttggggtttttaaatagaggtggggtcttgctatgttacccatgctggtcttgaactcctgggctccagtgatcctcctgcctcaccctcccaaagtgttaggattccaagcatgggccaccacaccaagccactttccaagatgcccccggggtgtgttctccagtgttgcaatgagtcagtaaagcccaactttgttagattacaggtgtgtttctcgtggtctttggctggaggacattgaaaaaatataaaatgaaaaattcccaagatttaatttaactcattaattaatgagggagtcagtaagagactgttttaaattttttttttgactttttttcaaatcccattacactgagcaaagtaagaactttaaaaaacaaaacaaaacaaaacagaacacttcaaataacagtctaaagagcagacagatacctgggcactaggctgtcagggaagctgaaatgagtgtctgaaagagggctgatttgtctgctgtcttttgcagttaaatagaaaaaaaacaaaaagggctgagttgcatctggaagggtatgctacacaacttacaatatttcattgaaaatatagctgcgggttgggtgcagtgactcacacctgtagccaaggcaggaggaactttgggaggccaaggcaggaggaacgcttgagcccaggagttggagaccagcctgggtaacgtagtaagaccccgtctctataagaaattaaaaaataaaaaattagccgtcatagtggtgcacaacctgtggtcccacctactgaggaggctgaggtgggcggattacttgagcttaggaggttgagtctgcagtgagccgtggttgcggtagtacactccagcctgggtgacagagcaagatctgtctcttaaataagaaaggatacctgctgatctatttttgcctgcttcacaactattagtgttaattcttctagcttgctttccatgcatataccaacacacacacacacactcacttaaaaataggaattataccatatatacaacatgacaaattgcttttttgatttaatatgaaacaggtatccttcctcatcattgcatttagatcaacctcattctttttcctggctgcgtaggattccagcatgtgtctgaattgccttttacatagcccatttgatcttcacttggattgtttcctctttctgactattgcatgtcatgcagtaaatatccttgtatgtgtgcgtttgtgcacctgcagactatttctcaaggacagattctgagcagtgagtttaatattttccattttgccctctgaaaggccataatgctttaaactccaaagggaagaagctatttgaccattgccccttgtctctcctattctatgattcctctaatagtatcatcatctgtaaaatgggtagaatactttcccttccttagatctcatgtttcagatatatccttaatagcaggggtttagtctgtgaaggaacattcattacctttttgtaggctggtaagaaaaccatcttagatgatgaccagtggctctctgactgcagtgcaacagacagaaccggcagcattcaagccaggcatagtgatcctattcctaaagctgtgtccctttctttgcaaaggaatttgacctggacgtggtggctgtggtcaacgacacagtgggcaccatgatgacctgtgcttatgaggagcccacctgtgaggttggactcattgttggtgagtgtcctggaaggtctctttccctgcagaagggaaggctggggtttccccgttttgtggggccttggcccagcagcttggtcctctgtatggggtagtcttatctgtcagtatcatttcttgaccagctccagagttcagggctggacgaaggcagcagagtctctggcggggggaggtgggggggcctttcttaagacacccataatgctacacattgcttatgatcagactgtcaagaactgaactcttcaggaatgaggccccaaaaggctcacttggcttgagtggagacaggtacctggagcgggcctggcaaacatggcagctctatgggccttgtatggaggggctctggtcaggtattgcagggggatggggtggggagggagtctgcggctggaaaggaagtagagagcacctcccatgctgaccacacttagagcatggaaaggggcaggatggtcttgggcaccattttgcctttagtagccactgtgtgcgcacggtcccagccactgaagggggttgcagaggggttgtctctgcagctcgttgccttgtaatccaaaacacattaggggtctgggcctcgagcacataattcctgaagcatattgatttgggctatgaggaaaccatttgtcctgctggccctgctcctcgcgtcaggggatgctgggaaagaccccagggagtttcttagccaacatctgcggactctgcctggtgagtgagcagtggcacccctgctactggatcagttgctgagtgtctagagcttgggaagaggccccagcaggctgccttccaggtgccaggaagaacttttcattcattgttaagccacttttcgcttctgttgaaattttaaaaaacctagggagcagctgctggtgaaaaggttgtttggggcctggctttctccacccagcccctccctttctttccatgaatgggcttgggtatgaaatgcaaagctagagtgacacagcagctctcctcctcctgcaggccccaccttccctcctgggaggtcaggcccgcccgtttcctggcaccaggctccagctacatttcatagctactttttctttcctccatcaattgatctctttgctcaggactcccataggcaagatgtatggtttccatgttttggctttctttgcatctcccactcccatcatcttccgtttctggagctcctcttctctcagttttaaccttgggtgaaaagggggctgagaaaacaaagaacaaaaatcatccaactgtacagtctttgaactctacttaagtttcttcaaaggggatgaaaactaccaaagcccttttggtctggccagggggtgtgtcttgtgccctcccgatgaaagttcacctacatcccaccctggatgggtggatggtgctcccgggcgcatcattagcatcatcctgggagcttgttagagatgcaggctctcaggtcctggccctagcctcttgaatctggatctgcttcttagggtccccaggtgatccaggtgcatattaaagtatgtgtgtgaagcactcttcctgggctagttgattggtttttaaatgtccagtctattcagtgaggcaagttcagtgaccacaagcttggatatcatggcaattaaaattgctgtgaaagttgcaggatgcttgccttcagtttcttagctcctcatgggctggaacagcaaacagtcggtggtccttctattttgagtgactctgctctagggagttcaggaatggaagtcagagattcctgagcccctggcaagcatatgtcaggttgcatgtgtgcggtgtgtgggtccacccagagaaaggtgcctttttcacagaagaatcctctgatcttcaaaggtctgatacaaaaatgatgaaaaaccattgcttttgaaagccccccttgaaatgctgaagacactgtcctgccctgaactgtgggcttcatcccaaggtatgtaggaaagcttattgagcaggcatagtccacgaccaaccatccttgtcgagaaaagataagtggggctgggcgtggtgcccacgcctgtaatcccagcactttgtgaggctgaggcgagagggtagctcgagcccaggaatttgagatgaacctaggcaacatggcaaaaccctatctctactaaaaattttaaaaaattagccaggcatgatggtggtgcctgtagtccagccacttggaaggctgaggtgggaaaatcacttgagccctggaggcggaggttgcagtgagccaagattgcgccgctgcactccagcctgggtgacagagccagaccctgtcttgaagaaaagaaaaagaaaataagtgaatatctatggtatgatagaagataatcccctaatattttatacacatatatataggcatgtatatattgtatattcatgtgtgcatgatgttgtgtgtgtacgtatatatttcttcttctggtctgaatgttgcctaaacctctaccattgatgctccatctctttgctataaagccatcttctattaaaataaacataaccctgcctggacgggtgaacacattggctcttggttgaaagtcagctaagcaggtgccctctgggtgatgtggctcagactctccatttacatttcaaatttttccatttcaaaattgggaaagaaaaactattactttgttcatcacaaaaaacgtgccccctgcctgtggaacctcaggccccagaccccaggcccagttgcaagacccccaaatgcaaggccaccgctcctcattgccccctcgtgtgttccagggaccggcagcaatgcctgctacatggaggagatgaagaacgtggagatggtggagggggaccaggggcagatgtgcatcaacatggagtggggggcctttggggacaacgggtgtctggatgatatcaggacacactacgacagactggtggacgaatattccctaaatgctgggaaacaaaggtaaccccgcctggtggagaggacacccacagtcagggtgggggcagcacttggctgcattctgccacttgcagtggaagaagtttctaggaggagaggtctgaacagaggtttcaagactggaccccctggctcactcctgacctttgtcttttggacagcagagaaccagggaggacagacccccaacatggtacaagatggcccagggttgatgcctgtctaggggctgcctgtgactgttttttagcctggaggattctggccttccggtccccttgctgtgttcctttcccatcagaataacaagggggtggggtgagggtggctgggcggcaggttggtgtgaagcagaggccctgtcgcaatcgtcctttcctccgtgagcctcctgcaccacctagtggccttgtggagctttgcagctcaggtctcaggtaccatgtctgaaatggcagtgtctgccctttgtctcaagcccccaggaatcaggccatcctctgccacggccaggatgagttggtccaagttgtctccctaggagcagaaagaagggctggagcagcacccagcatgagtcactccctagccccctcaaggtttttgccttttctaaataccacccatgctgttatttacttagtgcttttcttcgaatcagcttacagttttttgtttttctttttgtttgaggtggagttttgctcttgttgcccaggctggagtgcaatggcgtgatctcggctcaccacaacctccacctcccgggttcaagcagttctcctgcctcagcctccccagtagctgggattacaggcatacacaaccatgcccagctaattttgtatttttagtagagacggggtttctccatgttggtcaggctggtcttgaactcccgacctcaggtgatccgcctgtctaggtctcctaaagtgctgggattacaggtgtgagccaccgcaaccagcccttatagtctttttcttttcttttcttttcttttttttttgagacagagtctcaccctgttgtccaggctagagtgcagtggtgcgagctcagctcactgccacctcctgggttcaagtgattctcctgcctcagcctcccaggtagctgggattacaggtgcacggcaccacgcccagctagtttttgtatttttggtagagaccaggtttcaccatgttggtcagactggtctcgaactcctgacctcaggtgattggcccgcctcagcctcccaaagtgctgggattataggcgtgagccaccgtgcccagtggcctttaaggtctttactgacatttaatgaaggaggaaaaagaggaagaaccaatagtaccataaagagatggtaactaaaaaatgagtatagtgaagaaccgtgctattcaagtctagctgatgctgtcgcctaccaaatgacctgaactaagaccccctttgggctgagtgcagtctatcatcaaagtaatcccagcactttgggaggccaaggtgggaggattgcttgagctcaggaggttgagaccaccctgggcaacatagggttgagaccctgtctctactaaaaattaataacaataataacaacaataatagtaagacccccttggttaaaaagcggggggatcagcaagtgttggaagggtttaaggacatgtcagcaccaaactggggtggtctttgtggtggaatgagaaggactgggtgggacttcgtagtggtggcccacccctctgtgattccattctgtttcatgttcttccatggaccacatgaaataggaggaatcctggagttccaaattccaggggactcttctcagctttgggacactgggcttgggcatgtgccatggaaatgaatcaatcctttgttatttcttgagatccttgagcatggagagggcaggaaatttgaagtcccaagaacaggttgacctccagtgtgttgtggtcactgaattctccctcctgtgtggcctcatcactctgctgtgggcttgaccagtactctgggtatttgcaaaacctttagaaaaatctagaaactttccttttttttgtcttcttgttcctttaagacttagcccagtcatttgcttattctgcagatagtttttgggcactttcctgagggcccagtgctatgctatgctgtgctgtgccctggggactcagagctgaaaaagacacacatgccctgtcctcttggggctgtcactacagcagtggtggtgggaggcagtgagctcaggtgtgttgtgaaggaggagaatggtgaggtgtgtgggaacctgaaacaggcaggtagaacccaggatcaggaggaggacaggctctcggggaagtgaccttggggctgagagctatcaggcagctgaggagggagaccagtctagcaggtagacatgaatgctggtggttttgtttctgatgtgagagagtggaggactccctggtccttcctggtcctcccactctgcctctgcggcagagcacagggctgggcacatggctgttgatgatgcgcttgaggggcagtaggagacgcggagtgaccgtgagaccgaggggtgacagttctcctggccacttcccatagacaccccaggcccctcctcctgtctcaggtatgagaagatgatcagtggtatgtacctgggtgaaatcgtccgcaacatcttaatcgacttcaccaagaagggattcctcttccgagggcagatctctgagacgctgaagacccggggcatctttgagaccaagtttctctctcagatcgagaggtgagtgggcagtgtcttccctgccagcgcccacccttcagaggtcgcctggctggtggattgtgatgggggtggtagggaccctaggggacattttggccatttttgaggattttttttcctctggaatagcagaccctgggcatttgcatagtgaaatcttataattttattataaattacttttcttggcctggtgtggtggctcatgcctgtaatcccagcactttgggaggccgaggcaggcggatcatgaggtcaggagatttgagaccatcctggctaacatggtgaaacccgatctctactaaaaatacaaaaaattagctgggtgtggtggcatatgcctgtaatcccagctacttgggaggctgaggcaggagactcacttgaacccaggaggtggaggttgcagtgagctgagatcgcgccactgcactccagcctggcctggcaacagagcgagactgcatctcaataaataagtaaattacttactttccttttatccatcctttatgttggggcattatattgatttatttgaaattatgtgtgtaagagggccatatggattccatttcagatggtaaagatgcactacacatacttgtattgggggtgcatagggcccacctggatttatctgaaaggcagcctggggttcagtgccaggccacccaggagctgatgcccctcagcaagttgttccaccttctttctacttttctcctgtccagggtacatttcttcctggcctttgctgtcttccaaggcacgctgtgtgagaaggaggaaaaaagggtcagaaaaaacaaaagcaattgtgcaaatactgtgttcttcttagaatggtcataataacctaacgtaggctctgtgtaggctgggcacggtggctcatgcctgtaatctcaacactttaggaggccaaagcaggtgaatcacttgagttcaggtgttcgagaccagcctgggtaacatggcaagaccccatttctacaaaaagtgcaaaaactagccgggcgtggtggcacattcctgtggtcccagctatttgggaggctgaggtgggaggatggcttgagcccggtggcggaggttgcaatgagctgaggttgcaccactgcactccatcctgggcgacagagacagactctgtctcaaaaaaaaaaaaaaaagagaaagaaaagaaaaaaaatattaaaccttaaacaaaaaaaaacctaacaagcctatacattgctcttacccaggcaaaatggtttttaagtatacagttcggtgacattaagtacattcacatagtcgcacagctatcaccaccatccatttccggaactcttttcatcttctcagctgaaactctgtacgcagcaaacactaactccacattcctccctccccccaccccagcaaccaccattctactctctgtctctatggatttgacaactctggatacttcatataaatagaatcatacagcatttgtcctttgtgactggcttaattcacttagcataatgtcttaaggttcatccgtattgtggcatgtgttagaatttccttatttttttatttttattttttgagacggagtttcactcttgttggccaggctggggtgcaatggtgcaaacttggctcgccataacctctgcctcctgggttcaagcgattctcctgcctcagcctcctgagtagctgggattacaggcgtgcgtcaccatgcacgcccggctaattttgtatttttagtagagatggggtttccccatgttgatcagggtggtctcaaactcccgacctcaggtaatctgcccaccttggcctcccagagtgctgggattacaggcatgagccaccacgcccggccataatttccttatttttaaggctgagtgatattccattgcatgcacacactgcattttgtttattcattcatccatccatggacacttggcttgcttccaccttttggatattgtgacaaatgctgctgtgaacacgggtgaccagtatctcctttcagtttgtgtgtgtgtgtgtacgcaccccaagtggacttgcgggatcatatggtaattccctgttcagttgtttgtggaaccaccatgttgttttccacagtggctgtaacattttacattcccaccagcagcccgtgaaagttctagtttctccacatcctcgccaacacttgttattttctgagttgagaatagccatcctaatgggtatgaagtggtatggaaagtcttttcaagcataatagcaaagaaagaaatcataaagaaaaatggccaaatatagctacatagtgtctgtaagtaaaaaaaaaaagtaatcaaacttaaaaggcaacggtaaactgaggaagacatttgtactgtgtatgacaagacgcctagcagggcatggtgggctttggcaggtctggtctacacctgctcttctccaccggctgtgtgctttgcaatactcaatttctcccagcctcagttgccttatctttaaaatgggaataatcatacattcattggttgtttgaggagtaagtaaggtaatgtatgtaaaatatatgttacatggtaagtcctccaagaagcctggctggtcttcattgtaccatcccagttatcgtctctttcaatttaatataaataagacaaatatatcaggagaaaagtcttgagacgtaagaagtagtttatatggccaaaaaacaaatggaaaaaaaagagatcatcctcactaatagagaataatataaattgaactacagtcttgtgatgccttcttataaaactgtcaaaagttgtaaaaaaatgctcttttccagtgaggataagtgtggccaaatactctgctgaagagtaaatggatacaattttctgtaaggcatctggcaatgtgtagcaaaagctcgttgacccagaaatttatcctaaggaaaaacatcagaattgcacacaaagatttataaacaaaccttatcaaaatgtttctttataatagcagaaaattgcaattaacttgaatttctccaagctggctaaagaaatcatggtgcatccctagagggaatactgcagcagctgtttccaatcctgttctcagataaggctgtgggaaattgctcaatgcatgaaacaggaaagagaaagaaaatcacatatcaaggataatcccattttgcatatcatgagaagcataccagctaggaaaaataaactggaaggaaatatattaaaatgttaatagcattttcctagatgttgagatagtgaatggtttagattttccaatttttattttgctagatttgccaaattctccacagtttaacatgtaacacttgcccttgactctgtctgtggatgagtacagtgattgggggtggggggcgtcctttggacgtggtctccaggctgctcttgtgggtcctgcttcatccagccctctggctcttgtcccccacagtgaccgattagcactgctccaggtccgggctatcctccagcagctaggtctgaatagcacctgcgatgacagtatcctcgtcaagacagtgtgcggggtggtgtccaggagggccgcacagctgtgtggcgcaggcatggctgcggttgtggataagatccgcgagaacagaggactggaccgtctgaatgtgactgtgggagtggacgggacactctacaagcttcatccacagtgagtgggccttccagttgggatgcgcagagcttgctgggatccctttgggttagggggtatcagggtgtggtttacgctggggaaatgccctgcgggagcccagccaggctgaaggctgtgcgttcaggagctggggattgtctaggacaaggtaatgaacagtttgtagggtttgactgggatccttagggagacagagaagtggcttcacttggccagctcacaccagtggcatgatgtgaccctcaccccactcctcctggtcccccttaggtgggggctaggcagtgggagaggaggtgagggtgggcgtgggctcactcataagcctggtgagctgtagccaggccagaggctctgttgggtaagtggggagaggatattaagaaaggggaggagctgggtgcagtggttcacacctgtaatccagcactttgggaggcctaggtgggaggactgcttcagtccaggagtttgagaccagcctaggcaacatagtgagaccttgtctgtacaaaaaaattttgaaaattagccagggatggtggtgaatgcctgtagtcccagctactcgggaggctgagggaagaggattgcttgagcctgggaggtggaggttgcagtgagcccagatcacgccactgtactccagcctgggcaacagagtgagaccctatttcaaaaaataaaataggaaaggaggatagccactctcttgttcatctgctgaatcagtttgctaagacttggaagggcgggagcggtttgggccctgggcttcatggcagggaggggtagggagtggcctccctctggtcaggcatctgaccccccatgccagagaaggacatgtgattgcacttgctgtgtgattgtgatccaccgcatgtctcaccttatgaatagggtgaccatattatttatttattgtctacactagggtactcttgccagtcaagagtgctaataattattactctgggactgtaggcaaactaggaccatcccagataaatgaggccatagtgtcaccctacttataagcaacctcacccgactcagtgtagacattacctgcttacctcatggccgtggcttggggtggaaccatctgtcttgctccatcctcacctctgtctctcccccttaatagctgtccttgccatcagctgaggcagcacacaggagtggtttagagctaggctttggagccacatactcttggatttaaccctggcaccgtcacttagaatctgtgtgcaattgcttaatccctgcaaaatctcatcttcctcatgaggtggcagccactggcaggactagaaattagagctgtaaaatatggggcacctagtaggtcctcaaactccttggctcaagtgatcctcccaccttggcctcccaaagtgctggcatgagccaccgcactccgcccacctaataggtccccaaccaaggacagtgactacttttgagagcccctcaccacaagcatcttcagcctggccctgcccttcattttgagcccaacttacaagcatgtagattcagcctttgttcagatactatcttcactggaaggcattcctgtctttgggggccaggctgttgatggtggggcgctgggggtctcagggttgcagctggagatgggtgatattcattcctgcatagcctcctgaaccgatccagtgcttggctggcttgcacctgccttaatgatccatgtcagcccctaacatcctccttggttttgaggtccccctggagcctcaagctccgatgtgggtgtgtgtgttattcatgtcctagccttcataagccatacagagcagttgtgtttggattcgcagttgggcctccctgctgaaaactgtgacaatgggattgaccgtgggcccactttcctcccagccattctcaactggccacagctgcttctaagcagcctgcctcccaaccatgttcaccctccttgttgttgggttcagagtctctttgacttccgatgcttatgtcctgataaacccatcacaaagtcgaagaatcctaagtcgaatcatcaccagtcagggggctgtctgtgctttggtgttttcgggtaggcccagcgtctctcatcttcctccaactaccttctgttttctcgtcctttttagcttctccagaatcatgcaccagacggtgaaggaactgtcaccaaaatgtaacgtgtccttcctcctgtctgaggatggcagcggcaagggggccgccctcatcacggccgtgggcgtgcggttacgcacagaggcaagcagctaagagtccgggatccccagcctactgcctctccagcacttctctcttcaagcggcgaccccctaccctcccagcgagttgcgctgggagacgctggcgccagggcctgccggcgcggggaggaaagcaaaatccaactaatggtatatattgtagggtacagaatagagcgtgtgctgttgataatatctctcacccggatccctcctcacttgccctgccactttgcatggtttgattttgacctggtcccccacgtgtgaagtgtagtggcatccatttctaatgtatgcattcatccaacagagttatttattggctggagatggaaaatcacaccacctgacaggccttctgggcctccaaagcccatccttggggttccccctccctgtgtgaaatgtattatcaccagcagacactgccgggcctccctcccgggggcactgcctgaaggcgagtgtgggcatagcattagctgcttcctcccctcctggcacccactgtggcctggcatcgcatcgtggtgtgtcaatgccacaaaatcgtgtgtccgtggaaccagtcctagccgcgtgtgacagtcttgcattctgtttgtctcgtggggggaggtggacagtcctgcggaaatgtgtcttgtctccatttggataaaaggaaccaaccaacaaacaatgccatcactggaatttcccaccgctttgtgagccgtgtcgtatgacctagtaaactttgtaccaattcaaagacccgagtgatgcttaatggctggggacggggggacaggcagaggggggtgcagtttcttgggatgtggcaaagaccaaacactggggagttttgtggccttctgggcggaggagtttttttttttgagatggagtcttgccctgtcacccaggctggagtgcagtggcacaatctcagctcagtgcaacctctgcctcccgagttcaagtgattctcctgcctcagcctcctgagtagttgagactacaggcgtgcatccccacacccagctaatttttgtatttttagtagagaaggggtttcaccatgttggccaggctggtctccaactcctgacctcaagtgatctgcctgccttggcctcctaaagtgctgggattatagaacaaggccacttggcttccaggctgcttgggttcagtgagaggactgcaacactggtcccctctctgccatccccacccggatcctgcccttcatcttcctctctgccaaccccaagacaaaggatgaaatgtgctctgccccacccctcccctccctctctacccaaacacagatgaaatcttgaagcagcccaggctggctgcacgctcccgctcccggatcttttttctttattttttatttttattttctgtagacagggtctcactgtgttgccagggctggtctccaactcctgagctcaagcaatctgcccccctcagcctcccatagtgctgggattataggcgtgagccatcgctcccggcccaccccttctggatcttagattgacctcatccctaggaaattaacccttgtctgaccttttactctcccttcccacccccacctcaagagattcctggtctatccccaggctaccattttggattctcccccagccttggtgggttccatgtcactctgcacccaagcaccttgtgatgtcccaagccacagctgcggctctaagtggcttcctgcgagaccgattgccagaccacctggtttggtgagatcagagtccctttattaggggcatggtgctggtgtctacggagcagtgattttttggagaacacagataacattacaccttccagtgtgcattgacaatgttacatggctcttctgcaggggaaccagggcgtggaggctgagttggcaagcaggaggtgtgcccctgggatgggctgggccagaccgggagctttctgggagttgggacagttgctgctttctgccctctagcttcttgctgcagaagtgggagtgggagctgtgctgctgctttgtaggtggcttttgtgtgaaatagttaaaagtcatggctaacagccaggtgtggtggctcacatctgtaatcccaccacttcaggagacaggcaggaggaatggttgagcccaggagttcaagaccagcctgggcaacatagcaagaccccatatctacaaaaaacttaaaaactagctgggtgtggtggtatgtatctgtggtcccagctacaggggagactgaggcaggaggatcccctgagcccaggaggttgaggctgcactgaatcatgatggtgccactgcactcctgcctgggtctcagagtgaggtgagaccctgtctcataaaaaaaaaaaaaaaaaaaaaagaaagtcctggctaccatgtattgggcacttaatctggtctggcctgctagtttataggcattactcccattgttcctcacagcatccctgtgaagtagttttgatactgggcagaggtcaaagtgacttgcctgaggaaacacagctgatttttttggctcttaatcaccatctacgtgggctgtatctgacttcttaaatactgagacagagaagccctcagctgactcagtcactgggctttgtgaaataagaagtttcctcctttgtatccacagcctgatggcgaatcagggtcatggttgcattgcccacagatacgttttgtttaacttatgcaaagtttatgaaaatttgggtcaaattcaacaaatctggaagactcacatacaaatgtggatttatagcttctcttgaaagatttagaagatctagcaacagtgggctcccattatcatgtggcaacgtttgtccagagctgagtagttcttgtcccctttgaatgcctgtcctctccaggttgccatggcccccaccattccctattagctcaaactgagggtggaagtcagttgccttttatcatcacatttgcagtttttcttttatacatattcttgtatgccccaggaaggcatttgagcttgcatctcttaaattagataaatatcagcttacactgtcttttctgacccttactggatcctctgaagtgctctctgagatgggtggctgagtcctcttaaagtcagcatcctttctggagttctggccccatgttgtctttgtattggtatactgaaggatggggcatgagctgaactttcagatgtggtcttctcgattggctacttctcaaagggtgctacacctcattctgcagccaggcacaaggcttcagggttcaataggcacctatctcagtccatttgtgttgctttcatggaatacctgagactaggtaatttataaagaaaagaggtttatttggctcatgattctggtggctggaatatccaagattgggcagctgcatctggtgaaggcctcaggctgcttcttgtcatggtggaaagtggaagggaagtgttgtgtgcaaagagatcacatggtgagagaggaagcaagacagggaaactgaggacaccacactctttctaacaacttgttattttgggaactagtccattcccacaagagtgatgattcacttcaactggaaggcattaatctattcataagggatccatccccaatacccaaacacctcccactaacccctacctcccaacactgccacattgggatcaaatttcaacatgagttttggtgggggcaagcaaaccatacccaaaccatagccctgatccatcctggggacgccccgcctccccactggtagcctcggagggggctgtgtccccagccatgaacaaagtctccttagtgtgacacctgttgactctcgtggagagggaggtcgtgggagtcagctcgagcttatcttccttggtgggtgtgacccatgggcagcagcggaaggcaagccggaatccagagcgaaacctgggggagcgaggggcaccttgagccagggagttaggggctcaggagctgtgatgtgactgcccccacccccaggaaactgactcccttccagaggaaagtcactgtctctctccaagagcctcccatggctcaggggctcttgagagatgccttcgtgggtgagtttgatttttggaaactgccagagtgttctggagctgggtctagtgaatgaagtgggtgactaagctgatttaggtcatctgttattacgaacaaaaaatgaccccagcataattactaaaaaaaccaaccaaccaacaaacaaacaaaaaaaccagcagatgttcttgtctgacttgttaactggcttctaagggaggagtcaaagaagaacctgctaaaacacaatggaggctttggcaacttgggagaacaaggatgcttttcccaaggggactacattgaaaaacccacactcggagccaccaagttctgatgcatttgcttgaaaacaaacagctctccccatggcagcactgaacgggagttcagaggaagcacacacggtgagtggaagaaatcagacggcagaaagggaacgctggctgctcagagaagggaatgatccagaagtgatgtcaggatcttgtagagcctggggtgttgtttagactcccagggactgtatctcccttgggtagcaggagagtgatcaacccacagacacagtgggctggtggcccctcccagatgtcagagtccctgtctccaggttttcaatcccacaagtctttaaaagagaaatgcgtggtgtggggataagatgacaggccttggagacccatggagtcctggctttactgtttgttgtatgaatttgggagcatcttactttctgaagctcagtttccccatctgtagagtgggggtgacacctgcttctctcctattatctacttccctctcaggagatagagagttctggcctcctgcaaaaaatcatagctccttatttccttttggcctgccccaggcgggtgaaatgtctgagccacaaagatcccaatggcattatgagtagcctggctacctggccagggaggtgacaaaaaacatgaacaaagaggtccaaggccaacttcgcccacatcattgtctcactgaggtgagactgtgtccacctcttgccgccccttatttgccccaccttcagggtttcctgccactgaaaggcctgctctgcagaactcctggggctgggttcctccctgactcaccaccccccacctctccaggtgccccagagcaagtgcaggcccctctctgggactcatttcctcagaatcacgaggcgtagggaaactggatgatgccaggagagtgagattctggccccctccttcctggctgtctctgacagggtcacttcccagctgccctgaaagtccctggaggacagggcatgcactgtgagctttccagggagcagcctgccccacccctgtgctggccccagcccccatccactgcttccactgccggatgggtgccattcacttggctccaggaaagccctcagtaggaagcttgtgaaaatactagaacagaagtcagtccctccctcccgctacttagcttttctttccttcgtctgtctgtcccaccccctctctgtgactctcccctccccttcatctctctggccctcccttctctcttctcttgccccagacacagaacccagaagagccagcaggaacagacagacagtgagagctacagcctgggagacggtgaggatttggggaggaagggggctcaagctaggcccaggccagagggattattgtgctgggggctgagtgtgaggacggctttctcatgtaggctgggggcacagggccacaggttccggcaggaatgaggatggatgcttgagctgtgcaggggagcccacctggggctgggcagtggggccctgagggcagagggtggggctggagtgggggctcacctgtggttgagacagcagtagatgatgggattgtacatggtagagctcatggccaaccagaagagtgccaggtagacttgctggatgaacttgtggcagtagatgtcctcctggaagctgcccaggatgaagtagaggtggtagggcagccagcagatggcaaacgtcagcaccaccagcaccatggtcttcacaaactggtccaggagaggctcaagttacttcttagtgcccaagccccagccccagccctccgagggcagacacagaggaccccttgcacccacctgggaactgctccacacacagaccccgttagctctattactcaggcctctgagcatgttttgcccagaccttcctgagcccccaacctcagaggcctgtgctcaggccggtccctctgcccatactgccatccttcctttgaagtcctcactccttgaagcccagctcaatggccacttcctacaaaaggtgtctgggaccccttcattcactgcagctccccctccctggagagtggctgagctctctctcctaaccccatccctgggggagcccctgtgtcagctatgcgttcccaggacgccccctctctgggatccgtatcggcacagcccttctctctgtgggctgtaaggttccaaccagggacccctgcctctgcccacgggtcagctcctggacctccccctcctcagagcctggcccctgcaggcacactcctgctccgtttggcagcccagcatgccaattacaaaaggtctgggggctcctgggcaccctgatcctcacgtaggatctgggttgagacccctagtgtggagcagatggaggccagtgctccatgaggggcaccagatggcgcccatgtgcagctatctccccgaaccaccctgtgaaagatgcctacttttgggtgagaagcatggctttgacctggctacatgatgtggttaacccattacctcccctgttgcctggtaggaagggggcaaggacaagcttggactgaaggagggtgaagggggtcttgggcacagagggctacatcaggaccttcgggggaccctggatggcagggagtagggggacactgccacttccggaagaaactggagacagatttgatgaagctggacaactatctggtctccacgacctccggggtccgcagttccagcctttgagggctctcctgtgactgtcaggcaccttctatagttctgtggggcttctcaatttcaacattctgattattcaaaaagtctaagattttaatattttatcattctaagattcttgggggtatctgaattctacggggctttaggagtccctgactcccctaacattctgggaagttaatttttttttgtcttttttttttcttcctttttgtggagaacggggtctcgctatgttgcccaggcaggtctcgaactcctgggctcaagctatcctcccgcctctgcctccctgagagctgggattacaggcgtgagccgccgcgcccggcaagtttctttaattttgtatttggccaaagaccaaaggcaaatccgcccggctgggaggaacgcggtcaggctctggccccagacttcgagcgaaggcagcttccgcaagcttctcccgggcgccctcttgcggaccggccttgagaccgtaagggcggctccccagggcggggccaggccccgtcccgcccccgtcccacccccgtcccacccccgtcccaccccgtccggccccgcccccatgaggcctcgcccccgccagccccccgccccctccaggccccgccccctccaggcccccgcccccgcgcccaccttcttcttggcctgcaggtggcgcaggttggcaccgtgcgcctgatgtccgggcactgcgcgcctccagagcgtgaggccgatgacgctgtaggctacaaacatcaccgcgagcggcaggaagtagatgagggcgatcaccacgaggtggtacctgcagggagagccgaggcctgggcagcggagggcccgggggcgactccgaagtctgccagcgcctggtcctgggaccccgcgggcactgtggagccgcccctgcgggcccacgctgggcgcctcccagggacttggtttgatttaaacaaaaataaaggtggcattgggtagcctgtgtgccaggagacggcttccctgcaaaagggacgccagcagtagccctgcgtccttccatatcacgtccttccacgtgatagacacgtgtcaaaaaaaggaaaagtgaatgaaacaaattaagaaataatttgtttgcaatttaaaataccattaagcacaaaggaggcagtaaaattatcccactcccaccactattaacattaactattaatatctggcatattttttccagaatcatatgtatgaatagtagtcacccctgatgggagtttcactttcccgggtttcagttacccctcccaactgcggatccaaaataggggaggagagtacaacaagatattttgagagggagagacctcattcacagaagtttaattacagtatattgttatacttgttctgttttattactagttactgttaatctcttactgtgcctaatttataaattaaactttatcataggtatgttgaggaaaaaaacagtatatatctatatagagagaattcagtactatctgaagtttcaagcatccaccgggtgtcttggagtgtatcctacagtatagccatatatgtatacgtatacgtatatgtatatgtatatgtacatatatatatatatatatatatatatatatatatatactatatatatatatatatatatatatatatatatatataatctgtatctgtctggatggatagaatgactggtgttaataaggctccatctgcaccaacatcgctatggaggcatgggacagtggaaaagcgccatatatcacatgctgctgtgtcatctgcttatggtttatcagcatttggctgggaacctcgtttgtgtcagcaaatgctctttcataccacctttgaggaagtgatgcagagtaccattgggtggcttcctaccccgtccccagggaggacactgggttgtgttgaggcttttcatttccttttggaaacagtgtaggccaggcgtggtggctcatgcctgtaatccctaaactttgggagaccaggttgggaggactgcttgagcccaggaatttgagaccaacctgggcaagatagtgagaccctatctctattaaaaaaaattaaaaaaattagccaggcgtaatggggcacacctgtaattccagctactcaggaggctgaggcaagaggttcacttgagcccaggagatcgaggctgtaatgagctatgattgggccactgcaccctagcctgggcgatagagtgagaccctgtcaaaaaaaaaaaaaaaaaaaacgacagtgtccccagttctcagatctctggtttatgagtgacgctgcagcctctctctgatgagctgcaggctggggactgactccccggcaggtctgcagtgggaacctgtggagacaaaagtgactccatcttggatgccactcccgtgtgttgacttccgattcgccccagtcttgtgaatgccttctgatttctactttatttactgcccctagtgtaagaacatgtcaaccttgatgttactccacaaatcgtaggctgtgacgcacgtagcgttcttgcctgttctggagggctgcctttggttgtcttgctggagcacgaataccctttccctatggtatctaagccttgcatctggggtgtgagaatgcagagctccacctgtcttgtggccacccaagatcccacttcggtctgtaaattccctcaataaatcacccaatattgacaaactggatttgttctgcctccttctttgggtctgggctcctttggcatttgggggtccctttcatggaacagagtccttagagcattccaccaatgggcctgagacccctggtcccgtcatttgactttttctttcttactgggaggactgaggtgttcccaaacctcctgcttctacctgccacatgctaggcttgctgcgcccctttctagaggtgctgctaccccaagggaaggggacccatggtgaaaccacctttgcaaaaataacgaggaaattacgacagtgaaagaaatcagacctaaccaactctatcttgcttctaatccttaagctgtccttgttcatgcctgggtgtaggccgagctatctttgggaaggaattcagttcatgattttactctgaagcaaaattgataacagccctttcctgaaaagacccccttcttgcctgggatccaatctgcctttccaggactaacaacttagctacaaggatagaaattatttaggggtcatgcagcctctggctccaagagtttgaacctcccccaaattccttgggggcaacatcactattgtaaaacctaagatcagtgcttgagatgttttgcagagcctgcactcagtggatcagctgacaccacccagaccgggtaatctgactcaaccagttctgctatcacacccaggaacagaagacagcgagaaaacctcatttcgaccccctgtgattccatctccaacccgaccaatcagcattccccatttgccaaggccctagctgccaaattatctttaaagactctgattcctgaatgctaagggagactgatttgattttgttttttttgagatggagctttgttcttgttgcccaggctggagtgcaatg

SEQ ID NO: 1238 - DNA, 3607 bp, Homo sapiens
tggacagagcactggctgggcatcaggactaggctggagtcctggctcaaaactctaccacaacctgacactgggcaagatggcccacctgtggcatcccaggttcctgccctgtaaagaggagtctgggtgtatatccagatggactgtgagcacagcctgagtttgccctgtcgaggtgctgaggcctgggagattgggattgacaagtatctctatgccatgcggctctccgatgaaactctcatagatatcatgactcgcttcaggaaggagatgaagaatggcctctcccgggattttaatccaacagccacagtcaagatgttgccaacattcgtaaggtccattcctgatggctctgaaaagggagatttcattgccctggatcttggtgggtcttcctttcgaattctgcgggtgcaagtgaatcatgagaaaaaccagaatgttcacatggagtccgaggtttatgacaccccagagaacatcgtgcacggcagtggaagccagctttttgatcatgttgctgagtgcctgggagatttcatggagaaaaggaagatcaaggacaagaagttacctgtgggattcacgttttcttttccttgccaacaatccaaaatagatgaggccatcctgatcacctggacaaagcgatttaaagcgagcggagtggaaggagcagatgtggtcaaactgcttaacaaagccatcaaaaagcgaggggactatgatgccaacatcgtagctgtggtgaatgacacagtgggcaccatgatgacctgtggctatgacgaccagcactgtgaagtcggcctgatcatcggcactggcaccaatgcttgctacatggaggaactgaggcacattgatctggtggaaggagacgaggggaggatgtgtatcaatacagaatggggagcctttggagacgatggatcattagaagacatccggacagagtttgacagggagatagaccggggatccctcaaccctggaaaacagctgtttgagaagatggtcagtggcatgtacttgggagagctggttcgactgatcctagtcaagatggccaaggagggcctcttatttgaagggcggatcaccccggagctgctcacccgagggaagtttaacaccagtgatgtgtcagccatcgaaaagaataaggaaggcctccacaatgccaaagaaatcctgacccgcctgggagtggagccgtccgatgatgactgtgtctcagtccagcacgtttgcaccattgtctcatttcgctcagccaacttggtggctgccacactgggcgccatcttgaaccgcctgcgtgataacaagggcacacccaggctgcggaccacggttggtgtcgacggatctctttacaagacgcacccacagtattcccggcgtttccacaagactctaaggcgcttggtgccagactccgatgtgcgcttcctcctctcggagagtggcagcggcaagggggctgccatggtgacggcggtggcctaccgcttggccgagcagcaccggcagatagaggagaccctggctcatttccacctcaccaaagacatgctgctggaggtgaagaagaggatgcgggccgagatggagctggggctgaggaagcagacgcacaacaatgccgtggttaagatgctgccctccttcgtccggagaactcccgacgggaccgagaatggtgacttcttggccctggatcttggaggaaccaatttccgtgtgctgctggtgaaaatccgtagtgggaaaaagagaacggtggaaatgcacaacaagatctacgccattcctattgaaatcatgcagggcactggggaagagctgtttgatcacattgtctcctgcatctctgacttcttggactacatggggatcaaaggccccaggatgcctctgggcttcacgttctcatttccctgccagcagacgagtctggacgcgggaatcttgatcacgtggacaaagggttttaaggcaacagactgcgtgggccacgatgtagtcaccttactaagggatgcgataaaaaggagagaggaatttgacctggacgtggtggctgtggtcaacgacacagtgggcaccatgatgacctgtgcttatgaggagcccacctgtgaggttggactcattgttgggaccggcagcaatgcctgctacatggaggagatgaagaacgtggagatggtggagggggaccaggggcagatgtgcatcaacatggagtggggggcctttggggacaacgggtgtctggatgatatcaggacacactacgacagactggtggacgaatattccctaaatgctgggaaacaaaggtatgagaagatgatcagtggtatgtacctgggtgaaatcgtccgcaacatcttaatcgacttcaccaagaagggattcctcttccgagggcagatctctgagacgctgaagacccggggcatctttgagaccaagtttctctctcagatcgagagtgaccgattagcactgctccaggtccgggctatcctccagcagctaggtctgaatagcacctgcgatgacagtatcctcgtcaagacagtgtgcggggtggtgtccaggagggccgcacagctgtgtggcgcaggcatggctgcggttgtggataagatccgcgagaacagaggactggaccgtctgaatgtgactgtgggagtggacgggacactctacaagcttcatccacacttctccagaatcatgcaccagacggtgaaggaactgtcaccaaaatgtaacgtgtccttcctcctgtctgaggatggcagcggcaagggggccgccctcatcacggccgtgggcgtgcggttacgcacagaggcaagcagctaagagtccgggatccccagcctactgcctctccagcacttctctcttcaagcggcgaccccctaccctcccagcgagttgcgctgggagacgctggcgccagggcctgccggcgcggggaggaaagcaaaatccaactaatggtatatattgtagggtacagaatagagcgtgtgctgttgataatatctctcacccggatccctcctcacttgccctgccactttgcatggtttgattttgacctggtcccccacgtgtgaagtgtagtggcatccatttctaatgtatgcattcatccaacagagttatttattggctggagatggaaaatcacaccacctgacaggccttctgggcctccaaagcccatccttggggttccccctccctgtgtgaaatgtattatcaccagcagacactgccgggcctccctcccgggggcactgcctgaaggcgagtgtgggcatagcattagctgcttcctcccctcctggcacccactgtggcctggcatcgcatcgtggtgtgtcaatgccacaaaatcgtgtgtccgtggaaccagtcctagccgcgtgtgacagtcttgcattctgtttgtctcgtggggggaggtggacagtcctgcggaaatgtgtcttgaaacaatgccatcactggaatttcccaccgctttgtgagccgtgtcgtatgacctagtaaactttgtaccaattca

SEQ ID NO: 1239 - protein, 914 aa, Homo sapiens
MDCEHSLSLPCRGAEAWEIGIDKYLYAMRLSDETLIDIMTRFRKEMKNGLSRDFNPTATVKMLPTFVRSIPDGSEKGDFIALDLGGSSFRILRVQVNHEKNQNVHMESEVYDTPENIVHGSGSQLFDHVAECLGDFMEKRKIKDKKLPVGFTFSFPCQQSKIDEAILITWTKRFKASGVEGADVVKLLNKAIKKRGDYDANIVAVVNDTVGTMMTCGYDDQHCEVGLIIGTGTNACYMEELRHIDLVEGDEGRMCINTEWGAFGDDGSLEDIRTEFDREIDRGSLNPGKQLFEKMVSGMYLGELVRLILVKMAKEGLLFEGRITPELLTRGKFNTSDVSAIEKNKEGLHNAKEILTRLGVEPSDDDCVSVQHVCTIVSFRSANLVAATLGAILNRLRDNKGTPRLRTTVGVDGSLYKTHPQYSRRFHKTLRRLVPDSDVRFLLSESGSGKGAAMVTAVAYRLAEQHRQIEETLAHFHLTKDMLLEVKKRMRAEMELGLRKQTHNNAVVKMLPSFVRRTPDGTENGDFLALDLGGTNFRVLLVKIRSGKKRTVEMHNKIYAIPIEIMQGTGEELFDHIVSCISDFLDYMGIKGPRMPLGFTFSFPCQQTSLDAGILITWTKGFKATDCVGHDVVTLLRDAIKRREEFDLDVVAVVNDTVGTMMTCAYEEPTCEVGLIVGTGSNACYMEEMKNVEMVEGDQGQMCINMEWGAFGDNGCLDDIRTHYDRLVDEYSLNAGKQRYEKMISGMYLGEIVRNILIDFTKKGFLFRGQISETLKTRGIFETKFLSQIESDRLALLQVRAILQQLQSTCDDSILVKTVCGVVSRRAAQLCGAGMAAVVDKIRENRGLDRLNVTVGVDGTLYKLHPHFSRIMHQTVKELSPKCNVSFLLSEDGSGKGAALITAVGVRLRTEASS

SEQ ID NO: 1240 - DNA, 3991 bp, Homo sapiens
aaccagaactccagagagggaaaacatctatcttgctgtgtttggacaggccagcccctgaaacatcttgggcaatggagggttaacttctcaaagtttaataggcaagaccagcaaccatgcaacaaggacttcaactaaccaactaaagaactgttccccagagcattgttcctgagaaggaaaagagtccaaacacctacccacacctgctttgtgccaagaatccacagttggattgcaaggacagtgcgttcaagacccagctgttgagagtagaaaagcagaagaaaggacccgaggtcagcaagtgccctccccacaatggggcagatctgccagcgagaatcggctacagcagctgaaaaaccaaaacttcatctacttgctgaaagtgagccgccggaggaccacggctcgccagggctgcggaggaccgaccgtccccacgcctgccgccccgcgaccccgaccgccagcatgatcgccgcgcagctcctggcctattacttcacggagctgaaggatgaccaggtcaaaaagattgacaagtatctctatgccatgcggctctccgatgaaactctcatagatatcatgactcgcttcaggaaggagatgaagaatggcctctcccgggattttaatccaacagccacagtcaagatgttgccaacattcgtaaggtccattcctgatggctctgaaaagggagatttcattgccctggatcttggtgggtcttcctttcgaattctgcgggtgcaagtgaatcatgagaaaaaccagaatgttcacatggagtccgaggtttatgacaccccagagaacatcgtgcacggcagtggaagccagctttttgatcatgttgctgagtgcctgggagatttcatggagaaaaggaagatcaaggacaagaagttacctgtgggattcacgttttcttttccttgccaacaatccaaaatagatgaggccatcctgatcacctggacaaagcgatttaaagcgagcggagtggaaggagcagatgtggtcaaactgcttaacaaagccatcaaaaagcgaggggactatgatgccaacatcgtagctgtggtgaatgacacagtgggcaccatgatgacctgtggctatgacgaccagcactgtgaagtcggcctgatcatcggcactggcaccaatgcttgctacatggaggaactgaggcacattgatctggtggaaggagacgaggggaggatgtgtatcaatacagaatggggagcctttggagacgatggatcattagaagacatccggacagagtttgacagggagatagaccggggatccctcaaccctggaaaacagctgtttgagaagatggtcagtggcatgtacttgggagagctggttcgactgatcctagtcaagatggccaaggagggcctcttatttgaagggcggatcaccccggagctgctcacccgagggaagtttaacaccagtgatgtgtcagccatcgaaaagaataaggaaggcctccacaatgccaaagaaatcctgacccgcctgggagtggagccgtccgatgatgactgtgtctcagtccagcacgtttgcaccattgtctcatttcgctcagccaacttggtggctgccacactgggcgccatcttgaaccgcctgcgtgataacaagggcacacccaggctgcggaccacggttggtgtcgacggatctctttacaagacgcacccacagtattcccggcgtttccacaagactctaaggcgcttggtgccagactccgatgtgcgcttcctcctctcggagagtggcagcggcaagggggctgccatggtgacggcggtggcctaccgcttggccgagcagcaccggcagatagaggagaccctggctcatttccacctcaccaaagacatgctgctggaggtgaagaagaggatgcgggccgagatggagctggggctgaggaagcagacgcacaacaatgccgtggttaagatgctgccctccttcgtccggagaactcccgacgggaccgagaatggtgacttcttggccctggatcttggaggaaccaatttccgtgtgctgctggtgaaaatccgtagtgggaaaaagagaacggtggaaatgcacaacaagatctacgccattcctattgaaatcatgcagggcactggggaagagctgtttgatcacattgtctcctgcatctctgacttcttggactacatggggatcaaaggccccaggatgcctctgggcttcacgttctcatttccctgccagcagacgagtctggacgcgggaatcttgatcacgtggacaaagggttttaaggcaacagactgcgtgggccacgatgtagtcaccttactaagggatgcgataaaaaggagagaggaatttgacctggacgtggtggctgtggtcaacgacacagtgggcaccatgatgacctgtgcttatgaggagcccacctgtgaggttggactcattgttgggaccggcagcaatgcctgctacatggaggagatgaagaacgtggagatggtggagggggaccaggggcagatgtgcatcaacatggagtggggggcctttggggacaacgggtgtctggatgatatcaggacacactacgacagactggtggacgaatattccctaaatgctgggaaacaaaggtatgagaagatgatcagtggtatgtacctgggtgaaatcgtccgcaacatcttaatcgacttcaccaagaagggattcctcttccgagggcagatctctgagacgctgaagacccggggcatctttgagaccaagtttctctctcagatcgagagtgaccgattagcactgctccaggtccgggctatcctccagcagctaggtctgaatagcacctgcgatgacagtatcctcgtcaagacagtgtgcggggtggtgtccaggagggccgcacagctgtgtggcgcaggcatggctgcggttgtggataagatccgcgagaacagaggactggaccgtctgaatgtgactgtgggagtggacgggacactctacaagcttcatccacacttctccagaatcatgcaccagacggtgaaggaactgtcaccaaaatgtaacgtgtccttcctcctgtctgaggatggcagcggcaagggggccgccctcatcacggccgtgggcgtgcggttacgcacagaggcaagcagctaagagtccgggatccccagcctactgcctctccagcacttctctcttcaagcggcgaccccctaccctcccagcgagttgcgctgggagacgctggcgccagggcctgccggcgcggggaggaaagcaaaatccaactaatggtatatattgtagggtacagaatagagcgtgtgctgttgataatatctctcacccggatccctcctcacttgccctgccactttgcatggtttgattttgacctggtcccccacgtgtgaagtgtagtggcatccatttctaatgtatgcattcatccaacagagttatttattggctggagatggaaaatcacaccacctgacaggccttctgggcctccaaagcccatccttggggttccccctccctgtgtgaaatgtattatcaccagcagacactgccgggcctccctcccgggggcactgcctgaaggcgagtgtgggcatagcattagctgcttcctcccctcctggcacccactgtggcctggcatcgcatcgtggtgtgtcaatgccacaaaatcgtgtgtccgtggaaccagtcctagccgcgtgtgacagtcttgcattctgtttgtctcgtggggggaggtggacagtcctgcggaaatgtgtcttgtctccatttggataaaaggaaccaaccaacaaacaatgccatcactggaatttcccaccgctttgtgagccgtgtcgtatgacctagtaaactttgtaccaattcaaagacccgagtg

SEQ ID NO: 1241 - protein, 967 aa, Homo sapiens
MGQICQRESATAAEKPKLHLLAESEPPEDHGSPGLRRTDRPHACRPATPTASMIAAQLLAYYFTELKDDQVKKIDKYLYAMRLSDETLIDIMTRFRKEMKNGLSRDFNPTATVKMLPTFVRSIPDGSEKGDFIALDLGGSSFRILRVQVNHEKNQNVHMESEVYDTPENIVHGSGSQLFDHVAECLGDFMEKRKIKDKKLPVGFTFSFPCQQSKIDEAILITWTKRFKASGVEGADVVKLLNKAIKKRGDYDANIVAVVNDTVGTMMTCGYDDQHCEVGLIIGTGTNACYMEELRHIDLVEGDEGRMCINTEWGAFGDDGSLEDIRTEFDREIDRGSLNPGKQLFEKMVSGMYLGELVRLILVKMAKEGLLFEGRITPELLTRGKFNTSDVSAIEKNKEGLHNAKEILTRLGVEPSDDDCVSVQHVCTIVSFRSANLVAATLGAILNRLRDNKGTPRLRTTVGVDGSLYKTHPQYSRRFHKTLRRLVPDSDVRFLLSESGSGKGAAMVTAVAYRLAEQHRQIEETLAHFHLTKDMLLEVKKRMRAEMELGLRKQTHNNAVVKMLPSFVRRTPDGTENGDFLALDLGGTNFRVLLVKIRSGKKRTVEMHNKIYAIPIEIMQGTGEELFDHIVSCISDFLDYMGIKGPRMPLGFTFSFPCQQTSLDAGILITWTKGFKATDCVGHDVVTLLRDAIKRREEFDLDVVAVVNDTVGTMMTCAYEEPTCEVGLIVGTGSNACYMEEMKNVEMVEGDQGQMCINMEWGAFGDNGCLDDIRTHYDRLVDEYSLNAGKQRYEKMISGMYLGEIVRNILIDFTKKGFLFRGQISETLKTRGIFETKFLSQIESDRLALLQVRAILQQLQSTCDDSILVKTVCGVVSRRAAQLCGAGMAAVVDKIRENRGLDRLNVTVGVDGTLYKLHPHFSRIMHQTVKELSPKCNVSFLLSEDGSGKGAALITAVGVRLRTEASS

SEQ ID NO: 1242 - DNA, 3994 bp, Homo sapiens
aaccagaactccagagagggaaaacatctatcttgctgtgtttggacaggccagcccctgaaacatcttgggcaatggagggttaacttctcaaagtttaataggcaagaccagcaaccatgcaacaaggacttcaactaaccaactaaagaactgttccccagagcattgttcctgagaaggaaaagagtccaaacacctacccacacctgctttgtgccaagaatccacagttggattgcaaggacagtgtatgttgtccttttggaaaaatgagagtgagcccaaatgaagaacaagcaaaggcgttcaagacccagctgttgagagtagaaaagcagaagaaaggacccgaggtcagcaagtgccctccccacaatggggcagatctgccagcgagaatcggctacagcagctgaaaaaccaaaacttcatctacttgctgaaagtgagcattgttgatgctcttgagagcatcagccaggacattaatgtgcaccactgtggtggcgtggaaagatggcaaaaagagccctgcgtgattttattgacaagtatctctatgccatgcggctctccgatgaaactctcatagatatcatgactcgcttcaggaaggagatgaagaatggcctctcccgggattttaatccaacagccacagtcaagatgttgccaacattcgtaaggtccattcctgatggctctgaaaagggagatttcattgccctggatcttggtgggtcttcctttcgaattctgcgggtgcaagtgaatcatgagaaaaaccagaatgttcacatggagtccgaggtttatgacaccccagagaacatcgtgcacggcagtggaagccagctttttgatcatgttgctgagtgcctgggagatttcatggagaaaaggaagatcaaggacaagaagttacctgtgggattcacgttttcttttccttgccaacaatccaaaatagatgaggccatcctgatcacctggacaaagcgatttaaagcgagcggagtggaaggagcagatgtggtcaaactgcttaacaaagccatcaaaaagcgaggggactatgatgccaacatcgtagctgtggtgaatgacacagtgggcaccatgatgacctgtggctatgacgaccagcactgtgaagtcggcctgatcatcggcactggcaccaatgcttgctacatggaggaactgaggcacattgatctggtggaaggagacgaggggaggatgtgtatcaatacagaatggggagcctttggagacgatggatcattagaagacatccggacagagtttgacagggagatagaccggggatccctcaaccctggaaaacagctgtttgagaagatggtcagtggcatgtacttgggagagctggttcgactgatcctagtcaagatggccaaggagggcctcttatttgaagggcggatcaccccggagctgctcacccgagggaagtttaacaccagtgatgtgtcagccatcgaaaagaataaggaaggcctccacaatgccaaagaaatcctgacccgcctgggagtggagccgtccgatgatgactgtgtctcagtccagcacgtttgcaccattgtctcatttcgctcagccaacttggtggctgccacactgggcgccatcttgaaccgcctgcgtgataacaagggcacacccaggctgcggaccacggttggtgtcgacggatctctttacaagacgcacccacagtattcccggcgtttccacaagactctaaggcgcttggtgccagactccgatgtgcgcttcctcctctcggagagtggcagcggcaagggggctgccatggtgacggcggtggcctaccgcttggccgagcagcaccggcagatagaggagaccctggctcatttccacctcaccaaagacatgctgctggaggtgaagaagaggatgcgggccgagatggagctggggctgaggaagcagacgcacaacaatgccgtggttaagatgctgccctccttcgtccggagaactcccgacgggaccgagaatggtgacttcttggccctggatcttggaggaaccaatttccgtgtgctgctggtgaaaatccgtagtgggaaaaagagaacggtggaaatgcacaacaagatctacgccattcctattgaaatcatgcagggcactggggaagagctgtttgatcacattgtctcctgcatctctgacttcttggactacatggggatcaaaggccccaggatgcctctgggcttcacgttctcatttccctgccagcagacgagtctggacgcgggaatcttgatcacgtggacaaagggttttaaggcaacagactgcgtgggccacgatgtagtcaccttactaagggatgcgataaaaaggagagaggaatttgacctggacgtggtggctgtggtcaacgacacagtgggcaccatgatgacctgtgcttatgaggagcccacctgtgaggttggactcattgttgggaccggcagcaatgcctgctacatggaggagatgaagaacgtggagatggtggagggggaccaggggcagatgtgcatcaacatggagtggggggcctttggggacaacgggtgtctggatgatatcaggacacactacgacagactggtggacgaatattccctaaatgctgggaaacaaaggtatgagaagatgatcagtggtatgtacctgggtgaaatcgtccgcaacatcttaatcgacttcaccaagaagggattcctcttccgagggcagatctctgagacgctgaagacccggggcatctttgagaccaagtttctctctcagatcgagagtgaccgattagcactgctccaggtccgggctatcctccagcagctaggtctgaatagcacctgcgatgacagtatcctcgtcaagacagtgtgcggggtggtgtccaggagggccgcacagctgtgtggcgcaggcatggctgcggttgtggataagatccgcgagaacagaggactggaccgtctgaatgtgactgtgggagtggacgggacactctacaagcttcatccacacttctccagaatcatgcaccagacggtgaaggaactgtcaccaaaatgtaacgtgtccttcctcctgtctgaggatggcagcggcaagggggccgccctcatcacggccgtgggcgtgcggttacgcacagaggcaagcagctaagagtccgggatccccagcctactgcctctccagcacttctctcttcaagcggcgaccccctaccctcccagcgagttgcgctgggagacgctggcgccagggcctgccggcgcggggaggaaagcaaaatccaactaatggtatatattgtagggtacagaatagagcgtgtgctgttgataatatctctcacccggatccctcctcacttgccctgccactttgcatggtttgattttgacctggtcccccacgtgtgaagtgtagtggcatccatttctaatgtatgcattcatccaacagagttatttattggctggagatggaaaatcacaccacctgacaggccttctgggcctccaaagcccatccttggggttccccctccctgtgtgaaatgtattatcaccagcagacactgccgggcctccctcccgggggcactgcctgaaggcgagtgtgggcatagcattagctgcttcctcccctcctggcacccactgtggcctggcatcgcatcgtggtgtgtcaatgccacaaaatcgtgtgtccgtggaaccagtcctagccgcgtgtgacagtcttgcattctgtttgtctcgtggggggaggtggacagtcctgcggaaatgtgtcttgtctccatttggataaaaggaaccaaccaacaaacaatgccatcactggaatttcccaccgctttgtgagccgtgtcgtatgacctagtaaactttgtaccaattcaaagacccgagtg

SEQ ID NO: 1243 - protein, 903 aa, Homo sapiens
MAKRALRDFIDKYLYAMRLSDETLIDIMTRFRKEMKNGLSRDFNPTATVKMLPTFVRSIPDGSEKGDFIALDLGGSSFRILRVQVNHEKNQNVHMESEVYDTPENIVHGSGSQLFDHVAECLGDFMEKRKIKDKKLPVGFTFSFPCQQSKIDEAILITWTKRFKASGVEGADVVKLLNKAIKKRGDYDANIVAVVNDTVGTMMTCGYDDQHCEVGLIIGTGTNACYMEELRHIDLVEGDEGRMCINTEWGAFGDDGSLEDIRTEFDREIDRGSLNPGKQLFEKMVSGMYLGELVRLILVKMAKEGLLFEGRITPELLTRGKFNTSDVSAIEKNKEGLHNAKEILTRLGVEPSDDDCVSVQHVCTIVSFRSANLVAATLGAILNRLRDNKGTPRLRTTVGVDGSLYKTHPQYSRRFHKTLRRLVPDSDVRFLLSESGSGKGAAMVTAVAYRLAEQHRQIEETLAHFHLTKDMLLEVKKRMRAEMELGLRKQTHNNAVVKMLPSFVRRTPDGTENGDFLALDLGGTNFRVLLVKIRSGKKRTVEMHNKIYAIPIEIMQGTGEELFDHIVSCISDFLDYMGIKGPRMPLGFTFSFPCQQTSLDAGILITWTKGFKATDCVGHDVVTLLRDAIKRREEFDLDVVAVVNDTVGTMMTCAYEEPTCEVGLIVGTGSNACYMEEMKNVEMVEGDQGQMCINMEWGAFGDNGCLDDIRTHYDRLVDEYSLNAGKQRYEKMISGMYLGEIVRNILIDFTKKGFLFRGQISETLKTRGIFETKFLSQIESDRLALLQVRAILQQLQSTCDDSILVKTVCGVVSRRAAQLCGAGMAAVVDKIRENRGLDRLNVTVGVDGTLYKLHPHFSRIMHQTVKELSPKCNVSFLLSEDGSGKGAALITAVGVRLRTEASS

SEQ ID NO: 1244 - DNA, 3805 bp, Homo sapiens
aaccagaactccagagagggaaaacatctatcttgctgtgtttggacaggccagcccctgaaacatcttgggcaatggagggttaacttctcaaagtttaataggcaagaccagcaaccatgcaacaaggacttcaactaaccaactaaagaactgttccccagagcattgttcctgagaaggaaaagagtccaaacacctacccacacctgctttgtgccaagaatccacagttggattgcaaggacagtgcgttcaagacccagctgttgagagtagaaaagcagaagaaaggacccgaggtcagcaagtgccctccccacaatggggcagatctgccagcgagaatcggctacagcagctgaaaaaccaaaacttcatctacttgctgaaagtgagattgacaagtatctctatgccatgcggctctccgatgaaactctcatagatatcatgactcgcttcaggaaggagatgaagaatggcctctcccgggattttaatccaacagccacagtcaagatgttgccaacattcgtaaggtccattcctgatggctctgaaaagggagatttcattgccctggatcttggtgggtcttcctttcgaattctgcgggtgcaagtgaatcatgagaaaaaccagaatgttcacatggagtccgaggtttatgacaccccagagaacatcgtgcacggcagtggaagccagctttttgatcatgttgctgagtgcctgggagatttcatggagaaaaggaagatcaaggacaagaagttacctgtgggattcacgttttcttttccttgccaacaatccaaaatagatgaggccatcctgatcacctggacaaagcgatttaaagcgagcggagtggaaggagcagatgtggtcaaactgcttaacaaagccatcaaaaagcgaggggactatgatgccaacatcgtagctgtggtgaatgacacagtgggcaccatgatgacctgtggctatgacgaccagcactgtgaagtcggcctgatcatcggcactggcaccaatgcttgctacatggaggaactgaggcacattgatctggtggaaggagacgaggggaggatgtgtatcaatacagaatggggagcctttggagacgatggatcattagaagacatccggacagagtttgacagggagatagaccggggatccctcaaccctggaaaacagctgtttgagaagatggtcagtggcatgtacttgggagagctggttcgactgatcctagtcaagatggccaaggagggcctcttatttgaagggcggatcaccccggagctgctcacccgagggaagtttaacaccagtgatgtgtcagccatcgaaaagaataaggaaggcctccacaatgccaaagaaatcctgacccgcctgggagtggagccgtccgatgatgactgtgtctcagtccagcacgtttgcaccattgtctcatttcgctcagccaacttggtggctgccacactgggcgccatcttgaaccgcctgcgtgataacaagggcacacccaggctgcggaccacggttggtgtcgacggatctctttacaagacgcacccacagtattcccggcgtttccacaagactctaaggcgcttggtgccagactccgatgtgcgcttcctcctctcggagagtggcagcggcaagggggctgccatggtgacggcggtggcctaccgcttggccgagcagcaccggcagatagaggagaccctggctcatttccacctcaccaaagacatgctgctggaggtgaagaagaggatgcgggccgagatggagctggggctgaggaagcagacgcacaacaatgccgtggttaagatgctgccctccttcgtccggagaactcccgacgggaccgagaatggtgacttcttggccctggatcttggaggaaccaatttccgtgtgctgctggtgaaaatccgtagtgggaaaaagagaacggtggaaatgcacaacaagatctacgccattcctattgaaatcatgcagggcactggggaagagctgtttgatcacattgtctcctgcatctctgacttcttggactacatggggatcaaaggccccaggatgcctctgggcttcacgttctcatttccctgccagcagacgagtctggacgcgggaatcttgatcacgtggacaaagggttttaaggcaacagactgcgtgggccacgatgtagtcaccttactaagggatgcgataaaaaggagagaggaatttgacctggacgtggtggctgtggtcaacgacacagtgggcaccatgatgacctgtgcttatgaggagcccacctgtgaggttggactcattgttgggaccggcagcaatgcctgctacatggaggagatgaagaacgtggagatggtggagggggaccaggggcagatgtgcatcaacatggagtggggggcctttggggacaacgggtgtctggatgatatcaggacacactacgacagactggtggacgaatattccctaaatgctgggaaacaaaggtatgagaagatgatcagtggtatgtacctgggtgaaatcgtccgcaacatcttaatcgacttcaccaagaagggattcctcttccgagggcagatctctgagacgctgaagacccggggcatctttgagaccaagtttctctctcagatcgagagtgaccgattagcactgctccaggtccgggctatcctccagcagctaggtctgaatagcacctgcgatgacagtatcctcgtcaagacagtgtgcggggtggtgtccaggagggccgcacagctgtgtggcgcaggcatggctgcggttgtggataagatccgcgagaacagaggactggaccgtctgaatgtgactgtgggagtggacgggacactctacaagcttcatccacacttctccagaatcatgcaccagacggtgaaggaactgtcaccaaaatgtaacgtgtccttcctcctgtctgaggatggcagcggcaagggggccgccctcatcacggccgtgggcgtgcggttacgcacagaggcaagcagctaagagtccgggatccccagcctactgcctctccagcacttctctcttcaagcggcgaccccctaccctcccagcgagttgcgctgggagacgctggcgccagggcctgccggcgcggggaggaaagcaaaatccaactaatggtatatattgtagggtacagaatagagcgtgtgctgttgataatatctctcacccggatccctcctcacttgccctgccactttgcatggtttgattttgacctggtcccccacgtgtgaagtgtagtggcatccatttctaatgtatgcattcatccaacagagttatttattggctggagatggaaaatcacaccacctgacaggccttctgggcctccaaagcccatccttggggttccccctccctgtgtgaaatgtattatcaccagcagacactgccgggcctccctcccgggggcactgcctgaaggcgagtgtgggcatagcattagctgcttcctcccctcctggcacccactgtggcctggcatcgcatcgtggtgtgtcaatgccacaaaatcgtgtgtccgtggaaccagtcctagccgcgtgtgacagtcttgcattctgtttgtctcgtggggggaggtggacagtcctgcggaaatgtgtcttgaaacaatgccatcactggaatttcccaccgctttgtgagccgtgtcgtatgacctagtaaactttgtaccaattca

SEQ ID NO: 1245 - protein, 919 aa, Homo sapiens
MGQICQRESATAAEKPKLHLLAESEIDKYLYAMRLSDETLIDIMTRFRKEMKNGLSRDFNPTATVKMLPTFVRSIPDGSEKGDFIALDLGGSSFRILRVQVNHEKNQNVHMESEVYDTPENIVHGSGSQLFDHVAECLGDFMEKRKIKDKKLPVGFTFSFPCQQSKIDEAILITWTKRFKASGVEGADVVKLLNKAIKKRGDYDANIVAVVNDTVGTMMTCGYDDQHCEVGLIIGTGTNACYMEELRHIDLVEGDEGRMCINTEWGAFGDDGSLEDIRTEFDREIDRGSLNPGKQLFEKMVSGMYLGELVRLILVKMAKEGLLFEGRITPELLTRGKFNTSDVSAIEKNKEGLHNAKEILTRLGVEPSDDDCVSVQHVCTIVSFRSANLVAATLGAILNRLRDNKGTPRLRTTVGVDGSLYKTHPQYSRRFHKTLRRLVPDSDVRFLLSESGSGKGAAMVTAVAYRLAEQHRQIEETLAHFHLTKDMLLEVKKRMRAEMELGLRKQTHNNAVVKMLPSFVRRTPDGTENGDFLALDLGGTNFRVLLVKIRSGKKRTVEMHNKIYAIPIEIMQGTGEELFDHIVSCISDFLDYMGIKGPRMPLGFTFSFPCQQTSLDAGILITWTKGFKATDCVGHDVVTLLRDAIKRREEFDLDVVAVVNDTVGTMMTCAYEEPTCEVGLIVGTGSNACYMEEMKNVEMVEGDQGQMCINMEWGAFGDNGCLDDIRTHYDRLVDEYSLNAGKQRYEKMISGMYLGEIVRNILIDFTKKGFLFRGQISETLKTRGIFETKFLSQIESDRLALLQVRAILQQLQSTCDDSILVKTVCGVVSRRAAQLCGAGMAAVVDKIRENRGLDRLNVTVGVDGTLYKLHPHFSRIMHQTVKELSPKCNVSFLLSEDGSGKGAALITAVGVRLRTEASS

SEQ ID NO: 1246 - DNA, 3949 bp, Homo sapiens
aaccagaactccagagagggaaaacatctatcttgctgtgtttggacaggccagcccctgaaacatcttgggcaatggagggttaacttctcaaagtttaataggcaagaccagcaaccatgcaacaaggacttcaactaaccaactaaagaactgttccccagagcattgttcctgagaaggaaaagagtccaaacacctacccacacctgctttgtgccaagaatccacagttggattgcaaggacagtgcgttcaagacccagctgttgagagtagaaaagcagaagaaaggacccgaggtcagcaagtgccctccccacaatggggcagatctgccagcgagaatcggctacagcagctgaaaaaccaaaacttcatctacttgctgaaagtgagccgccggaggaccacggctcgccagggctgcggaggaccgaccgtccccacgcctgccgccccgcgaccccgaccgccagcatgatcgccgcgcagctcctggcctattacttcacggagctgaaggatgaccaggtcaaaaagattgacaagtatctctatgccatgcggctctccgatgaaactctcatagatatcatgactcgcttcaggaaggagatgaagaatggcctctcccgggattttaatccaacagccacagtcaagatgttgccaacattcgtaaggtccattcctgatggctctgaaaagggagatttcattgccctggatcttggtgggtcttcctttcgaattctgcgggtgcaagtgaatcatgagaaaaaccagaatgttcacatggagtccgaggtttatgacaccccagagaacatcgtgcacggcagtggaagccagctttttgatcatgttgctgagtgcctgggagatttcatggagaaaaggaagatcaaggacaagaagttacctgtgggattcacgttttcttttccttgccaacaatccaaaatagatgaggccatcctgatcacctggacaaagcgatttaaagcgagcggagtggaaggagcagatgtggtcaaactgcttaacaaagccatcaaaaagcgaggggactatgatgccaacatcgtagctgtggtgaatgacacagtgggcaccatgatgacctgtggctatgacgaccagcactgtgaagtcggcctgatcatcggcactggcaccaatgcttgctacatggaggaactgaggcacattgatctggtggaaggagacgaggggaggatgtgtatcaatacagaatggggagcctttggagacgatggatcattagaagacatccggacagagtttgacagggagatagaccggggatccctcaaccctggaaaacagctgtttgagaagatggtcagtggcatgtacttgggagagctggttcgactgatcctagtcaagatggccaaggagggcctcttatttgaagggcggatcaccccggagctgctcacccgagggaagtttaacaccagtgatgtgtcagccatcgaaaagaataaggaaggcctccacaatgccaaagaaatcctgacccgcctgggagtggagccgtccgatgatgactgtgtctcagtccagcacgtttgcaccattgtctcatttcgctcagccaacttggtggctgccacactgggcgccatcttgaaccgcctgcgtgataacaagggcacacccaggctgcggaccacggttggtgtcgacggatctctttacaagacgcacccacagtattcccggcgtttccacaagactctaaggcgcttggtgccagactccgatgtgcgcttcctcctctcggagagtggcagcggcaagggggctgccatggtgacggcggtggcctaccgcttggccgagcagcaccggcagatagaggagaccctggctcatttccacctcaccaaagacatgctgctggaggtgaagaagaggatgcgggccgagatggagctggggctgaggaagcagacgcacaacaatgccgtggttaagatgctgccctccttcgtccggagaactcccgacgggaccgagaatggtgacttcttggccctggatcttggaggaaccaatttccgtgtgctgctggtgaaaatccgtagtgggaaaaagagaacggtggaaatgcacaacaagatctacgccattcctattgaaatcatgcagggcactggggaagagctgtttgatcacattgtctcctgcatctctgacttcttggactacatggggatcaaaggccccaggatgcctctgggcttcacgttctcatttccctgccagcagacgagtctggacgcgggaatcttgatcacgtggacaaagggttttaaggcaacagactgcgtgggccacgatgtagtcaccttactaagggatgcgataaaaaggagagaggaatttgacctggacgtggtggctgtggtcaacgacacagtgggcaccatgatgacctgtgcttatgaggagcccacctgtgaggttggactcattgttgggaccggcagcaatgcctgctacatggaggagatgaagaacgtggagatggtggagggggaccaggggcagatgtgcatcaacatggagtggggggcctttggggacaacgggtgtctggatgatatcaggacacactacgacagactggtggacgaatattccctaaatgctgggaaacaaaggtatgagaagatgatcagtggtatgtacctgggtgaaatcgtccgcaacatcttaatcgacttcaccaagaagggattcctcttccgagggcagatctctgagacgctgaagacccggggcatctttgagaccaagtttctctctcagatcgagagtgaccgattagcactgctccaggtccgggctatcctccagcagctaggtctgaatagcacctgcgatgacagtatcctcgtcaagacagtgtgcggggtggtgtccaggagggccgcacagctgtgtggcgcaggcatggctgcggttgtggataagatccgcgagaacagaggactggaccgtctgaatgtgactgtgggagtggacgggacactctacaagcttcatccacacttctccagaatcatgcaccagacggtgaaggaactgtcaccaaaatgtaacgtgtccttcctcctgtctgaggatggcagcggcaagggggccgccctcatcacggccgtgggcgtgcggttacgcacagaggcaagcagctaagagtccgggatccccagcctactgcctctccagcacttctctcttcaagcggcgaccccctaccctcccagcgagttgcgctgggagacgctggcgccagggcctgccggcgcggggaggaaagcaaaatccaactaatggtatatattgtagggtacagaatagagcgtgtgctgttgataatatctctcacccggatccctcctcacttgccctgccactttgcatggtttgattttgacctggtcccccacgtgtgaagtgtagtggcatccatttctaatgtatgcattcatccaacagagttatttattggctggagatggaaaatcacaccacctgacaggccttctgggcctccaaagcccatccttggggttccccctccctgtgtgaaatgtattatcaccagcagacactgccgggcctccctcccgggggcactgcctgaaggcgagtgtgggcatagcattagctgcttcctcccctcctggcacccactgtggcctggcatcgcatcgtggtgtgtcaatgccacaaaatcgtgtgtccgtggaaccagtcctagccgcgtgtgacagtcttgcattctgtttgtctcgtggggggaggtggacagtcctgcggaaatgtgtcttgaaacaatgccatcactggaatttcccaccgctttgtgagccgtgtcgtatgacctagtaaactttgtaccaattca

SEQ ID NO: 1247 - protein, 967 aa, Homo sapiens; identical to SEQ ID NO: 1241

SEQ ID NO: 1248 - DNA, 3901 bp, Homo sapiens
aaccagaactccagagagggaaaacatctatcttgctgtgtttggacaggccagcccctgaaacatcttgggcaatggagggttaacttctcaaagtttaataggcaagaccagcaaccatgcaacaaggacttcaactaaccaactaaagaactgttccccagagcattgttcctgagaaggaaaagagtccaaacacctacccacacctgctttgtgccaagaatccacagttggattgcaaggacagtgtatgttgtccttttggaaaaatgagagtgagcccaaatgaagaacaagcaaaggcgttcaagacccagctgttgagagtagaaaagcagaagaaaggacccgaggtcagcaagtgccctccccacaatggggcagatctgccagcgagaatcggctacagcagctgaaaaaccaaaacttcatctacttgctgaaagtgagattgacaagtatctctatgccatgcggctctccgatgaaactctcatagatatcatgactcgcttcaggaaggagatgaagaatggcctctcccgggattttaatccaacagccacagtcaagatgttgccaacattcgtaaggtccattcctgatggctctgaaaagggagatttcattgccctggatcttggtgggtcttcctttcgaattctgcgggtgcaagtgaatcatgagaaaaaccagaatgttcacatggagtccgaggtttatgacaccccagagaacatcgtgcacggcagtggaagccagctttttgatcatgttgctgagtgcctgggagatttcatggagaaaaggaagatcaaggacaagaagttacctgtgggattcacgttttcttttccttgccaacaatccaaaatagatgaggccatcctgatcacctggacaaagcgatttaaagcgagcggagtggaaggagcagatgtggtcaaactgcttaacaaagccatcaaaaagcgaggggactatgatgccaacatcgtagctgtggtgaatgacacagtgggcaccatgatgacctgtggctatgacgaccagcactgtgaagtcggcctgatcatcggcactggcaccaatgcttgctacatggaggaactgaggcacattgatctggtggaaggagacgaggggaggatgtgtatcaatacagaatggggagcctttggagacgatggatcattagaagacatccggacagagtttgacagggagatagaccggggatccctcaaccctggaaaacagctgtttgagaagatggtcagtggcatgtacttgggagagctggttcgactgatcctagtcaagatggccaaggagggcctcttatttgaagggcggatcaccccggagctgctcacccgagggaagtttaacaccagtgatgtgtcagccatcgaaaagaataaggaaggcctccacaatgccaaagaaatcctgacccgcctgggagtggagccgtccgatgatgactgtgtctcagtccagcacgtttgcaccattgtctcatttcgctcagccaacttggtggctgccacactgggcgccatcttgaaccgcctgcgtgataacaagggcacacccaggctgcggaccacggttggtgtcgacggatctctttacaagacgcacccacagtattcccggcgtttccacaagactctaaggcgcttggtgccagactccgatgtgcgcttcctcctctcggagagtggcagcggcaagggggctgccatggtgacggcggtggcctaccgcttggccgagcagcaccggcagatagaggagaccctggctcatttccacctcaccaaagacatgctgctggaggtgaagaagaggatgcgggccgagatggagctggggctgaggaagcagacgcacaacaatgccgtggttaagatgctgccctccttcgtccggagaactcccgacgggaccgagaatggtgacttcttggccctggatcttggaggaaccaatttccgtgtgctgctggtgaaaatccgtagtgggaaaaagagaacggtggaaatgcacaacaagatctacgccattcctattgaaatcatgcagggcactggggaagagctgtttgatcacattgtctcctgcatctctgacttcttggactacatggggatcaaaggccccaggatgcctctgggcttcacgttctcatttccctgccagcagacgagtctggacgcgggaatcttgatcacgtggacaaagggttttaaggcaacagactgcgtgggccacgatgtagtcaccttactaagggatgcgataaaaaggagagaggaatttgacctggacgtggtggctgtggtcaacgacacagtgggcaccatgatgacctgtgcttatgaggagcccacctgtgaggttggactcattgttgggaccggcagcaatgcctgctacatggaggagatgaagaacgtggagatggtggagggggaccaggggcagatgtgcatcaacatggagtggggggcctttggggacaacgggtgtctggatgatatcaggacacactacgacagactggtggacgaatattccctaaatgctgggaaacaaaggtatgagaagatgatcagtggtatgtacctgggtgaaatcgtccgcaacatcttaatcgacttcaccaagaagggattcctcttccgagggcagatctctgagacgctgaagacccggggcatctttgagaccaagtttctctctcagatcgagagtgaccgattagcactgctccaggtccgggctatcctccagcagctaggtctgaatagcacctgcgatgacagtatcctcgtcaagacagtgtgcggggtggtgtccaggagggccgcacagctgtgtggcgcaggcatggctgcggttgtggataagatccgcgagaacagaggactggaccgtctgaatgtgactgtgggagtggacgggacactctacaagcttcatccacacttctccagaatcatgcaccagacggtgaaggaactgtcaccaaaatgtaacgtgtccttcctcctgtctgaggatggcagcggcaagggggccgccctcatcacggccgtgggcgtgcggttacgcacagaggcaagcagctaagagtccgggatccccagcctactgcctctccagcacttctctcttcaagcggcgaccccctaccctcccagcgagttgcgctgggagacgctggcgccagggcctgccggcgcggggaggaaagcaaaatccaactaatggtatatattgtagggtacagaatagagcgtgtgctgttgataatatctctcacccggatccctcctcacttgccctgccactttgcatggtttgattttgacctggtcccccacgtgtgaagtgtagtggcatccatttctaatgtatgcattcatccaacagagttatttattggctggagatggaaaatcacaccacctgacaggccttctgggcctccaaagcccatccttggggttccccctccctgtgtgaaatgtattatcaccagcagacactgccgggcctccctcccgggggcactgcctgaaggcgagtgtgggcatagcattagctgcttcctcccctcctggcacccactgtggcctggcatcgcatcgtggtgtgtcaatgccacaaaatcgtgtgtccgtggaaccagtcctagccgcgtgtgacagtcttgcattctgtttgtctcgtggggggaggtggacagtcctgcggaaatgtgtcttgtctccatttggataaaaggaaccaaccaacaaacaatgccatcactggaatttcccaccgctttgtgagccgtgtcgtatgacctagtaaactttgtaccaattcaaagacccgagtg

SEQ ID NO: 1249 - protein, 919 aa, Homo sapiens; identical to SEQ ID NO: 1245

SEQ ID NO: 1250 - DNA, 3847 bp, Homo sapiens
aaccagaactccagagagggaaaacatctatcttgctgtgtttggacaggccagcccctgaaacatcttgggcaatggagggttaacttctcaaagtttaataggcaagaccagcaaccatgcaacaaggacttcaactaaccaactaaagaactgttccccagagcattgttcctgagaaggaaaagagtccaaacacctacccacacctgctttgtgccaagaatccacagttggattgcaaggacagtgcgttcaagacccagctgttgagagtagaaaagcagaagaaaggacccgaggtcagcaagtgccctccccacaatggggcagatctgccagcgagaatcggctacagcagctgaaaaaccaaaacttcatctacttgctgaaagtgagattgacaagtatctctatgccatgcggctctccgatgaaactctcatagatatcatgactcgcttcaggaaggagatgaagaatggcctctcccgggattttaatccaacagccacagtcaagatgttgccaacattcgtaaggtccattcctgatggctctgaaaagggagatttcattgccctggatcttggtgggtcttcctttcgaattctgcgggtgcaagtgaatcatgagaaaaaccagaatgttcacatggagtccgaggtttatgacaccccagagaacatcgtgcacggcagtggaagccagctttttgatcatgttgctgagtgcctgggagatttcatggagaaaaggaagatcaaggacaagaagttacctgtgggattcacgttttcttttccttgccaacaatccaaaatagatgaggccatcctgatcacctggacaaagcgatttaaagcgagcggagtggaaggagcagatgtggtcaaactgcttaacaaagccatcaaaaagcgaggggactatgatgccaacatcgtagctgtggtgaatgacacagtgggcaccatgatgacctgtggctatgacgaccagcactgtgaagtcggcctgatcatcggcactggcaccaatgcttgctacatggaggaactgaggcacattgatctggtggaaggagacgaggggaggatgtgtatcaatacagaatggggagcctttggagacgatggatcattagaagacatccggacagagtttgacagggagatagaccggggatccctcaaccctggaaaacagctgtttgagaagatggtcagtggcatgtacttgggagagctggttcgactgatcctagtcaagatggccaaggagggcctcttatttgaagggcggatcaccccggagctgctcacccgagggaagtttaacaccagtgatgtgtcagccatcgaaaagaataaggaaggcctccacaatgccaaagaaatcctgacccgcctgggagtggagccgtccgatgatgactgtgtctcagtccagcacgtttgcaccattgtctcatttcgctcagccaacttggtggctgccacactgggcgccatcttgaaccgcctgcgtgataacaagggcacacccaggctgcggaccacggttggtgtcgacggatctctttacaagacgcacccacagtattcccggcgtttccacaagactctaaggcgcttggtgccagactccgatgtgcgcttcctcctctcggagagtggcagcggcaagggggctgccatggtgacggcggtggcctaccgcttggccgagcagcaccggcagatagaggagaccctggctcatttccacctcaccaaagacatgctgctggaggtgaagaagaggatgcgggccgagatggagctggggctgaggaagcagacgcacaacaatgccgtggttaagatgctgccctccttcgtccggagaactcccgacgggaccgagaatggtgacttcttggccctggatcttggaggaaccaatttccgtgtgctgctggtgaaaatccgtagtgggaaaaagagaacggtggaaatgcacaacaagatctacgccattcctattgaaatcatgcagggcactggggaagagctgtttgatcacattgtctcctgcatctctgacttcttggactacatggggatcaaaggccccaggatgcctctgggcttcacgttctcatttccctgccagcagacgagtctggacgcgggaatcttgatcacgtggacaaagggttttaaggcaacagactgcgtgggccacgatgtagtcaccttactaagggatgcgataaaaaggagagaggaatttgacctggacgtggtggctgtggtcaacgacacagtgggcaccatgatgacctgtgcttatgaggagcccacctgtgaggttggactcattgttgggaccggcagcaatgcctgctacatggaggagatgaagaacgtggagatggtggagggggaccaggggcagatgtgcatcaacatggagtggggggcctttggggacaacgggtgtctggatgatatcaggacacactacgacagactggtggacgaatattccctaaatgctgggaaacaaaggtatgagaagatgatcagtggtatgtacctgggtgaaatcgtccgcaacatcttaatcgacttcaccaagaagggattcctcttccgagggcagatctctgagacgctgaagacccggggcatctttgagaccaagtttctctctcagatcgagagtgaccgattagcactgctccaggtccgggctatcctccagcagctaggtctgaatagcacctgcgatgacagtatcctcgtcaagacagtgtgcggggtggtgtccaggagggccgcacagctgtgtggcgcaggcatggctgcggttgtggataagatccgcgagaacagaggactggaccgtctgaatgtgactgtgggagtggacgggacactctacaagcttcatccacacttctccagaatcatgcaccagacggtgaaggaactgtcaccaaaatgtaacgtgtccttcctcctgtctgaggatggcagcggcaagggggccgccctcatcacggccgtgggcgtgcggttacgcacagaggcaagcagctaagagtccgggatccccagcctactgcctctccagcacttctctcttcaagcggcgaccccctaccctcccagcgagttgcgctgggagacgctggcgccagggcctgccggcgcggggaggaaagcaaaatccaactaatggtatatattgtagggtacagaatagagcgtgtgctgttgataatatctctcacccggatccctcctcacttgccctgccactttgcatggtttgattttgacctggtcccccacgtgtgaagtgtagtggcatccatttctaatgtatgcattcatccaacagagttatttattggctggagatggaaaatcacaccacctgacaggccttctgggcctccaaagcccatccttggggttccccctccctgtgtgaaatgtattatcaccagcagacactgccgggcctccctcccgggggcactgcctgaaggcgagtgtgggcatagcattagctgcttcctcccctcctggcacccactgtggcctggcatcgcatcgtggtgtgtcaatgccacaaaatcgtgtgtccgtggaaccagtcctagccgcgtgtgacagtcttgcattctgtttgtctcgtggggggaggtggacagtcctgcggaaatgtgtcttgtctccatttggataaaaggaaccaaccaacaaacaatgccatcactggaatttcccaccgctttgtgagccgtgtcgtatgacctagtaaactttgtaccaattcaaagacccgagtg

SEQ ID NO: 1251 - protein, 919 aa, Homo sapiens; identical to SEQ ID NO: 1245

SEQ ID NO: 1252 - DNA, 3592 bp, Homo sapiens
ccgccggaggaccacggctcgccagggctgcggaggaccgaccgtccccacgcctgccgccccgcgaccccgaccgccagcatgatcgccgcgcagctcctggcctattacttcacggagctgaaggatgaccaggtcaaaaagattgacaagtatctctatgccatgcggctctccgatgaaactctcatagatatcatgactcgcttcaggaaggagatgaagaatggcctctcccgggattttaatccaacagccacagtcaagatgttgccaacattcgtaaggtccattcctgatggctctgaaaagggagatttcattgccctggatcttggtgggtcttcctttcgaattctgcgggtgcaagtgaatcatgagaaaaaccagaatgttcacatggagtccgaggtttatgacaccccagagaacatcgtgcacggcagtggaagccagctttttgatcatgttgctgagtgcctgggagatttcatggagaaaaggaagatcaaggacaagaagttacctgtgggattcacgttttcttttccttgccaacaatccaaaatagatgaggccatcctgatcacctggacaaagcgatttaaagcgagcggagtggaaggagcagatgtggtcaaactgcttaacaaagccatcaaaaagcgaggggactatgatgccaacatcgtagctgtggtgaatgacacagtgggcaccatgatgacctgtggctatgacgaccagcactgtgaagtcggcctgatcatcggcactggcaccaatgcttgctacatggaggaactgaggcacattgatctggtggaaggagacgaggggaggatgtgtatcaatacagaatggggagcctttggagacgatggatcattagaagacatccggacagagtttgacagggagatagaccggggatccctcaaccctggaaaacagctgtttgagaagatggtcagtggcatgtacttgggagagctggttcgactgatcctagtcaagatggccaaggagggcctcttatttgaagggcggatcaccccggagctgctcacccgagggaagtttaacaccagtgatgtgtcagccatcgaaaagaataaggaaggcctccacaatgccaaagaaatcctgacccgcctgggagtggagccgtccgatgatgactgtgtctcagtccagcacgtttgcaccattgtctcatttcgctcagccaacttggtggctgccacactgggcgccatcttgaaccgcctgcgtgataacaagggcacacccaggctgcggaccacggttggtgtcgacggatctctttacaagacgcacccacagtattcccggcgtttccacaagactctaaggcgcttggtgccagactccgatgtgcgcttcctcctctcggagagtggcagcggcaagggggctgccatggtgacggcggtggcctaccgcttggccgagcagcaccggcagatagaggagaccctggctcatttccacctcaccaaagacatgctgctggaggtgaagaagaggatgcgggccgagatggagctggggctgaggaagcagacgcacaacaatgccgtggttaagatgctgccctccttcgtccggagaactcccgacgggaccgagaatggtgacttcttggccctggatcttggaggaaccaatttccgtgtgctgctggtgaaaatccgtagtgggaaaaagagaacggtggaaatgcacaacaagatctacgccattcctattgaaatcatgcagggcactggggaagagctgtttgatcacattgtctcctgcatctctgacttcttggactacatggggatcaaaggccccaggatgcctctgggcttcacgttctcatttccctgccagcagacgagtctggacgcgggaatcttgatcacgtggacaaagggttttaaggcaacagactgcgtgggccacgatgtagtcaccttactaagggatgcgataaaaaggagagaggaatttgacctggacgtggtggctgtggtcaacgacacagtgggcaccatgatgacctgtgcttatgaggagcccacctgtgaggttggactcattgttgggaccggcagcaatgcctgctacatggaggagatgaagaacgtggagatggtggagggggaccaggggcagatgtgcatcaacatggagtggggggcctttggggacaacgggtgtctggatgatatcaggacacactacgacagactggtggacgaatattccctaaatgctgggaaacaaaggtatgagaagatgatcagtggtatgtacctgggtgaaatcgtccgcaacatcttaatcgacttcaccaagaagggattcctcttccgagggcagatctctgagacgctgaagacccggggcatctttgagaccaagtttctctctcagatcgagagtgaccgattagcactgctccaggtccgggctatcctccagcagctaggtctgaatagcacctgcgatgacagtatcctcgtcaagacagtgtgcggggtggtgtccaggagggccgcacagctgtgtggcgcaggcatggctgcggttgtggataagatccgcgagaacagaggactggaccgtctgaatgtgactgtgggagtggacgggacactctacaagcttcatccacacttctccagaatcatgcaccagacggtgaaggaactgtcaccaaaatgtaacgtgtccttcctcctgtctgaggatggcagcggcaagggggccgccctcatcacggccgtgggcgtgcggttacgcacagaggcaagcagctaagagtccgggatccccagcctactgcctctccagcacttctctcttcaagcggcgaccccctaccctcccagcgagttgcgctgggagacgctggcgccagggcctgccggcgcggggaggaaagcaaaatccaactaatggtatatattgtagggtacagaatagagcgtgtgctgttgataatatctctcacccggatccctcctcacttgccctgccactttgcatggtttgattttgacctggtcccccacgtgtgaagtgtagtggcatccatttctaatgtatgcattcatccaacagagttatttattggctggagatggaaaatcacaccacctgacaggccttctgggcctccaaagcccatccttggggttccccctccctgtgtgaaatgtattatcaccagcagacactgccgggcctccctcccgggggcactgcctgaaggcgagtgtgggcatagcattagctgcttcctcccctcctggcacccactgtggcctggcatcgcatcgtggtgtgtcaatgccacaaaatcgtgtgtccgtggaaccagtcctagccgcgtgtgacagtcttgcattctgtttgtctcgtggggggaggtggacagtcctgcggaaatgtgtcttgtctccatttggataaaaggaaccaaccaacaaacaatgccatcactggaatttcccaccgctttgtgagccgtgtcgtatgacctagtaaactttgtaccaattcaaagacccgagtg

SEQ ID NO: 1253 - protein, 915 aa, Homo sapiens
MIAAQLLAYYFTELKDDQVKKIDKYLYAMRLSDETLIDIMTRFRKEMKNGLSRDFNPTATVKMLPTFVRSIPDGSEKGDFIALDLGGSSFRILRVQVNHEKNQNVHMESEVYDTPENIVHGSGSQLFDHVAECLGDFMEKRKIKDKKLPVGFTFSFPCQQSKIDEAILITWTKRFKASGVEGADVVKLLNKAIKKRGDYDANIVAVVNDTVGTMMTCGYDDQHCEVGLIIGTGTNACYMEELRHIDLVEGDEGRMCINTEWGAFGDDGSLEDIRTEFDREIDRGSLNPGKQLFEKMVSGMYLGELVRLILVKMAKEGLLFEGRITPELLTRGKFNTSDVSAIEKNKEGLHNAKEILTRLGVEPSDDDCVSVQHVCTIVSFRSANLVAATLGAILNRLRDNKGTPRLRTTVGVDGSLYKTHPQYSRRFHKTLRRLVPDSDVRFLLSESGSGKGAAMVTAVAYRLAEQHRQIEETLAHFHLTKDMLLEVKKRMRAEMELGLRKQTHNNAVVKMLPSFVRRTPDGTENGDFLALDLGGTNFRVLLVKIRSGKKRTVEMHNKIYAIPIEIMQGTGEELFDHIVSCISDFLDYMGIKGPRMPLGFTFSFPCQQTSLDAGILITWTKGFKATDCVGHDVVTLLRDAIKRREEFDLDVVAVVNDTVGTMMTCAYEEPTCEVGLIVGTGSNACYMEEMKNVEMVEGDQGQMCINMEWGAFGDNGCLDDIRTHYDRLVDEYSLNAGKQRYEKMISGMYLGEIVRNILIDFTKKGFLFRGQISETLKTRGIFETKFLSQIESDRLALLQVRAILQQLQSTCDDSILVKTVCGVVSRRAAQLCGAGMAAVVDKIRENRGLDRLNVTVGVDGTLYKLHPHFSRIMHQTVKELSPKCNVSFLLSEDGSGKGAALITAVGVRLRTEASS

SEQ ID NO: 1254 - DNA, 762 bp, Homo sapiens
atggggacaggccacgacctgtggcccaagtcccgcccagagggagtgcgccctgagggagagccaccggagctggtgactcgggggcgggtgctctggggtgtcgctttgggttcagcaatacaaatctgccagctggagattaggcggggcacgccggggagaggtgatgcactgccgctgaagacccagccgccggaggaccacggctcgccagggctgcggaggaccgaccgtccccacgcctgccgccccgcgaccccgaccgccagcatgatcgccgcgcagctcctggcctattacttcacggagctgaaggatgaccaggtcaaaaagtactcatatgaaccaaagccaacattcattgttgtattcattgccatgtactgtgctaaaggcatcgtgagcctttgcttagttcatccccacaacgcccttgtgagagaccggctgccgagagcaggacagaaactaggttcccggctgccacccacactactgaggtggggctgggcagccgcagaagccatgtgcagtcaggaagaggagtccggggctgctgggcgggcacagaccacgattgacaagtatctctatgccatgcggctctccgatgaaactctcatagatatcatgactcgcttcaggaaggagatgaagaatggcctctcccgggattttaatccaacagccacagtcaagatgttgccaacattcgtaaggtccattcctgatggctctggtaagtctgtcacccagaga

SEQ ID NO: 1255 - protein, 252 aa, Homo sapiens
MGTGHDLWPKSRPEGVRPEGEPPELVTRGRVLWGVGSAIQICQLEIRRGTPGRGDALPLKTQPPEDHGSPGLRRTDRPHACRPATPTASMIAAQLLAYYFTELKDDQVKKYSYEPKPTFIVVFIAMYCAKGIVSLCLVHPHNALVRDRLPRAGQKLGSRLPPTLLRWGWAAAEAMCSQEEESGAAGRAQTTIDKYLYAMRLSDETLIDIMTRFRKEMKNGLSRDFNPTATVKMLPTFVRSIPDGSGKSVTQR

SEQ ID NO: 1256 - DNA, 3649 bp, Homo sapiens
tggacagagcactggctgggcatcaggactaggctggagtcctggctcaaaactctaccacaacctgacactgggcaagatggcccacctgtggcatcccaggttcctgccctgtaaagaggagtctgggtgtatatccagatggactgtgagcacagcctgagtttgccctgtcgaggtgctgaggcctgggagattgggattgacaagtatctctatgccatgcggctctccgatgaaactctcatagatatcatgactcgcttcaggaaggagatgaagaatggcctctcccgggattttaatccaacagccacagtcaagatgttgccaacattcgtaaggtccattcctgatggctctgaaaagggagatttcattgccctggatcttggtgggtcttcctttcgaattctgcgggtgcaagtgaatcatgagaaaaaccagaatgttcacatggagtccgaggtttatgacaccccagagaacatcgtgcacggcagtggaagccagctttttgatcatgttgctgagtgcctgggagatttcatggagaaaaggaagatcaaggacaagaagttacctgtgggattcacgttttcttttccttgccaacaatccaaaatagatgaggccatcctgatcacctggacaaagcgatttaaagcgagcggagtggaaggagcagatgtggtcaaactgcttaacaaagccatcaaaaagcgaggggactatgatgccaacatcgtagctgtggtgaatgacacagtgggcaccatgatgacctgtggctatgacgaccagcactgtgaagtcggcctgatcatcggcactggcaccaatgcttgctacatggaggaactgaggcacattgatctggtggaaggagacgaggggaggatgtgtatcaatacagaatggggagcctttggagacgatggatcattagaagacatccggacagagtttgacagggagatagaccggggatccctcaaccctggaaaacagctgtttgagaagatggtcagtggcatgtacttgggagagctggttcgactgatcctagtcaagatggccaaggagggcctcttatttgaagggcggatcaccccggagctgctcacccgagggaagtttaacaccagtgatgtgtcagccatcgaaaagaataaggaaggcctccacaatgccaaagaaatcctgacccgcctgggagtggagccgtccgatgatgactgtgtctcagtccagcacgtttgcaccattgtctcatttcgctcagccaacttggtggctgccacactgggcgccatcttgaaccgcctgcgtgataacaagggcacacccaggctgcggaccacggttggtgtcgacggatctctttacaagacgcacccacagtattcccggcgtttccacaagactctaaggcgcttggtgccagactccgatgtgcgcttcctcctctcggagagtggcagcggcaagggggctgccatggtgacggcggtggcctaccgcttggccgagcagcaccggcagatagaggagaccctggctcatttccacctcaccaaagacatgctgctggaggtgaagaagaggatgcgggccgagatggagctggggctgaggaagcagacgcacaacaatgccgtggttaagatgctgccctccttcgtccggagaactcccgacgggaccgagaatggtgacttcttggccctggatcttggaggaaccaatttccgtgtgctgctggtgaaaatccgtagtgggaaaaagagaacggtggaaatgcacaacaagatctacgccattcctattgaaatcatgcagggcactggggaagagctgtttgatcacattgtctcctgcatctctgacttcttggactacatggggatcaaaggccccaggatgcctctgggcttcacgttctcatttccctgccagcagacgagtctggacgcgggaatcttgatcacgtggacaaagggttttaaggcaacagactgcgtgggccacgatgtagtcaccttactaagggatgcgataaaaaggagagaggaatttgacctggacgtggtggctgtggtcaacgacacagtgggcaccatgatgacctgtgcttatgaggagcccacctgtgaggttggactcattgttgggaccggcagcaatgcctgctacatggaggagatgaagaacgtggagatggtggagggggaccaggggcagatgtgcatcaacatggagtggggggcctttggggacaacgggtgtctggatgatatcaggacacactacgacagactggtggacgaatattccctaaatgctgggaaacaaaggtatgagaagatgatcagtggtatgtacctgggtgaaatcgtccgcaacatcttaatcgacttcaccaagaagggattcctcttccgagggcagatctctgagacgctgaagacccggggcatctttgagaccaagtttctctctcagatcgagagtgaccgattagcactgctccaggtccgggctatcctccagcagctaggtctgaatagcacctgcgatgacagtatcctcgtcaagacagtgtgcggggtggtgtccaggagggccgcacagctgtgtggcgcaggcatggctgcggttgtggataagatccgcgagaacagaggactggaccgtctgaatgtgactgtgggagtggacgggacactctacaagcttcatccacacttctccagaatcatgcaccagacggtgaaggaactgtcaccaaaatgtaacgtgtccttcctcctgtctgaggatggcagcggcaagggggccgccctcatcacggccgtgggcgtgcggttacgcacagaggcaagcagctaagagtccgggatccccagcctactgcctctccagcacttctctcttcaagcggcgaccccctaccctcccagcgagttgcgctgggagacgctggcgccagggcctgccggcgcggggaggaaagcaaaatccaactaatggtatatattgtagggtacagaatagagcgtgtgctgttgataatatctctcacccggatccctcctcacttgccctgccactttgcatggtttgattttgacctggtcccccacgtgtgaagtgtagtggcatccatttctaatgtatgcattcatccaacagagttatttattggctggagatggaaaatcacaccacctgacaggccttctgggcctccaaagcccatccttggggttccccctccctgtgtgaaatgtattatcaccagcagacactgccgggcctccctcccgggggcactgcctgaaggcgagtgtgggcatagcattagctgcttcctcccctcctggcacccactgtggcctggcatcgcatcgtggtgtgtcaatgccacaaaatcgtgtgtccgtggaaccagtcctagccgcgtgtgacagtcttgcattctgtttgtctcgtggggggaggtggacagtcctgcggaaatgtgtcttgtctccatttggataaaaggaaccaaccaacaaacaatgccatcactggaatttcccaccgctttgtgagccgtgtcgtatgacctagtaaactttgtaccaattcaaagacccgagtg

SEQ ID NO: 1257 - protein, 914 aa, Homo sapiens; identical to SEQ ID NO: 1239

SEQ ID NO: 1258 - DNA, 405 bp, Homo sapiens
atggaaagtactatggatcaaattggaaatccatctctcctctcaaaggcagctaaagctatgtggtcaggctctgggccccagattccagtcctgatttctgagtctgctttccaggcgttcaagacccagctgttgagagtagaaaagcagaagaaaggacccgaggtcagcaagtgccctccccacaatggggcagatctgccagcgagaatcgaggggtgtgttggggtccatcttagaggagggaaaactctgaccaagagcacagcaggaaagcgtcatgaggcaaggcaggagccccctcagacccagcctctaagtcttggtgcagcaggggccacttgtgttctgaccaagggaagcccagaggatcgttctgtatccccctggttaattgctttt

SEQ ID NO: 1259 - protein, 135 aa, Homo sapiens
MESTMDQIGNPSLLSKAAKAMWSGSGPQIPVLISESAFQAFKTQLLRVEKQKKGPEVSKCPPHNGADLPARIEGCVGVHLRGGKTLTKSTAGKRHEARQEPPQTQPLSLGAAGATCVLTKGSPEDRSVSPWLIAF

SEQ ID NO: 1260 - DNA, 23833 bp, Mus musculus
tatggtggcacacagcattagggcttttctcttcccccacaggcacccgagggactacagccagcagctcaggggatgcccttgggaaggcactggcctcggtgagcaggggcctgggcagtggcagtgggggggacttctggtagcctcattgtggccctgattgcccatctttctgtccgcaccactgcagatctactccccggatcactccagcaataatttctcacctagcccctcaacgcctgtgggttcaccccagggcctgccaggtgtgtaggtgatgggcatgggctccatgtgttacctcagggctgtccccagtctatagacctggtcaggtagtgagaggtggcatctgagggaggcgggctcacctcaggcatgcccctccagggtggatgttgctggggcaccggtgaggagcaaaggaaaatgggggctgggggcttctaggtctgggaggttgagggtaacagtaacctgctctgcctggcatgttggcacaggactgtgtgatcccagccctcgggaggcacaggcagatggatctctctgagtgtgaggccagcctgtctacagagggagtcccataccagtcctcaccttgacctgtctgggcctcctggagctacctgttgtttgtgtttgtagcagtgagcccagacaaggagggacagagagaaaccatccttgaggcctccctctgctgtgcccttgcaggctaggtgtgccagggctggctcctctaggatcaggggtagtgttcagtcaggaaagagggagcttggaaggttgagcagtgtctggtgtttgggccgagccaggcatctctgagtgctgtgggtcagctgcacttcctgtccccactgcctgtcttcccacttgtgcctttccttctccagggacatcacagtggccccgggcaggagcgcccagtgccttatcccccaactacgatgcaggtctccatggcctggtgagtgttccctccctgctggccagggcaccaggcactattctgtcccaccactgctgctgggctggctggggctcagtgggcagagtgcctgctgttgtgtgccaagccctgggtcccctcatcagcactgcagaaactgacactgatgacatctgcctgtcctctctgtgcttggggggtggaggcaggagaattaggaggagcaaggcaaggggatcgatcacacgttttgagtaggccgcagcgaaatgtcctgtgtgaagcaaatagtgcagatgtgcacatgcatgtgcgtgcccctcagtgcctgcctcaccctctcacagcagagcaagatggaggaccgcttggacgaggccatccatgtcctgcgaagccacgctgttggcaccgctagcgatctccatgggcttttgcctggccatggcgcactgaccacgagcttcaccggccccatgtcactgggcgggcggcatgccggcctggtgagtatcagcttaggtcagggaatggtgacatttagggactccagccaccctgacatgtcattctcctctgtaggtcgggggaagccatcctgaggagggcctcacaagtggggccagtcttttgcataaccatgccagcctccccagccagcccagttccctccctgacctctcacagagacctcccgactcctatagtggtaagtcccagcagggagctgaaggccttcccagtccttgtcgcagagagggggaggacatgagtgtccctcagggctgaagagtgacttagtccatacttgatctgctgaagcgtgaggacctgaactggtttgaactggataccctagagcctgtgtaaaaagcacaaatgtgtgcctgggcacccatgctgggcatgcagggacaggctgactcgcaggccagcaagctgcacttggcaagccctaggttcccatgagcccctgcctcaaaactgaaagctgatgttggggagccaagattggtgcttctcacatgaatgtgctgacctcgtaatccatgttacaagggtgagcgtggtggccagctttgctgaaaatctctgtgtttccaggataagtcatagtgacaagaacaggacacttgatgtctttccctggtccctgcctgccttttgagcacacacacacacacacacacacacacacacacttgtgaccaagagccatcaggtagactgactgttcaggtcctcaatgtagcctgtgtgctggtttgtttggggagcactgaggcacacggcagggctcaggaacctggcaaaatggagtgcttgcttttcacatgagggcttaggacaggcgcggtcccataggggatgcagtgcttgtagagatgttaggccagcacacgtggagggaatagaacaggggtacagaggagcctccagcaaggaggcagcctgtgcacaggcctgtgggcagagcagagccctcgtagggagaacgagagggtggaagagacgggaagctctgacaagccagtgtgcagtggcctgtgggtgtggggaacattttgccagcagagagcagggtaggaatgtctggcctctgcaccctcaggtgacgctgggagccataaggctagcactggctgtgtgaggggctcggtggattgggcgtgggtgagactaaggatgacgtccacagaggaagccccaggcccacgcagtgtctgctgtgcatgatcttatgcaggcccccctcagctcttaatccctagactgtgtctgcactccgaattgtgcctgttgtatttcaatgtttgttgtggacattttctaggcagttcttgttattgatatcctgacccaatttctcaggtagcccaggctggctttggaatgaccttgaatttctggtctctagccttggcctccgaagtccaggattgatgcgtgtgccaacaaccaggtttatgattttgattttgatttttttttttagacaacctcactgtgtatcataggctggtcttgaacttacaacccctttacctcagcctcccagtgctggggtgacaggtgtgttcttgtaccagtccacagactctccccctgccccatggttatagcagggattgctcctcccactgctttggttttctgagtcagggtttctctgtgtagccctggctgtcctggaactcactctgtagaccaggctggcctcaaactcagaaatctacctgcctctgcctcccaagtgctgggattaaaggtgtgtgctaccagtggacagctgttcccctagttttaaaacttgtgagtttgccattttcaaacagagcaggttctgcagttgctggtttgccattttcaaacagagcaggtctgcagttgctggttctgtgaagggtctagtgtgacttcagtgtcaggcagggagccagctcccagttgagggcagccatccagcctgcctctctcagtttgtttggagctgcgtcctggcaaggggcccctcatccctggcttgtttcaggactcgggagggcaggcacaacagcgggtgccagcgagatcaagcgggaggagaaagaggatgaggaaatcgcatcagtagccgacgccgaagaggacaagaaggacctgaaggtcccacgcacgcgcaccaggtgccaaaccccaccccttgggccatacacgcacacatcacatgttacacacatcacacgtgcacacagaccccgggaggccctgcaggccaccacatcacctcactgtctccctctggcccccggctcccctcccccatagcccagacgaggacgaggacgaccttctccccccagagcagaaggcggagcgggagaaggagcgccgggtggccaataatgcccgagagcgcctgcgggtccgcgacatcaatgaggcctttaaggagctcggccgcatgtgccagctgcacctcagcagcgagaagccgcagaccaaactgctcatcctgcaccaggccgtggccgtcatcctcagcctggagcagcaggtgcgaggtcagtgggcggcccgcgccccgcgcctccgcgatgctccttccctgctgcccaagccagagcagtgacagtccctcaccgaccagtccttgcacccctcctccagacaggaggttccctgcactcgctgctctctgaactgactgtccctgcccagtttgctacactgtggcactaatgaccagtcctgcctcatactgctgtccccactctgactgtccccatccactcttgactgtccctatccactctgtccccatccacattgactgtccccatctactctgtcaccatccacactgtctgtcaccatccacactgactgtccctatccacactgactgtccccatccacactgactgtccccatccacactgtctgtccccatctacactgactgtccctatccacactgactgtcctcactctgtccccatccatactgactgttcccatccatactgactgtccccaaccattctgactgtccccatctactctgtcaccatccacactgactgtcctcatcctcattacctaacatcacatccaccctcttccacaccagctgttcccaatgtcagctgtcccttgtacctactctgtctctgcactgtcccacaggttgtctttctgccggtcacactctaggtcgactgtccccgtccccccccacccccctgatctccttcatacctgctggccccagttctgactgactgacctccttcctgccttgctgatcctgggcctgcctctgacaggcctggagtctgccacactggcctcactggcctgaggacttcaaccctgacttttcccatccccaggctcttgctagcccagccccagccccagcccaaaggtgctagctggtgtctaagccaccattgttgttcaacttagaaggctccctaccccacagtagcttctccctgactcagtttccccatctaatggtgttaatccacctgacccggggctgatgagggaggacaacagctcggaccccactgcttccttaacctgcacttgccctggcctgcctgcctgcctttaaccctttctctcctgcagcatggtgtgatctgcacagccacccactctccccttgactccaaggtctctatggtggctgagtgcgcagcccaccctgtgactcccaagcccgtctatctgctgtctgtgtttcatgctgtcccctttaccctggctgtcccctggcttcgcttgccaccaccgcccctcacctcgcacctgctgccctttggacagggctgatcgcaccgtgacctaggggccttttgtcccataggccatgcagtttctaaagggaaggaaaaggccctctgggcacacagcctttggtgcccacatgcagtttggtctgtgcgcttgtcctgaggtctggggccactgccaccacctaggatctgataggttcaagggtggcctgagacaggagtagcgaggggcatggtgctgggcttcagctggatagcagaaggctcagcacaagagaggcctggctcagtctgcgaccacagacagtgacagcattacccttgagtttggtcatttggagtcactgtcatgagtgtccatcacagtggaggacataagtccctggacctatgagtcgaccctcctggcccagccagggtgactggctctggggtgtggggctcaggcccagctggggtgcaggacttgggcccaagtgctgtttgcgtccatgagctctggctcaggggccaagcttcagcttctgccttatatagggcagtacagccctgaatctattacccaagccatgagcagggacagcaagaaactagtcagcaaagacagggacaactgaggccccgctgccctctaaggctctgcctccctctgtacatgctgggagacagtgaggcctttgtccttcccagagtaaccacctggcctcccggagacatggtctaaggacacacatacaggcagatgcccataggggtgtgtcacctgcacaaggcacagttgtccacactgcagagctgctatcactgtgcacattggctgccacccacgacacccattacagcaccacaccactgccaccaagtcacccatgacaccctttctaccctcacacattacatacacatagcacgcagtggcccggcccccgctgacggaggctcggtgctgtgacccagcagtacagatgaggtgctgtccctggaggagaaggacctgagggaccgggagaggcgtatggccaataacgctcgggagcgggtgcgcgtgcgggacattaacgaggccttccgggagctgggccgcatgtgccagctgcacctcaagtcggataaggcgcagaccaagctgctcatcctgcagcaggcggtgcaggtcatcctgggcctggagcagcaggtgcgaggtaggctgcgcccgccccgtctgttccatcctgctggccagggcagcctcggcacagccccgcccctctctgaccccacctgaggaccgtctcccactgctctctccttccccactcccccagaacgcaacctgaaccccaaagcagcctgcttgaagcggagggaggaggagaaggtgtctggcgtggtcggggacccacagctggccctgtcagccgcccacccgggcctgggtgaggcccacaacccagccgggcacctgtgagccgtcacagcttcttcgttggaccagggaccaccatatctctgcccggggtgcatcaggacggttctggatgagacaggtctccatcgaagcatgagcagagagagggctctggggacacttcagggcctggggagggtggcactgaacagctccctgcttggccccagtgaccaagcagaaaagttccttcctctcggttaaccagaactggaaacaaagcagcatgctcccttttcaaaaaggaaagaaagatgccttaactatgtaagacggaagagtcggaccgtgccctggcagggcggcctgggactggcttctacttcagagccaccagcacatcgtgcctaagcatttttcgtttttttaaaggagaataaaggaacattagttttcagattttttttttaaatgtagacaaaagttagcaagaacgaggccttccgtgtcttttttttttcccttagcttttttttccgtatgttttgtaagcaacaaatttttgtataaaagtctcatgtctgtttctgtttctagaatttatcgtcatatttcatggtctacaaggttattaaagtagcattcaaaagacccagtgttgatctaagggtcacccctaccctgaggcctggcacaagatctagatgcttgccccttcctcttcccatgaacatgaacccaaggcctgtctgtgccaggcatgtgctccttggctaaaccatgccctcctcatgtgaagtgggccgtcctcatggtcctcaatacttgggtgtcatgcattaggggacctctaaagaaaagttgctagaataaggtgtgtgtgtgtgtgtgtgtgtaaggatattagaatggcttacaggccatgacctgggtattctcaacagcgacaaagcgactgtctccaagaatactgtagctattcagtgtgccagcagtcccaattcagtgctggagtcctgtaggattcctaggggatgctggtcttgggtctgcactggaatcctgaagaacagggttctgacaccagtgagggcaagcaggcaaaaagcaaaagcattctccttccatgccctcttatgtgggctaccaccggaaggtgtggcccaggtttagggggtcccagcacaagcgtcccctacaggtgtgcccagcaggttgggtgagttgattccagctgtaaagctgggtcagcagacacatcacacaagcctatgctcccacagctgcctcctacattctcatctgtacactggtccttgggtcccctcccaagtattgtccccttgtttcagatcccagtggcatcctagtctcttggtaggataatggtgagaccaccaggacacaccacaacactgttcatgcctgttccatgctgacctctgtccccacaagttacacttcctgaaacacctcaaaagcctctagtgaggaagattttgttcggaaccatggtaacgccttgttatggcaaataatctgtttaccactttggctcgggaacctgccacttctggaagccatgggaggaacagctggaatgaatacaagactgccttgccttatctctgctttagtggcaaacaggcaggagagtgtgggatcacccagacttcaggcttttgggaagcaattgacctgtcttgggcccaagtggctgtgagtccctatgcccgggggtgcatggccaccctctgacagtctccatctccctgatctagacttacagaagtgtagctacatctctatgaagttgggtcctcaggcaacttaccactgaggccctctgccttatgaccttttttaaggttgcactgtgtgtgtttggcctgtagcttgccatgctggcaaggctggtattaactcagctccaggtctgtcagtctccccagtcctaagcattaaacacgtggccaccatacccagctttgctttttttaaagtttatgggatgttttgtctgtatatttatctgtgcaccacgtgtgtgcaggctctgatgtcaaaagagggcatcagatctcccagaaatggagctacaaggggctgggtgctgccatgtgggtgctggaaaccaaacccaacatgaatgaacaggcagtgctcctagccgtacctgagacaggcttttggctgaacctggaggtgaccagagtagttcagcctttggatcccgtgtctgtcatcctatgttgacaggggttacaagtgtgggccaccacacatggtttatgtggtcctcatgctatatgacacacactttacccactgaactgtctcttcagcctgatatccttttgtgtcaaccagaggacatggtctcctgagggcaaagaattttccttgctccacaatcctaagggcatggaacccccaacctagtaataaggcccgcccctgatgtagcaactctgtggtctggttcttggctaaggtcagtggcataactgaacctacatacattgggcctgtggggtccagggctccgcagacacccatatgccagtcgctgaccattcaaaagtgaggctgaagtaacaagggacagaccttctatctaggctccttccggagggatgtgtatctgaggatgtgcccgccttctttctgccagtcaggggtgcagttagtgggttagctgagtagttaaaatgtgcctgttctgggagatcaggcaaagcagggacttaagcagagagggtaaccaatgagagtcagcctgtgcaccaaaggtgtcccattgcaaaaatccaagcaaatggaggttaagagggcacttgccatttgactggagtccctcagcgactcaccgacaacttcaaatgtattcaaaggtgtggcccaactcgagcctttccccttcagggtctgtgctcaagttcctctggtttaaattgatcaaagatagggctgtggctcagtgggacgaacgctcctctagcgtgtccaaggctctggggtccagtcccagcactccctgtctaccccaggcttacactttaggaggtggaggcaggagtctgaggaattcacggccagccctgaatataggagacccccatatcaaaaacacctaagtatgtgtattattaaagttattatcagattagtactacgtggtcaaagtcacacacactctccccaccccatccccggtgttccagtgtgcatggagctactgctgggatccactgcaaccacagaaccaggacagaagcggatcagtaacgtctttctctcctccccggaagtagatgtcaatgtcttcggcgccacccccggaaaaggtggagcgatcgccttcacgcatgcgctatacgtctgcacatgcgtagtgctccagggcagcggaacggggtgaccctgagtattgagaccctgcagcgatgctgagcaggtttctaggcccgcgctaccgggaactggccagaaactggtgaggaggtcacccgccattccaccgtgtgctctggggactggggaaacctgaggctgtaacaggcagagtattgcgggacacagtgcaggtggaagctccgaggttaagctgcaatcgccttcgttcggtgtctgaggtgctccaagcctgggtttccccagcttgacctgggtagccttgtgtgcggctctgggtgggtaccctggactcctacggctcggaactccgacgtgcagcctggcgacttgcagcctttggctttgattttgcagtctttcgtgtacttcgttttttcgtttaaacagtgtttttgtaaccccaagttggtctggaactcccaccaatcatcctgcctcacacttcttgaacgctagaatagcgggcacccaccctcacctgaatgttttctttgcatgcgtgtctgtgtaccgtatacgtgcccagtatccaggtaggcgagaagaggccatcggctcccctggtactagagctagaaatggttatgaagcatgtgggtgctggaaattgaacctgggatctctgggaaaagggccatcttctccagtttaatttttattaatagtttatttccaattatatgtatatgtgtgggtttgtgtgcgtgtagtacatagaaccggtactacacgcacaggtgccggaagtctccagaagatggtgctcagggtccatccacagcgccacacaggggttgtcacagcactgggggtagaggggtggggtggtggcaggcaagagccaggagtttatggccatcctctgatacatagtgaattccaggtcggggtagggtacattgaaccctgtctccatgaatgatgaatgaatgagtatagctataccatgactgacccttctgggtaggctgtatggtattagtggccgcagcggagggtggcatggatcagacagaagacacctgctgggaggccagggagagggctcacctgtgggagattccgtttgtgtgtgaggcttggaggtgacactctgggtgtcttagcaggggacagaggaggtaaggttctggcactgttgctcagtggctggtatcttggtgctctgtgtagttcagattcatgggctgtctacaaactgtccacatggtcccactgggcataaccaaacagagcagtatccacatggtcccactgggcataaccaaacagagcagcggatgaactttgcccccagtagcctggtcctgctgcccagggaagggtcttctgatgaatcagccccaactcccactcacctgagacaagaatctcactgacatccagtcctcggaagccaagtgccagctgtcacggtcacatatgcgatgtaacaggagtttacaagtttaccacagtatgttgcccatcgtgatagtgcatgcctgtaatccaaaggcttgggaggctgaggcaggaggatcacaggttctaggtgtgcttaagttgcatattgagtcttgtctcaaaaaactctaggcaaaaagtaataatggctgtgctgagagtcaaggactcaggcacagctcggccaagctcagccaggctcagttcccaacccgtgcctcgagcactctcctagttttactttcatgtaggtctcatggaaccggggcaggcttctaactctctctgtgaccagagatagccttgaactcatgaacgcacctggttcatgtgcttgggatggaagccagggcttcctgtgtgtcaggcaagctctctatccactgagcaacagccacagcctcccctccaccctggtttttatgtcatgtatgtgtgtgtgttgtattttatatgtcatgtctgtgtgtttgttggcaccagtgccagccacagtatgtgcatggaagtcagacagcagcttgaaagtgtgggttccctacgacctgggttccagtgaccatgacaggcttggtagcagggggccttttccctctgagctggcctcaaactccgagagagtgctggggttagggttatagtgtgagcactgtgcctggtgaccacgtttttatttttcaagtaggatctcagtctgtagcttgggctggttttgtctgtagttgttgttttgagacaagtttctctgtgtagtcctagctgtcttgaactcagacatcctcctcctgcctctgcctctcaagtgctggggttaaaggtgagtgctagcctgcctggcctgtgaatctggttttgaactcaaagcagccctcctgtctcagcctcccaagtctggtggtgggggttatgcaggacctcctgccctgcaaagtcgagggaatattgtgggcccttgactgacatcagcatgggatatgatgggagaaggttctcaaaggctaagttaccagcagagtctaacagcctcactctttcctaccaggattcccacagccggcatgtggggcactgtgggtgccgtgggactggtgtgggccacggactggcggctgatcctggactgggtgccttacatcaacggcaagtttaagaaggacgattaggcagcccctcccccaccacaggcctcgatggtgagtctgagtgttggcctgacttctatggattgggagttctggggtggcctggaccttaagcaggaattccttttgtcccttgccatcatctcttttgttccttgtatctcttggaatacattgcatgctgagggcatgcaacactgtgtccccatcaaaccacaccaaactggctattttgctaatgttggtagcttgttgcccagagtacagtcctatttagaccacctgacttgtgtatatgtgtgtatgtgcaagtatgtatgtgcacatgcacacatagggaggccagagactgagatgggagctttcctctgtctctactatctatcacctttaatcagagtctctcactgaaccagaaatgtgccactttggcttggtcctggctagccagcaccttcccagggtcagcctgtctcttgcggccttgtccctaaagtgctgggactataagtatatatagccatgcttagctttgatgtactactggagatttgaactcagttcctggtcctttcacagcaggctcttactggccatctctctagcttgtccactttgtgttttaaggttcatgtttgtgtgtgtgtttgggggctgtacctgcagtgctcacagaggccacaagggggcatctgacctgaagtctggtggttatgagctgctgtgtgtggttgctgggaactggacccaggtcacctctccagatccatccatacaggtctcttgttgaactggagctcctggattaggtagactggccagtgagcctcctgactttttgcatgtctgctggggggtggatggaactcatttcctacctacttattgctcctccaaccctctcactccatcttatagacaagggccttgtagtgtgacactgctggcatcactcccagagctcagaggccctgggctgcccgagctggttcagtgtgcttagcttactcaccctttgtcccctcccccaggtaccatgtgccgaggcctcagacacagcgtagtcctgtggaagacactgaggaagctggacactggagaggtctgcaccgctcagggagcttccatgttgacagacactagggctgccttgatgggtgcagcattaaaccttattcttatgccttggacgcctggctccttcctcatcatcttcctcaaggctttccgtgctcaagggaaattcgtctcagcccccagcacttgcacgtctgggagagtctttaacaagcagaaacccttacactacattcaagtgttttctgggtggaaactgcacattgttttctctcagctggtctgataaatcactcccagctttaatgcttttaaagtagtattcacggcccctattggccaccatacccagctagagcagggctccttccttcctggttttgtttgtttctaagacaagttcttatatagcccaggctggcctcacactcactatatagctaagtctgaccttagacttctcaacctcctgcccctgtctctcaagtgctcatgcagctgtccactgccatgcctggtgttcatggagccgaggatggcccctgggccttcttgcatgctaagtaagagctgtgccagatcagccacagccttttggtaaaactgctgtcaccaacccagcacatacatctcggtgcttcataacccagtatggtcagatttccagacagtgtgcactaagtgatttcttgtcttaagaaatcctgcgaagccgggcggtggtggctcacgcctttaatcccagtacttgggaggcagaggcaggtggatttctgagtttaaggccagcctggtctacagagttaagttccaggatagccagggctacacagagaaaccctgtcttgaaaaaaccaaaaaaaaaaaaaaaaaaaaaatcctgcatacgtctcttcccagcactctgggtgtcaagtcaaaacaaccaagagttccatccaggtcaccagcctaggctactgaagacctggtgtcaagacaaattaacaccacagaagaggctagagatatctcatatttcaggggttgtgaactcttgttctttcaatgacccaggttcgattcctgacacctagtgtctccagtcagtcccatatcctcttgaggccttcatgggcatcaggcacacatgatgaacagacaagacgtgtaagctaaatactcataagcataactctttccctaggcctggggtgcaagcctgacattccagctcctcaagatgctgaatgggagaaggtgaagtgagggctgctggagccacttagtgagtggagcctgtgacttgagggtggacaaccctgtcttcatgcttggaaggctgaggcagggtcaggagtggggtagcctggggcacacacagctgagtacaactcttgtgatctatctgattagggtttccactgctgtgaagagacaccatgaccaaggcaactcttataaggacaacatttaattggagctggcttacaggttcagaggttcagtccattatcatcaaggtcgaatgacagcatccaggcagttgtggtgcccgagaaggagctaagagttctacatcttgatcagaagtcagcttggagaagactgatttccaggcagctaggtggagggtctctcaaagcccacccctccagtgacactctccaacaaggccacacttcctaatagtgccactccttgggccaaccatattcaaaccaccacaccatcatacctgagcgcaagctctgacctattcacacagtaagataaactcaggaaagttgtcaagatcagaaacggctagggatggagctcctttagggtgtacaaggctcttggtccatctccagcacttcataactgtcaccccagctacatagcaaggttcaggacatcctgggccacttaaaaccccttattggtttaagaataaaaaagatggaaggagaaagacagttgagtaaccagcttggcaaacacgcgtgagagcctgaacttccttgcccggaggctgcatgtctgagacctcccttcctgccagcccagataaagcagtaagctacaagctgagagacccagtctggggaagttagatggttctggatggtaagaggcacagatttttaaaattcaaaaatagagaattgagaaccccagtgtcaattttctgctgccattctcacatgcaaaaatctgtcagacaccaagcctggcttaatcccagcacctgggaagcagggggcagaaggatctcggagttcaaggccagggaaagctacaaagtcagactctgactcaaaaatacaaaacactaatcccagcctccatgtccccctgaccttcttcactgtgatctgatctctcctcctgatctggggacccaaatcctagctcataaaatacagttcctgagctccaaaaattgcaggcaagacaaagatctttaaatgtgttgtgatttcacctcatgatcccttggcagctctccttgtcagggagggtcccctttcaaagagaggtcttccaggtactgtataatggaagcctgggtgagaaggtagttggccttcaggcatgttccctgggtaagtctggctgggcctgagtggcaaagcagccgacagtaccaagcaggagtaagtgaccccccagctccctgtcctcagggctgcggtagacaaggggcgatagtgcgagtgactccattcactaacttagaaaccagtttttggttttgttcttccttctgatgctggatctagtaaactccaagctggtcttgaagtgcttgatcctccttcctccactatcccagtgctgagatggcaagcacgtgccactattcctggcctgattttagggtattgctgtgtggcccaggctggccaggaatgttctaaataggttcgtgagccatcaaactcaggctggggtgcagcctaacggcagaaagtctaccacgtgtaaggttctgctttctattttcagtactgctgcaaagaacaaacttcttaaatagttcttggtgaagccgggagtggtggtgcatttctgtcctcgcagtaacgcaatagaggctggggctggaacagccgagaggccagaacgaaacgcagagggaagcaggactgcgtcgaaggccccgagttgtactcgatctttttcacaaagcccaggcgggtccctgacaaacgcacactgcgcaggtgcagcccagcgcgaccccaggaccaggacggcagctcgggcgaaactgctccagcttggtacagaccaggtgcagcacacactgtgcttccggagtctagagcgcaaacgcaatggttgtcccaccccggccacgctgattggctgtccttgtctcagagcagatttatatgagaagttaagcacagaacgaggttctgagcgctgattggtctccatgccctgtgggcgtctcccgcaaggcgggacgtagccaactgtgcattttaagccgaggagctgaagtgatctgattggcttcacagccttggggcgggtcttgaaggcaagcgaaggctgggtcggggccgcggctgcgcagagagtctggacggcagtcagactggtcctgcgagcgcgaaggggcggggccgactccacgcctgcgcagacgagccccacgcgcgggcgggtgggcggagcggcccccctagcgggggctgtgaagcgcggggagggggccgagcgggtggcgaagccggcgcgcgcccggctgggggcggagggcggaggcccgtgggacagaacagctgcggcgagtggcggcggcggagggagccgaatcggcgacgagcccgggggtcgcaacttgcagaagcggcggcggcggcggcatcggccacggcgggcggaaaagccggggcgcaatggagcggaagaggtgggagtgcccggcgctcccgcagggctgggaaagggaagaagtgcccaggaggtcggggctgtcggccggccacagggatgtcttttactataggtgaatgagcgcgccggccgcgcagggccccaacgggcgcctcccagcggcctctgcggcggcctgggcgccccgactgcgggccgcggtctgggccgggcgacgtgcgtccgagcgtgcgtccgagcgtgcgtcctacgtgccagctgtggtcagtgcgcacgcgccggccatggctcgcctcagcgcgcatgcgttgaacccagtgccttgccttttgctgatccgcgccacccagcgctgctgtgagtgcgcgtgcgccacgcctgcagccaaggcttcagcctcgtggcttttagcccgcctgtggcgcgggcttttgtcctccaaggaatcggggaccgtgcgcgccgtgcgaggggcgcccgggccttggccagacgccgctgggaagcgggggtgggagggggatgggctgaccctttgaccctcgcggggactttatcatggtttcgggaagcaagggaactgccccaggtggcctgatcccctcacctgcataaatttgggtttggcttcttgttcagcaaaatgtcccccatttttatggcgtttccaaagcccttgctcttcttgagcggtggccccaaatgtaacatcacagtggcttctgactaatgtgaatgtggtttttgtgtgcaagacttttttatgaataagtctgctctttaaaaaatattttaaattttttatttatttaatgcatgagtgctctgcctgcttgaagagagagcatcagatcacccaatagaaggttgtgagccaccatgtggttgctagcaattgaactcatgacctcttagccaactctccagccttttttttttttttttttttttttttttgaggcagcgtctacatagaccatatttgcaaccttttaatcagggcagtgaaagctgtctatctgaataatagccaggcaacctacacctgctgttcttccccagttctatccccagtggtgtgaatagaatcctgggccgcatgcatgctgccctacggctggagcatctacctttttagccgactgtagttgtccctactccactgcacccggaattgggtggtgcattgtgagttgaactgcctggccctttggtcttaaggagtcgtgggttttggcagtaaggttggaagccagggctaacttgggttcctttcagactgcaaagagggatggggttgttgcttctaataggtctgcagtaggtagggtttttcccagtagggctacatgcaaatggtgccctgtgtgcatgggacttcctccccttctcccttacttgcaatggggccaacacctctgagagatgatccaaagacaccttgtccccaagctgtacctgtcccacttgtctcatcccccacagctgctagctcacatccatgccccagaatagccaccagtgctttccaacgcatttgtatagacagtctcttcttcacggactcctcccacataccttggaaacacttagggctggagagttaggatgtcagccctgggtgtactatgggcctatcgctggatgagggcagctcaaactgtcccactcagcaagctgttgggcacactccatgtgcacacagacctacagagccgagctccttaggccctgcacagaagtgctgtccccaccccagcagccaacagccttgtgactcgggttggttttacctttttattggtcttgctgtgtagcccaggctggcctggaacttgtggctcctccttcctctgcttttgctgcaagaggggcatatgccattgttcctgtttaatagggttttgttagggtgatcaacctgcatgccagagtcacttgttaggaggtggaggggttttaccatgttctaactggtggaggccctgtcagattggattttagaatatttatcttttaaaaggaggcccaggggctctggctggggcttagtgagtagaacatgtgcctagcgctcagcccagtcccagccacatgaaccaggtttccctgtgcctgtcaccagtgcattgagacggtggggacgggatgaccaggaattcagtcatcctcagctacagcaacctggttaacaagagacggttgggggagggcggtcctttgccttcactgccccatgctctccccactccctgagcagcttccagtcccagtcaagtgtccagtaggggtccatgccgaagcttgggacagcatgtgggctgcggtgcctcgtcctagtgccccatctcagctgttgaggagatcagggagcagccttctgggccgcagaccagcaacaccccaagccttgcccagctattttttgtttgtttggtttggtttggttttttgagcagggtttctctgtgtagccctggctatcctggaactcactctgtagaccaggctggcctcgaactcagaaatcggcctgcctctgcctcctgagtgctgggattaaacaactgcccagctggctagctgttttctatgtggttctcacattagggaatctgaggcacctgggacatgcactgcccatgctttctccccatctctgagcagctgccagtcccagtcatggattcaggcggggtaccatcccagaggttccaactctaaccactaatgccagaacatttcacctcagccccctcaaatctacttcatgttctggggcattccctatccatgcagccccacacataccgtggccttttacaccccgctgaatttctcttgagtatcttcaaggcctttgagttttaatatatcagagcctttttcttcctggttgagtaatactccatgacagggcagaactccttactggccatctgggaccacacaggctgcccccctttttgggtctgaatgttcagcatagggtggtgtgatccagttttcagatggcctagaatgtggctggagctgcttgaggggttatcagacctatgcaacctcccatgcatacactcctgagactcaccatagcctataagtagaacgtgtttgtactcacatgccttcccacacttgggaggttatggtaacattgactatgacaagttgaagactggcctgaagtacatgaaccacggtctcactcagttgataagtgctgtcaggcagctgtgaagctttgagtcctacctctagtaacacttggtggtggccatgcaggagcttgaaggaagatgggcaattcttggctagtgagttttgagaccagtctgggataacatgagatgtatcctccaaactaaatagatgcagccctatagcccaatagataagtgatccctggaaagcaagaactggtttctagcctaggtacccgagaggtacaggcccccatacctcatagggcctccttaggcttcccagatgaactgtagccacctagctcaaggcttgactgctagggctgctcttcccacgtgccttcctaatgacctggtgaaaacaggcatggagaacagtggtggtgggtaggagatgggtcctgctcgggctgaccagcctcccgtccgcagccccagcgggaagaagttccgcagcaagccacaactggcacgttacctgggcggatccatggacctcagcaccttcgacttccgcaccggaaagatgttgatgaacaagatgaataagagtcgccagcgtgtgcgctatgattcttccaaccaggtcaaggtgagggtgatgacgtcagggtaggggtgggccctctgggttagcgtctatcgccatcgagtcagtacctctgctggcggaagcatggcgcgcatttggtttggtgggtgggagatctccgtgcctgatcgcccacccgccaccattcaggctctggctaagcacctccctggcccctccaaccctccatggaccccggtcggagcggcccgctgcagagtcttctccccccagggcaagcctgacctgaacaccgcgctgcctgtacggcagactgcatccatcttcaagcaaccggtgaccaagatcaccaaccaccccagcaacaaggtcaagagcgacccgcagaaggcagtggaccagccgaggcaggtgagcccccgggcagtttccaggtgtcaaagaggcctcatcttcatactaaatctcgcgctttaagggtggaagaaaccattgccttgcacaacataggccagtgttgccccggtgctacatccctacaaagattaaaatatgtatcttttcttgtgaagaatttactcttagaaaatagagggccctgcacttacctctgaggaaggagagtcatgaattgcagattttaaccttggtttttttttgttttgttttttaaatcaacaaagcactgcttcttctgtgtttttctgacctatttgtaaacatcctctggaccctgggggctgttgctaggtgggaggggtcacagggcagggccccaacaccttcgcttcctgtaaccttgcacttctgcgctacagcttttctgggagaagaagctaagtggattgagtgcctttgacattgcagaagaactggtcaggaccatggacttgcccaagggcctgcagggtgagcaggggtgcgtggcggctgcctctggatttagtaaagtgggtggatgccctgactggggcctctcttttttaaaaagtgtgcttatgtgtgtgtgtgtgtgcgtgcgcgcatatgtgtgcttgtgtgtgtgctcaaatcactgcagtgcaccagtgtgagtttatttttaccctgtgcgtacaggtgccagtggaggccaggggtaacaggtaccctgcaagtagacttacagggagttgtgagccctctggcctggttctgggaagcacttccaggtcctgtagtaggatgtatggcactagtgaccattctcatgctagttgtctccacagttacaagcttgtgccaccatgccaggcataggtgggtctctggattggctccttatcttctggctgacgaagacttgcctgggatggggtcataacttccaggtagagccctaggcccaagggttcctctgaccctgcccactctcatattccacaggagtgggccctggctgtacagatgagacgctgctgtcagccattgcgagtgctctacacaccagcaccctgcccattacaggccagctctctgcagccgtggagaagaaccctggtgtgtggctgaacactgcacagccactgtgcaaagccttcatggtgacagatgacgacatcaggtaactggcagctctgcccccaccccaatatctccacagttagcacaagaatgtagggcatgccagcaactacccggcccctcaggagtggtctgtgagtgaaggcaatttagatgcccgacaggcacgcttagaaatgctgggttggggaaatagcagtgagaaagcatggcttccacaggcctgggggagctgcacacagagcagaagatgggtggggccaaactgagtgagtgacagccctcaggagtgtggggggggggggatggtggaccaggaagaaggcagcttaaactacctctgagctgcagtctggaccctcggggctagcctgaatttcccttgtcagacttggtgatcaggccagatggggacagggcaggacccagaattaggttctagatgcacagtcgaggctctccttgctatgtgagcatggcccgtagctggtcttactctgccttcccatagcttgcatgtaaaaaagtcagaatgtaaggagaccatggtcacccaaggtgacagagaagctgtgtggagtttctgaaaggggctgtggtgatgcgcttgtggactggtccctgtgtgccctgtcagagtgtgttctcctaggaagcaggaggagctggtacagcaggtacggaagcgcctggaggaggcactgatggccgacatgctagctcatgtggaggagcttgcccgagacggggaggcaccactggacaaggcctgtgcagaggaggaagaggaggaggaagaggaggaggaagagccggagccagagcgagtgtagcacaggtgctgcaggccagggtgggatgtcagcccatcccctagccgggctgctaacagcttcccttcctgcctattgcaggtgccctgcccaagtctggg

SEQ ID NO: 1261 - DNA, 552 bp, Mus musculus
gctgagcaggtttctaggcccgcgctaccgggaactggccagaaactggtgaggaggtcacccgccattccaccgtgtgctctggggactggggaaacctgaggctgtaacaggcagagtattgcgggacacagtgcaggtggaagctccgaggttaagctgcaatcgccttcgttcggtgtctgaggtgctccaagcctgggtttccccagcttgacctgggtagccttgtgtgcggctctgggattcccacagccggcatgtggggcactgtgggtgccgtgggactggtgtgggccacggactggcggctgatcctggactgggtgccttacatcaacggcaagtttaagaaggacgattaggcagcccctcccccaccacaggcctcgatggtaccatgtgccgaggcctcagacacagcgtagtcctgtggaagacactgaggaagctggacactggagaggtctgcaccgctcagggagcttccatgttgacagacactagggctgccttgatgggtgcagcattaaaccttattcttatgccttg

SEQ ID NO: 1262 - protein, 34 aa, Mus musculus
MWGTVGAVGLVWATDWRLILDWVPYINGKFKKDD

SEQ ID NO: 1263 - DNA, 444 bp, Mus musculus
cttcacgcatgcgctatacgtctgcacatgcgtagtgctccagggcagcggaacggggtgaccctgagtattgagaccctgcagcgatgctgagcaggtttctaggcccgcgctaccgggaactggccagaaactggattcccacagccggcatgtggggcactgtgggtgccgtgggactggtgtgggccacggactggcggctgatcctggactgggtgccttacatcaacggcaagtttaagaaggacgattaggcagcccctcccccaccacaggcctcgatggtaccatgtgccgaggcctcagacacagcgtagtcctgtggaagacactgaggaagctggacactggagaggtctgcaccgctcagggagcttccatgttgacagacactagggctgccttgatgggtgcagcattaaaccttattcttatgccttg

SEQ ID NO: 1264 - protein, 56 aa, Mus musculus
MLSRFLGPRYRELARNWIPTAGMWGTVGAVGLVWATDWRLILDWVPYINGKFKKDD

SEQ ID NO: 1265 - DNA, 28309 bp, Homo sapiens
gagcgccgggtggccaataacgcccgggagcggctgcgggtccgtgacatcaacgaggcctttaaggagctggggcgcatgtgccaactgcacctcaacagcgagaagccccagaccaaactgctcatcctgcaccaggctgtctcggtcatcctgaacttggagcagcaagtgcgaggtcagtgggggcgcgggccaccagcgtccctgcagcgccaccctccctcgtgttcctgccctcgttctccttccccgcccgccttcctggagccagccctccctctgcagcagttgcctccttgcagtgactgtgcccttcacccctctgaccgcattgccatgactgtccactcctgactgccagcccttctccctgcctgcctcagcatcccctccacagtgggaggactggactctttctggacccctagtccttcaggcctgggctctgtggctcagaactgtatctcccagctccacggggctcccactcgccgtggtcctcctttcttgggaagcccagaacccagctcacagaggccagtgtcccccgatcccagagacaggagctggtgtgcaaaccaccctggccccttcccgtcaggcagatgccacgcaaggccacatgagcccatcccctgtctctgactcagtttccctatctgaaggtgatagggaaacttcctatcacccccatttcccagggccagggggaggaaggatacagacagaccctgtccccacccgcagatgtgagctgactccttccccccgctggcgctggcggctgcttccttaactccttcctttcctcgcctgcaccccgttaaccctttctctcctgcagcactgttgctgggaccggagccagagccccggcccggcccacacgctatcccctcagctctaaggtttccgagtctctgcagccgtgtgtggcacgcctcgcgccccccaagcccgcctctctgctgtctgccttccgccctcccctccatcccgcccgtccgtccctctgcttcccgtggcagcccctcctcacctcgcacttgctgcccgagcaccgggagcggctgggctgcaacctcagggcgtttcctcccccaaagccccccgtcagggcttgcgggaagaaaccagacccgggagcacgcagcccctggtcctgtcagtttggtctgtgcgcttgtcctgggctccaggggccgcccccaccacctggagggatcccctcaggcccctaaggcagggtgggcaggcaagtgggtgaggcagccccctagagactaagacagggcaccaggcatgctgggcactgggccagaccttcacccatttcatcttcaccacaacctagagcagtgggtgccctgatggggaccggcatccattctaccaagtaggaagccagggaacagagcgaggtcacccatgcagggccatgcagcacagaggcctgggccgggacccgcacccctgcggcagcagcaacagtgcccgctcgccagctgcatgctgctcggctggagagggggctcagccttgggcctggcacagaacaggctcttggaacctcagagctcctactgcgaccattcacggtggcagtgacaatggggttcctggaggcctagggagctggccttcccagccaggggcaggagctcagggagggctcatcttggggcagccggagttcactgtaggggacgggtgcatttctgaggctcctccccagggtgtgggggtctcgggggatgggagctggtttgctccatgtgagccctgatttgagtcctggactccccagtcccgggtttttggagtggcccaggtatttgcctgctgagcccgtgtcttcaaggcctcctctgtccacagtgagtctggccaggcctagctgtccatcaccccgcaagtggctgctctgagcagggaaagtcatcatcttgggagggaagaacaaagagaggagcaggcactgggcctcccctgcccccagccctgccctggggcccacagagtgagcagggtcaagggagaagcagttaccctgtgggctcccagacggggaagcagggccccatctccctccacagaaacgtctgggaacagtcagaccttgggtcttcctgggtgtgaccacatccacagcctcccctagagctgagtctgagggcacttgcacctgggcagccagtcgcgtacacacacaggcgccccaccatggggctctgctgcattccagggagcacattcgccgcgtgcacagagaagcacattttcacgcatgtgacaacacacacatcagcatgtggacccgtactgctgcccacaccaacaccagccgtgtacccccactgctgtccacacccacaccagccatgtacctgcattgctgtgcccgacaccagccgtgtacctacactgcagtgcctgacaccagctgtgtaactgcactgctgcccacagcagcaccagccatgtacccacattgctgtgcccagcaacgtaagctgtgtacccgcactgctgcccacaccagccgtgtacccccactgctgtccacacccacaccagccatgtacctgcattgctgtgcccgacaccagccgtgtacctgcactgcagtgcctgacaccagctgtgtaactgcactgctgcccacaccaacaccagccgtgtacccacactgctgtgtccaccaacgtaagccgtgtacccgcactgctgcccacacccacaccagccgtgtacccgcactgctgcccacaccaacaccagccgtgtacctgcactgctgcccacaccaacaccagccgtgtacccacactgctgtgcccaccaatgtaagccatgtacctgcactgctgcccacactgctgtgcccaccaacaccagccgtgtacccacactgctgcccacaccagcacaaacacaagtagctggataccctctccacaacccagccctgccctcccacccagccttggcgcatcactaacagaggcctcggtgctgtgacccagcagtacggacgaggtgctgtccctggaggagaaagacctgagggaccgggagaggcgcatggccaataacgcgcgggagcgggtgcgcgtgcgggatattaacgaggccttccgggagctggggcgcatgtgccagatgcacctcaagtcggacaaagcgcagaccaagctgctcatcctgcagcaggccgtgcaggtcatcctggggctggagcagcaggtgcgaggtaggctccccggccagggctgccccagcaccctctcccttccccacacccaggtgcagatgctggggtcctcctgtgcttgccgcccccggactctgtccatgtctgtctttgtggctggactcagacccagtgatgttccccagacaccccctgatacccactctcttctttacaagcctccaccccatccccccagccttctcaaggaaggaggtgagagccggaaatacaggaggccacacgtgatggggctctgcccccacccccccccccgacatcctaccccccactcccacctcacatctttctcctccctgggaccgtctcccacagagctctcccccctccctccagagcggaacctgaatcccaaagcagcctgtttgaaacggcgagaagaggaaaaggtgtcaggtgtggttggagacccccagatggtgctttcagctccccacccaggcctgagcgaagcccacaaccccgccgggcacatgtgaaaggtatgcctccgtgggacgagccacccgctttcagccctgtgctctggccccagaacggccactcgagaccccgggcttcatccacatccacacctcacacacctgttgtcagcatcgagccaacaccaacctgacaaggttcggagtgatgggggcggccaaggtgacactgggtccaggagctccctggggccctggcctaccactcactggcctcgctccccctgtccccgaatctcagccaccgtgtcactctgtgacctgtcccatggatcctgaaactgcatcttggccctgttgcctgggctgacaggagcattttttttttttccagtaaacaaaacctgaaagcaagcaacaaaacatacactttgtcagagaagaaaaaaatgccttaactataaaaagcggagaaatggaaacatatcactcaagggggatgctgtggaaacctggcttattcttctaaagccaccagcaaattgtgcctaagcgaaatattttttttaaggaaaataaaaacattagttacaagattttttttttcttaatgtagatgaaaattagcaaggatgctgcctttggtctctggtttttttaagctttttttgcatatgttttgtaagcaacaaatttttttgtataaaagtcccgtgtctctcgctatttctgctgctgttcctagactgagcattgcatttcttgatcaaccagatgattaaacgttgtattaaaaagaccccgtgtaaacctgagcccccccgtccccccccccccccggaagccactgcacacagacagaacggggacaggcggcgggtcttttgtttttttgatgttgggggttctcttggttttgtcatgtggaaagtgatgcgtgggcgttccctgatgaaggcaccttggggcttccctgccgcatcctctcccctcaggaaggggactgacctgggcttgggggaagggacgtcagcaaggtggctctgaccctcccaggtgactctgccaagcagctgtggcccccagggctaccctacacaacgccctccccaggcccccctaagctgctctcccttggaacctgcacagctctctgaaatggggcattttgttgggaccagtgacccctggcatggggaccacaccctggagcccggtgctggggacctcctggacaccctgtccttcactcctttgccccagggacccaggctcatgctctgaactctggctgagaggatgctgctcaggagccagcacaggacaccccccaccccaccccaccatgtccccattacaccagagggccatcgtgacgtagacaggatgccaggggcctggccagcctcccccaatgctggggagcatccctgggcctggggccacacctgctgccctccctctgtgtggtccaagggcaagagtggctggagccgggggactgtgctggtctgagccccacgaaggccttgggctgtgcgtccgaccctgctgcagaaccagcagggtgtcccctcgggcccatctgtgtcccatgtcccagcacccaggcctctctccaggtctccttttctggtcttttgccatgagggtaaccagctcttcccagctggctggggactgtcttgggtttaaaactgcaagtctcctaccctgggatcccatccagttccacacgaactagggcagtggtcactgtggcacccaggtgtgggcctggctagctgggggccttcatgtgcccttcatgcccctccctgcattgaggccttgtggacccctgggctggctgtgttcatccccgctgcaggtcgggcgtctccccccgtgccactcctgagactcccaccgttacccccaggagatcctggactgcctgactcccctccccagactggcttgggagcctgggccccatggtagatgcaagggaaacctcaaggccagctcaatgcctggtatctgcccccagtccaggccaggcggaggggaggggctgtccggctgcctctcccttctcggtggcttcccctacgccctgggagtttgatctcttaagggaacttgcctctccctcttgttttgctcctggccctgcccctaggtctgggtgggcagtggccccatagcctctggaactgtgcgttctgcatagaattcaaacgagattcacccagcgcgaggaggaagaaacagcagttcctgggaaccacaattatggggggtggggggtgtgatctgagtgcctcaagatggttttcaaaaaaatttttttaaagaaaataattgtatacgtgtcaacacagctggctggatgattgggactttaaaacgaccctctttcaggtggattcagagacctgtcctgtatataacagcactgtagcaataaacgtgacattttataacgatgccctgcagtccccgggttctttctggtgtcacatgtttaggaagggaagtgggggggggccctgacgttcacctcgggtgcagcaaggaccgtggtccaccctgtgcactgggcttcctcgaagcgactcctcactctgaggagcccatggctcccagggcggctgggaacctgcatgtgtactcagggctccaggccacctggaagcaggattggctcccggggaaaagcagctccctgggggctgcacttgggcgcgtaggaaccatccaggacctgcggtcctcccagcccccatctgggagggctccccatctcccaacgtcccccccccgggctgttggaacccacttccctgccccttcctgctccgaagtcggctcgaagtctgagtctgtcactgctcctctgaaaccttccacggctccgttgctggcagcgtcaaccccacactccttagtgcggcatctgtgacttcctccacaaccggatgcccacggaacccacggacagagctctcggggggaaggggtgtggcaggacctgtgggggcgctgctcatcccaaagtgcccactggcaggcatctgctgctgtgcccagggacttggccgctgcatctctgcgaggacacagctggactgccctgctcccctacagggttggggtggaaggagtgccttcctggccacttgacggggggtggcccccaggagagagccctttggcacacaagtgccttagggaggagaaggctcagcacagtgactcatatctgtaatcccagcacttcaggtggctgaggcgggaggatcgcctgaggccaggagttccagtccagcctgggcaacatagtgagaccccatgtctataatttttaagggaaagagagtggccaggagttgacagaaggtgctgagggagccctgtccaccactctacccagctggcctctaaattcatgctggaaaacaacttttaaaatatacattggccgggcgcggtggctaacgcctgtcatcccagcactttgggaggctgtggcgggtggatcacttgaggtcaggagttcgagaccggcctggccaacatggcgaaatcccatctctactaaaaatacaaaaattagccgggcatggtggcgcaagcctgtaatcccagctatttgggaggctgaggcaggagaatagcttgaacccaggaggcagggattgcagtgagctgagattgcaccactgcactctagcctgggcgacagagcgagactgtctcaaaaaatcaaaattaaattggttgtacctggtgacacacacttgtagtcccagctacttaggaggttcaggtgggaggatcgcttgaggtggcagtgaactgtgattgcaccactgcactccagcctgggcaacagagccagaacctgtcaaaaaaaaagggtgggccaggtgcagtggctcatgcctgtaatcccagcactttgggaggccaaggcgggcggatcacgaggtcaggagatcgagaccatcctggctaacggtgaaaccccatctctactaaaaatacaaaaaattagccaggcgtggtggcgggcacctgtagtcccagctactcggtaggctgaggcaggagaatggcgtgaacctgggaggcggagcttgcagtgagccaagatcataccactacactccagcctgcagcctgggcgacagcaagactccgtttcaaaaaaaaagggtggaggggacatccagatggtccaacaaaataacaaaaaccggctcaagaaacaaaaaggaagttctatgtcatgttgaatggcttcaggcacagctggatccaggtgtcattacaaatctctctccatctctcagctcttgtttatgtcactgtctctgatgaactcttttttttgtctgtttgttttgagacggagtttcactcttgttgcccaggctgcagtgcaatggcgtgatctcggctcaccgcaacctctgcctcccgggttttcaagcaattttcctgcctcagcctcccgagtagctggaattacaggcatccgtcaccatgtccggttaattttgtatttttagtagagatggggtttctccatgttggtcacgctggtctcgaactcccagtctcaggtgatctgcccgcctcaacctcccaaagtgctgggattataggcgtgagccaccgtgcccggccactggtgaactcttacattgtggcatctggaaactctgggctgacattccagcagcccttgtgttcctgtcctttctcttaatagtctctgtgtcagcccctgcatcccacttttttaagtttccaccaatgggaagagtcttattcaggtgctctctgatcccaagctcaaaaaccccaagccaactggaaagttctacaaacaatgcccagggccgggcccggtggcttacacctgtaatcccagcattttgggaggcggatcacttgaggtcaggaattcaagacaagcctggccaacatggccaaaccccatctctactaaaaatacaaaaactagccaggtgtggtggctcacgcctgtagtcccagctacttgggaggctgaggcaggagaagcttgaacccgggaagcggaggttgcagtgagccgagatcgtgtcattgcactccagcctgggccacagagcgagactccgtctcaaaaaaaaaaagaaagaaaaacagtgcccagactgtggtgtccaaaacctatttccggctcccaccctgagtccttaaccagggatagggatgggttagcacccgcagtccccagagagctgcaggcttggggtgtactgaggggctgaccccaggaggacaggccaggctgggcagaagaacccacggtgtccattccttatcacgaggcctgcaagtgacgctggcgcccgagagacaaatcacgcccagtgccccgtctaggctatggcctttccgttcatgctgtaaaggtgcctgtgggtcaggcagtccaggagggcttcctgagggaggcaactcttgaatatgggggaaaaggcacaaaagtgcaatggcggtgtctgggaatatgcccctcttccttctgcccacaccggcccggtgtgcaggggggaggctggaagctgggagctgagtgagcatgtacggtgctgcgccgggttgtgggagagcagaggaagcagggactggagaaaggcgagcccaagcgagcctggtgcggtggaaagcaggaggcagaaagacctgcctgtcatcagctaagagcatccagagacgttcaccgagcaaggagccaggccaccctctgctgccggaatgaggaataacccaggctcgcaaacggaatcctgcaaagagatttccgacagggcctccaagcaacgggcaacgctgaggctcagggaagcactgccgctcgaccaaagtcctacagcgaatcaggaacaacgcctgacgcctccaaaagtgggctccaatcccagctcttcccctctgtgtgactctgagcaagacccttccccgctggacctcagtttccttcattgtaaataacgttctggcacatactaggcgcacaaaatcactggcaggtagccccgcggagcccagaagcacaatcggccgccagaccacgtggccagaaagcaccgccctaacgccgcccactccggaccacttctccgcggtcgtccaaccctcgccggaagttactgtaagtggcttccgggtctgcgcgcacagtggcggatgatgtttttttttccttcccccccccccgccctccccgcgcgcgtgcgcgccgcggccgcgcctgcgcagtgtagccgggtcagctggacagggtcatcctgagggtgcgactccgccgcgatggtgacccggttcctgggcccacgctaccgggagctggtcaagaactggtgaggacgccgacccgcggccccatccgcgctcccgcctcggcccagccccgcgccgctgcgttccgtatttgtgcgcgtttccgggggccgggccgggccgggcccaggtcccttgttgttcccggtgacagagggggaaactgaggccgagaggcggagcggcgcgtcccggcgtgaacgggacgtgacggacccaaggccaaaccccagcatgcccggctccgcggctaggccgctccaagcctcagtttccccatctctaccgggggatccgaatggtgaccccctggacggaagcgcccagaaggtgccgagtcccgatccccagcccagcactcgcggcatcttcggcctttgccactattttggtttttatgatttttaacaaggagcgtgaaagcttcagctgcgcctgagcccacgtgggcagcgggacggcataggggtggcccccatagaagccgggctgggggtggcctccgtagggttgtctggtgtttccacgtggggtgctaagaagcaaggcctggctgggtgcggtggctcccgcctgtgatcccagcgctttgtgaggccgaggcaggtggatcacctgaggtcaggagttcgagaccagcctggccaacgtggtgaaacccgcgtctctactaaaaatgcaaaaattagccaggcgtggtggcgggtgcctctaatcccagctactcgggaggctgaggaaggagaatcgcttgaacccgggaggaggaggttgcagtgagctgagattgcgccattgcactccagcctgggtgacagaatgagactgtgtcccaaaaagagaaaagaaaaaaaaagcagcaaggtcttagccgggtgcagtggctccggcctgtgatcccagtgctttgggaggcccaggcaggagaatcacttgagcctgggagttcaagaccatcctggacaacacaatgaaaccccatctctacaaaacaaaaaattatcagggcatggtggcacctgtctgtagtcccagctactggggaggctaaggtgggaggatcgtttgagcctgggaatttgagaccagcctgggcaacacagcaagaccttatctctacaaaaaaatttagagctgctgggcgcagtgactcacgcctgtaatcccaacactttgggaggccaaggcgggcgaatcacccgaggtcaggagtttgagaccaacctgaccaacatggagaaaccccgtctctactgaaaatacaaaattagccaagtatggtggcgcgtgcctgtaatcccagctacttgggaggctgaggcaggagaatcgctcaaacccgggaggtggaggttgtggtgagctgagattgtgccattgcattccagcctgggcaacaagagcgaaactccgtttctaaaaaagaaaaaagcaaaggcttatgattggcagtgtctccggaagccagaacatacttcctctatcccagactgggggacaggtcggggacagggtctgcacggtggagctgactgggaccttcaagtggaatgtgatggtgccggtggcgttttacagcgtgggtaactcaggcctgggatgaggaagcctgctcctagctgagaacccagtggcccatggtagccagtgcagcccctcccgggtgcagcaggtctgcttcttctgtgttcagtcacagcggggaccacccgtcatccgtgctttcatccaacagcaagcatttatttatttatttattcatttatttatttagagacggagtcttgctctgtcgccccggctggagtgcagtggcgcaatctcggctcactgcaagctccgcctcccgggttcacgccattctcctgcctcagcctcccataagtagctgggactacaggcgcccgccaccacgcccggctaattttttttgtattttttagtggagatggggtttcaccgtgttagccaggatggtcacgatcttctgacctcgtgatccacctgcctcggcctcccaaagttctgggattacaggcatgagccactgcgcccagcccaacatttattgagcacctactatgtgttagggacgcgccaatagaccgaacccttgtgggcggacattctggttggtgggcaaggaaaggtaaagaaacgagacctgtggtgtggggctgacctaaaataacgaagcgggagaggaaggggtgcagacacgtgcgtgcgaggggccgtgcagggctgtgccaccaggcagtggctttgggaggctagggagcgggtctcatccccaggaggcactgtggggttgtgtctcagagtctcagacttaggactgagagggccacagttcaccagctggggaccctgcagtccacaccccttctaggccctgctggggcttgctttgaggaaggggttgtcgtggcgacgaggtcgttggtcagtgtggtcatggtctgtacgtccttcctcagtggctagtggaaatcaggttttgtgggctcttcccacactgtccaaatccacagggtcctacatggggtgaccaggatgataggggaggcggaggccggcccactgggcatatttatgagcaggcttctctggtgattaataacccagggctgggcgcagtggctcacgcgtgtaatcccagaaccttgagaggctgaggtgggtggatcccttgaggtcaggagttcgagaagagcctggccaacaaggtgaaaccctgtctctactaaaaatacaaaaattagtcgggcgcggtagtggacacctgtaatcccagcttcatgggaggctgagacaagagaatcacttgaacctgggaggcgggggttgccgtgagctgagattgcgtcattgcactccagcctgggtgacagagcgagattctatctcaaaataaataataaataaataaataaataaataacttatccagaatgccatcaagacaacacgtgcgaagattcctgccctgttggtggcatctgcctccgagccaggttccaggagcagctgtgcgtgcccccagctggtgagcgggcacctggcctacacttggagagtctctggtgaggccccttggggcaatgtgggcagggtttcttcatccgcctccaggaggagcaccccctaccgccccaacatcccagctgtgtgatttgctgtgatccagggaggtgaatcggatttttttttttcttccgagacagagtctcactgtcgcccaagctagagtgcagtggcacgatctcggctcactgcaacctcgacctacagagttcaagtgattctcctgcctcagcctccccagtagctgggactacaggtgcgcaccaccacaccgggctagtttttatatttttagtagagatgaggtttcaccatgttggccaggctggtctagaattcctgacctcaggtgatccacccgcctcggcctccggaagtgctgggattacaggtgtgaaccgccgcaccccgcccggaattggattttaatttcagccctctgttggccagcagtgggacctgcaattgttatctagtgctgtgtgcataagaaatggtctcccaaaattagccgcttaaactagcaaatgctgcttatctcacagtttcagtgggtgcactgagtcaactcctcaggctctcttgtgaggctgcagtctcatccgagggtgtgaccaggcagatccgtttccacgatcactcacggggttgttggctggattcatttatttcttcctttttttttttttttttgagacggtgtctcgctctgtcaccaggctggagtacaatggcatgatctaagctcactgcaagctccgcctcccgggttcatgccattctcctgcctcagcctcccaagtagctgggactacaggcgcccgccaccttgcctggctaattttttatatttttagtagaatggggttttaccatgttagccaggatggtccctatctcctgacctcatgatccgcccacctcaccctcccaaagtgctgggattacaggcgtgagccaccatgcccggccctcatttccttcttagctggaggctgccgtcagttctctgccacatgggtcccttcatagggcatctcacagcatggcagctggcttctccagaggcagctagaggttgcacaaaggtgcccaggatggaagccagtctttttcttttttttgagacggagtctcactttgtcacccaggctagagagcaatggtgcaatcttggctcactgcaacctccacctcctgggttcaagccattctcccgcctcagcctcccaagtagctgggattacaggcacccaccaccatgcccggctaatttttgtatttttagtagagatggggtttcaccatgtttcccaggctggtcttgaactcctgacctcaggtgatctgcccgcctcagcctctcaaagtgctgggattacaggcgtgagccaccacgcccagcctctttttcttttttaattttttttgagatatggtctcatatttaccgaggctggaaggcagttggtgtagccacagcctctgcttcctgggctcaagagatcctcctgccccagctttcctagtagctgagactactggcatgtgccaccacacccggctaatttttcttaattttgtgtagagatggggtctcactctgttgtctaggctggtctcaaactcctaggctcaagtgagcctcctgcctcaacctcccaaagtgctgggattccccttgtgagcctccatgtctgaagccagtcttttgtcacttgacctcggcagtgatgccccattgctcatgctgcgttctactcattagaagcctgtgcccggccgggcgcggtggctcacgcctgtaatcccagcactttgggaggccgaggcgggcggatcacgaggtcaggagattgagaccatcctggctaacacggtgaaaccccatctctactaaaaatgcaaaaaattagccaggcgcagtgacgggcgcctgtagtcccagctactcgggaggctgaggcaggagaattgcttgaacccgggaggtggagattgcagtgagccgagatcacgccactgcactccagcttggtgacagagcaagactccgtctcaaaaaaaaaaaaaaaaaaaaaaagaagcctgtgcccaagttcatactgtgcgagggcgtaaacgccagcaggcgggtttgctgggccttcctagaatctgctgggccttcctagaatctgctgggccttcctagaatctgctgggcccaggcaactcaggggagctctcacagcacgtgccgtggtgggcaagagcgtgagcttggaaccggaggcctcgatcctcgccagctgtgtggcctcaggtgagggcctcgccctgtctgttgtttggtgtcctcgcctgggaacagggactgtgatggcggcacctgcctgagtcctgcagctgtggcagggatggatgaatttctgcagactgcagcagaccggacccatcatcatggtggttgcaaacttacaaacacctacacatgcgccaggcccagcctccccccagctccactcccaccccagcagccccttgagcagttactggcttcctgagagccggcagcatgggcagggcctgtgctgctggtgccagccctcagggctcacagcactgggcgggcacaggtgccaggcccgcacctcagccatcaccgctcaggacggggggccggggtgggcaggagagggtcttggagaaagggtccagagcaggcctgaccatcccctctcctctcgcagggtcccgacggcctacacatggggcgctgtgggcgccgtggggctggtgtgggccaccgattggcggctgatcctggactgggtaccttacatcaatggcaagtttaagaaggataattaattacacaaacccttcacagactgctctggtaagtttcagtgggctgcggtgggtggactgcatgatggccggatggtggccgaagagtgggttctccaggctcccagagccggggcggcagccctcactgctccccctggagagacctgcattcgagagtggggccctgggtgccccttctggcatctccggcccacgggcacagaactgtccgccccgcagccttgggttgtgtgattggggtgtgggcctcgccctccctctggacaatcccagtgagtctttgaggcaaaccttgcttccgtctcagtgggcactgcagcctgaactgggtggggcccatgttacagacagagggggaaggtggaggctggcccacagtggctggacaccccatgagctcttggaagcgcctgtgaggccctggacgcatccacgtgtttctccagcatgccagctgcccccttaaccacagtgcctgtggcatcttcccagtgcccacatgacagtcccacgtggccgtgctcttacacccccattttccaggtgctggcctgaggcctgaggccatgccactgtttgaacctgggcctcagagccctgctccggtctgtgtttctccctactgcgtggagcccggggcctgtgctgcattggtgttcctgccaggctgctgtcctgggccacttccgcagccagcttcatatggaagggacgtttctttttttttgagacggagtctcgctctgttgccagactggaatacggtggcgcgatctcagctcactgcaccctctgccttccaggttcaagcgattcttgtgcctcagcctcccaagtagctgggactacaggtgcccaccactacacgcagctaatttttttttttttttttgagacagagtttggctcttgttgcccaggctggagcgcaatgacgcgatcttggcgcactgcaacctccacctcccgggttcaagcgattctcctgcctcagcctcccaaggagctgggattacaggcatctgccaccacaccaggctaattctgtatttttagcagagatggggtttctccatgttaatcaagctggtctcaaactcctgacctcaggtgatgcgcccgcctcggcctcccaaagtgctgggattagaggcgtgagccactgcacccagcctggaagggacacttctactcaccctgcctcgtctgctctccctccaggtgcctggtggtgctagctcctcccacctcagcacctgctgcatctggagcagcccaagcctcaggatggacaagaggaaacccacagctcagcttcaggcttcttatgtttctgaaaacagcttggatattttaatgcacgttgcattaaacctcactgaaacctgctccgtgcccggatgttgatcatgctggtggcttggttactgtgactgtagctggagtggcacaggtgacccaggcgtcctttcagctccagaatgttgcaagtctaggagagtgttccaatggctgacagaaactgcctatttgaaatggctcataagtagtatctgcagtgtgttcatccgttgctgccttaacaagtcacccacacgtagtggcttaaagcaacgaacattcactctctcacagtctgtgtcagtcggggatttgggagtgatgtatctgggtggttgtggcccagagtctctcatgaggttgcagttaagacatcagccaaggccacttcgtctgaggaaggctcaactggggctggagccacttccaagccagtgccctcacgtggctgtcggtgacagccacagttccttcccatgggggcccctacacgaagctgcttgagcatcctcacggcatggcctctgccttccccagagcaggtgaaccaagggagaggaaggagcaagccacagtgcttctatgagccaccctgagaagtctcacgtgatcacttccgccacagcctgtttatcaaaagcaagccccccaggcccagcccacgtgcagagggaggagaatgaggttctgtgttttgaagggaagaatatcagaattggtagacatttcaaactgtcacattagggatacaaaaatgaacaggctgggagtggtggctcagcctacaatcccaacactttgggaggctgaggaaggggcatcacttgaaccaggagttcagtactaacctgggcaacaaagaggcccctgtctctgataaaaagaaaaaaaatgaaaaaataaaaatgaacaggtataaaaagagaatatggtacaaagtcacactccctgatacagctgcccagttttttccagctcttgccaatctctgagccgacattgcaccactgcactctagcttgggcaacagagtgagactcaaaaaaaaaaaaaaatcctagacatactgtctgcatacataagtgtgttgatggaaatagctattatatcagtctgctagggctgccataacaaaataccacagattttgcatggctcaaccaacagaaatttattttacttattcttttttaaaagacagtcttgctctatcgcccaggctggagtgccgtggcacgctcttggctcactgcaacctccgcctcctgggttcaagcgattctcctgcctcagcctcccaaagtgctgggattaacagctgtgagccactgcaccaagcctatttatttatttatttttggagatggaatcttactgtgtcacccaggttggagtgcagtggcatgatcttggctcactgcaacctctgccttcagggttcaagcgattcttctgcctcagcctcccgagtagctgggattacaggtgcctgccaccacgccctgctaatttttgtatttttagtagagatggggttttgccatgttggccaggctagtcttgaaatgacctcaggtgatctgcccacctcagcctcccaaagtgctgggattacaggcgggagccactgtgcccggccagattttgttctgatttttaaaaaaacattggccaggggtctgtgcgtggtggctcacgcaccactgcactccagtctgggtgacagagccagactctgtctcaaaaaatatataaaaatttaaaaaaaaaaattgtctgcaggctaagtgtagtggcccacacctgtaatcccagtactttgggaggccacagtgagaggattgctggagcccagaagtttgaggctgtggtgagccgtgattgtgccactgcactccagactgggtggcagagtgagaccctgtctcaaaaaagaaattgtgtgacttgagccctgaatctgtaggttaccagaccccagtagcagtgagcttcccctgcctatttctgtatctgctgtcctggtacttaagtcccgaaagggaaggcagagacttcagcatggtggcactgaggccctcgccagcccaggaggtgacaggagccagactggcggatggggtcctgtgtttgttgccacagtgagtcactggactccactgtaaagaggagcagtctcgtggtcccatcagccatttattcagtcatttatttctaccagcatccactcgaggacattttttctttttccttttttttttttttgagacagagtctcgatctgtcgcccaggctggagtgcagtggcgcgatctcagctcactgcaacctctgcctcccaggttcaagcgattctcctgcctcagcctcccgagtagctgggactacaggcgcccgccaccaagcccagctaattttttgtattttttagtagacacggggtttcaccgtgttagccaggatggtctctatctcctgacctcatgatccacccgccttggcctcccaaagtgctgggattacaggcatgagccaccacacccggccttgatgacattttttctacagactataaatcctttataaactttaattttgttgctcaagttgtcctctctgtttggccatcgtgaccccttccaaatgggctcctgtgtgcacatgatatgtcccgggtcactttttttgttattgaggtgaaattcacataacataaaattaaccattttcaggtgtgcaatgcagtgctttaatacattcacactggtatgcagccactgcgcccagcctggaattggccattttaaagactattttattgacttacttattttagacaaggtctcgctctaccacccaggctggagtgcattgtcacaatcatagcccaattttaaaaataatcttggccgggcgcggtggctcacgcctataatcccaggactctgggaggccaaggcaggcggatcacctgaggtcgggagtttgagaccagcctgaccaacatggagaaaccccgtctccactaaaaatacaaaattagccgggcatggtggcgggtgccaccataataatcatctcccttgcatgggggcaggccttgcactggctgccctagtcaagtaatcccagctacttggaaggctgaggcaggagaatcgcttgaactcgggaggcggaggctgcagtgagccgagatcgcgccgctgcactccagcctgagcaacaagagcgaaactccgtctcaaaaaaaacacaaataattaaattaaaaaaataataataatctcccagccgggcgtggtggctggcgcctgtgatcccagcactttgggaggctgaggcaggcacattgcttgagctcaggaggttacagtgagccaagatcacgccactgcactccagcctaggcaacaaagtgaaaccctgtctcaaaacataattatcatctcccttgcatgggggcaggccttgctctggctgccctagtcaggtaccacggctggttctggggtgtaactgcctggctttgagtccacagcatagactttcctgtctccttgggagcactgattcttccatggcagcccaatgccatggggcctcggtctcaggccagtaaccagctcctgagcttctcgggagacagagctggctgtctcacacctcacctcacctcacgacgaggtggggtgagcggggcatccgaccatcatccacccatccatcctgatttattcagtgcttctgtggtcagcacaacatcccgaaaatgtgcccgttccgtcggccgctgtggctcacacctggaaccccagcacttagggaggccgaggtgggcggatcacttgaggtcaggagttcgaaaccagctggccaacaaggtcaaatcccatctcttctaaaaattcaaaaaaattagccgggcatggtggtgggcgcctgtagtcccagctacttgggaggctgaggcaggagaattacttgaacccgggaggtggaggttgcagtgagccgagatcacgccattgcactcgagcctgggcaacagagcaagactctgtctccatcagtcagtcaatcaatcaataaatgaatgtgcctgtcctactccctggaacctgcagctaaagggactttgaaaatgggacgagatcttcagatgggaaagcatcccagatcgggtggacccaatgtcaacaaaagagtccttagaaccaggacagtttctccagctggaggcaggggagcacagcagctagactcagtccttgaacacctgtgcaggcccgcccagccctagccttgggagcgacgctgtcagggggaactgatggggggcagcccacccgtttccatttcaggatccctctggctggctggggaaggggttaaggggagacaacagggggtgggcgattccgcaggaaggtcctggaactctcccggccagagatggtggctggactaaggtgcagggggtggtcggggagctgggggggggtgctcagattcctggattttgagggttcaaaaagcagctggacggggcgcagtggctcacgcctgtaatcccagcgctttgggaggccgaagtgggctgatcacctgaagtaaggagttcgagtccagcctggccaacatggtgaaatcccgtctctactaaaactacaaaaattagccgtccgtggaaccagctacttgggaggctgaggcataacaacttgaacccgggaggcggaggctacagtgagccaagatcgcgcctctgcactccagcctgggtgacagagaccccgtctcaaaaaaaaaaaagctactggagggaacttgggggcgtggaaggggtggtcacgggggaagtcccccagatttggacgctcgtaaaaagctcggaagctgggagaccaggagggcggggaagtcgaggtccagtcactgggccagagtccccaagacttgggctggagaaaggtcggaggaaaggaccccactagtccgaaagcatgtccccgcgcacgcgcaccaggcggccggcagagacagggcacagtaaaaggagccgcgcggactccgggcacagctgctgggcactggcagctcgcaaggcacagcgcgcaggcgcgcacgccacttaaggccccgccccctcccagcgcgctgattggcggggccgtagaggggcgggggcatggcgccgcggctgcgcagcgcggggccccgcgcgggcgggtgggcggagcgggccccccgagcgggggctggcgagcgcggggagggggccgaaagggcggcaaagccggcgcgcgcccggctgggggcggagggcgggggcccgcgggccggaacagccgcggcaagtggcggcggcggcagcggcagcggaggcagctgaggcggcggcggcgagtgggggtccgggcggcggcggcgggcccggcggcgggccgaggagccgggcgcaatggagcggaagaggtgggagtgcccggcgctcccgcagggctgggagagggaagaagtgcccagaaggtcggggctgtcggccggccacagggatgtcttttactataggtgaatgagcgcgccggccgcgcagggcctcaacgggctcctcccagcggcctctgcggcggcctcggcgcccctgccccgggccgcggcctgggccccgcgcgtgcgtcgtgcgtgcgtgcgtgcgtcttgcgtgcgtgtgcgcccggcgcgcggaggcccagtgcgcgtgcgccgcttgttgggccgcatggctttcggccggccgttcagggactggctgccggacggcgactgcggcctttgttcgtgcgcgctgggccaggggcgcctggcggcggccagatgctaccggggggcaggggtggagggtgggctgtccctttggttcccgtgagacgcagggggtgccttcttggggcgctcctggggtggcgcggagcccgagggggtggccagccgggatttcggggagcagggctcatgggcggatcggggagggcgtgcgtgaaaatacgggttcttgggctcgccccagtcctgggaataagcgcctcagggtgactggtctcccacgcagcgttgctttttttaaaggtattccccttgactccttccgaggcctctggtcctcttgggtcgtggccccctcagggtggagacctgaggctttcgactttccgagcccacctaacggtagtctttgcgtggatgttactggtggtggaaggctttcagagacccccccgtccccaaattggaacaaggcgctgctctgaaaggtcgcagggaaccccctccgtggaacaaagacttagtcgcctgctgcagccaagtcccagacagtcggccacctgctgtttgtcctcttttttttttttttcctggctcgggaaagatgcttttgattctgggccagctttgattgcgccctccccttggttcagtgtcccgtggcgccttcaggtcccccaggaggggaaagcggaggacgcctgccatgtgccgagcacctgggtaaaggggggtgtgcggctggtccccctttttcccacagctcggggtcgtgggcaggagaccgcccaggtgagggcgggtggtttccacgagccaaggaggggcagaacgaccgctccgtccactgtgcacttcggtcctctgtggttcttgactgtcccggtttggggagataaagtgagaaaagtgagcggggaaaggatggctgtgatcagaagcaatgtgtggggcctcgtcctgcaggaggagctcagggactggttcctggaaagttggaggacagcaagagaggggaaacttggtccccaaatgtgtacccttatgagctggaaccctgtacacgtcctgagatctgcagtgacacatgctgaaatctgggagggcagatgacggggcctgaatgagactggggtcagggagggcttctctgaggacgtgacattgagtgacagggagaggcgtccaggcagcaggaaccccctaagaggtggctgcagcttgggagctagaaccaaggccagcttgagcggagtatcctgaggctgtcatcaccccacctctctcattcccactctgggccctggccctgagcatgagggtctagcagtggagaaaagcagggagaagctcctctacaggctagagatttcaggtttctctgcagagggtgaagccaggcagcccagagccgccctctgcaggtctggggcctcaacccagcccttcatctgaggctgcaggctcccagactgcgttttctgttgggggtgcctggggagagttcaggccatgttgcccacttttttctatacgtgtggttttatcaaggctgttcttttttcattgaataaaatctcagggacatcattttgtgtcaatagatgggcataacctttatttaaaattgagatataattcacattccacaaaagctaccttttttgttttttttctttgagacagggtctcacccaggctggagtgcagtggtacaatcacggcttacgcattcttgacctcccaggctcaggcgaccctctcagctcagcctcccaagtagtgggaattacaggcacgtgccaccatacctggcttatttttatagagatggggttttgctgtgttgcctagactagactggtctcgaattcctggactcaagcagttaacccgcctcagcctcccaaagtgctgggattacaggcatgagccactgcctggccaaagccactttttagaaatgtacaattcagtggggtttttttttggagatggagtttcactcttggcccaggccacagtgcagtgacgcaatcccagcccactgcaacctccacctcccgggttcaagcgattcttctgcctcagcctcccgagtagctgggattacaggcgtctgccaccatgcccggctaatttttgtatttttagtagagaaggggtttcgccatgttggccagactggtctcgaactcctgaccccagcacctcagcctcccaaagtgctgggattacaggcctgagccaccacacccggcccccagtggtttttagtacattgacaaagttgtgcaaccatcaccgctatctaattccagaacattctcatcaccctgaaaagcagctctgtcctcattagcagtcactccccacttgttactcccccagcccctggtaaccactaaccccctctatcttgcatttgcattcattcattcatttattcattgtgagacagggtcttgttctgtcacccaggctggagtgcagtggtgcagtcacagctcactgcattccttgacctcctgggctcaagcgatcctgcctcctaagcctccagcatagctgggactacaggcatgtgccaccatgcccagctaattttttatgttcattattatttatttattttgagaagtagtcccgctttgtcacccagggtggaatgcagtggtgcaatctcggctgactgcagcctccacctcctgagttcaagcgattctcctgcctcagactcctgagtagctgggattacaggcccccaccacaacccccagctaatttttatatttttaatagagacggggtttcaccatgttggccaggctggtcttgaactcctgacctcaggtgatctgccctccttggcctcccaaagtgctgggattacagatgaaagccactgcgcctgccttcttttttttttttttttttttttttgagaccgagtttcgttcttgttgcccaggctagagtgcaatgttgcagtgcaatgctgcaatctgggctcactgcgacctccacctcctgagttcaagcaattctcctgcctcggcctcccagctagctgggattacaggcatgtgccaccacgcccggctacttttgtatttttagtcgagatggggtttcaccatgttggtcaggctggtctcgaactcctgatctcaggtgattggccctcctttgcttcccaaagtgctgggattacaggtgtgagccactgcatttattctttttgagaaggtgttatcgagatacagttttatgtaccatacaatacagtcatttaaagtgcacgagtcaatggtttttcagcatattcacatatttacggatataggcagctatcctcagattcaattttagaatttccatcaccctagaaagaaccccaggcccatttaccactgccttgtgcgcccacccccagtcttaacaaccaggctgtggtctgtgtgtgtctcttgttcgccttacaccttttttttttttttttttttttggagacacagtcttgctctgtcgcccaggctggagtgcagtgtcatgatctcggctcactgcaacctctgcctcctgggttcaacccaattctgcgtcagcctcccgagtagctgggactataggcacgtgccactgtgcccggccaattttttgtattttagtagaaacgggtttcaccatgttgcccaggctggtctcgaactcctgagctcaggcaatccacccacctcagcctcccaaagtgctgtgattacaggcgtgagccaccgcgcccggccttgtttcccttcatcttaaaaggcagaacggcctctctttggggtgaccggaggcaaagagctgttgggagtgttttgtggggtctcttcttccttccttgtggctacatgaagcctgagtctcagcctctggtttcttggtttctttccactgccctgggcaaaccagcttcgactgaacgtcagccagtccagagagtaattaaaagagttaagtctcaaaagtaaatctccgggaagagccctcagtggtttcagacccccaggcacttgtcctcgtgccctccctgaggcgtcctgtcctactggacatgctggagcctgcccgtgtccttgtggaccatggaatttgcccggggttggggggcaggggtggagagaaataaaacttcctgtgatctatgtatcggcccagtacatagatcctggatagaggcgattgagctaagcatgggaccaagcatttctgtgcagtgcctgcagaattgagtttccttctggctatgggagattcttctgagctgtctcagttgtctgacatctggcatctgccatgggccaggacgtctggggcaggggcagaagaggacaggaggagactgccctagaggattctgggaaaacgggaaaacagcaaaacagagctacccaccaatctcaggctgatgcattattaataaaagtgactgttgactgagtttgtagacataatatgtttgaggtacctggcctagtaagcaccatacaagtgctattatttctaaatgattttatcaagataaaagacaccagccaggcatagtggctgccgcctataatccctttgggaggtcgaggcaggaggatctcttgagatcgtaagttggagaccaacctgggcaacatagcgagtccccatctatgcaaaaaatttaaaaattagctgggcatggtggtgcacacgtgtagtcctagctcctcaggaggccaaggcaggacaatcccttgagtccaggaggtcaaggctgcagtgtgctgtgatcacaccactgcactccagcctgggcgacacaaggagaccctggatctaaaagtaaaaatgaaaaaaaaaagaaatgaagcagcagggcgtgatgactcacctttaatcccaaagctttgggagggaagatgggaggactgcttgagctcaggagttccagaccagcctgggtaacatggtgagaccctatctctattaaaaaaatataaaaattggctgggcgcggtggctcacgcctgtaatcccagcactttgggaggccaaggcagccagatcatgaggtcaggaggtcgcgaccatcctggctaacactgtgaaaccccac

SEQ ID NO: 1266 - DNA, 743 bp, Homo sapiens
agtgtagccgggtcagctggacagggtcatcctgagggtgcgactccgccgcgatggtgacccggttcctgggcccacgctaccgggagctggtcaagaactgggtcccgacggcctacacatggggcgctgtgggcgccgtggggctggtgtgggccaccgattggcggctgatcctggactgggtaccttacatcaatggcaagtttaagaaggataattaattacacaaacccttcacagactgctctggtaagtttcagtgggctgcggtgggtggactgcatgatggccggatggtggccgaagagtgggttctccaggctcccagagccggggcggcagccctcactgctccccctggagagacctgcattcgagagtggggccctgggtgccccttctggcatctccggcccacgggcacagaactgtccgccccgcagccttgggttgtgtgattggggtgtgggcctcgccctccctctggacaatcccagtgagtctttgaggcaaaccttgcttccgtctcagtgggcactgcagcctgaactgggtggggcccatgttacagacagagggggaaggtggaggctggcccacagtggctggacaccccatgagctcttggaagcgcctgtgaggccctggacgcatccacgtgtttctccagcatgccagctgcccccttaaccacagtgcctgtggcatcttcccagtgcccacatgacagtcccacgtgg

SEQ ID NO: 1267 - protein, 56 aa, Homo sapiens
MVTRFLGPRYRELVKNWVPTAYTWGAVGAVGLVWATDWRLILDWVPYINGKFKKDN

SEQ ID NO: 1268 - DNA, 1314 bp, Homo sapiens
agtgtagccgggtcagctggacagggtcatcctgagggtgcgactccgccgcgatggtgacccggttcctgggcccacgctaccgggagctggtcaagaactgggtcccgacggcctacacatggggcgctgtgggcgccgtggggctggtgtgggccaccgattggcggctgatcctggactgggtaccttacatcaatggcaagtttaagaaggataattaattacacaaacccttcacagactgctctggtgcctggtggtgctagctcctcccacctcagcacctgctgcatctggagcagcccaagcctcaggatggacaagaggaaacccacagctcagcttcaggcttcttatgtttctgaaaacagcttggatattttaatgcacgttgcattaaacctcactgaaacctgctccgtgcccggatgttgatcatgctggtggcttggttactgtgactgtagctggagtggcacaggtgacccaggcgtcctttcagctccagaatgttgcaagtctaggagagtgttccaatggctgacagaaactgcctatttgaaatggctcataagtagtatctgcagtgtgttcatccgttgctgccttaacaagtcacccacacgtagtggcttaaagcaacgaacattcactctctcacagtctgtgtcagtcggggatttgggagtgatgtatctgggtggttgtggcccagagtctctcatgaggttgcagttaagacatcagccaaggccacttcgtctgaggaaggctcaactggggctggagccacttccaagccagtgccctcacgtggctgtcggtgacagccacagttccttcccatgggggcccctacacgaagctgcttgagcatcctcacggcatggcctctgccttccccagagcaggtgaaccaagggagaggaaggagcaagccacagtgcttctatgagccaccctgagaagtctcacgtgatcacttccgccacagcctgtttatcaaaagcaagccccccaggcccagcccacgtgcagagggaggagaatgaggttctgtgttttgaagggaagaatatcagaattggtagacatttcaaactgtcacattagggatacaaaaatgaacaggctgggagtggtggctcagcctacaatcccaacactttgggaggctgaggaaggggcatcacttgaaccaggagttcagtactaacctgggcaacaaagaggcccctgtctctgataaaaagaaaaaaaatgaaaaaataaaaatgaacaggtataaaaagagaatatggtacaaagtca

SEQ ID NO: 1269 - protein, 56 aa, Homo sapiens; identical to SEQ ID NO: 1267

SEQ ID NO: 1270 - DNA, 1366 bp, Homo sapiens
agtgtagccgggtcagctggacagggtcatcctgagggtgcgactccgccgcgatggtgacccggttcctgggcccacgctaccgggagctggtcaagaactgggtcccgacggcctacacatggggcgctgtgggcgccgtggggctggtgtgggccaccgattggcggctgatcctggactgggtaccttacatcaatggcaagtttaagaaggataattaattacacaaacccttcacagactgctctggtgatgcgcccgcctcggcctcccaaagtgctgggattagaggcgtgagccactgcacccagcctggaagggacacttctactcaccctgcctcgtctgctctccctccaggtgcctggtggtgctagctcctcccacctcagcacctgctgcatctggagcagcccaagcctcaggatggacaagaggaaacccacagctcagcttcaggcttcttatgtttctgaaaacagcttggatattttaatgcacgttgcattaaacctcactgaaacctgctccgtgcccggatgttgatcatgctggtggcttggttactgtgactgtagctggagtggcacaggtgacccaggcgtcctttcagctccagaatgttgcaagtctaggagagtgttccaatggctgacagaaactgcctatttgaaatggctcataagtagtatctgcagtgtgttcatccgttgctgccttaacaagtcacccacacgtagtggcttaaagcaacgaacattcactctctcacagtctgtgtcagtcggggatttgggagtgatgtatctgggtggttgtggcccagagtctctcatgaggttgcagttaagacatcagccaaggccacttcgtctgaggaaggctcaactggggctggagccacttccaagccagtgccctcacgtggctgtcggtgacagccacagttccttcccatgggggcccctacacgaagctgcttgagcatcctcacggcatggcctctgccttccccagagcaggtgaaccaagggagaggaaggagcaagccacagtgcttctatgagccaccctgagaagtctcacgtgatcacttccgccacagcctgtttatcaaaagcaagccccccaggcccagcccacgtgcagagggaggagaatgaggttctgtgttttgaagggaagaatatcagaattggtagacatttcaaactgtcacattagggatacaaaaatgaacaggctgggagtggtggctcagcctacaatcccaacactttgggaggctgaggaaggggcatcacttgaaccaggagttcagtactaacctgggcaacaaagaggcccctgtctctgataaaaa

SEQ ID NO: 1271 - protein, 56 aa, Homo sapiens; identical to SEQ ID NO: 1267

SEQ ID NO: 1272 - DNA, 47373 bp, Mus musculus
  misc_feature (1)...(47373): n = A,T,C or G
aaaggcagatgtgacgttctccacagagacaccattcaccatgacgatgtggtccccggtcctgagagagtggctccagtgaggagacttggggctgtaaccctcccctcccaccatcaggagatttttgtctcttggtctctgtgtctctctatctctctgtctctgcctgtgtgtttctccctcctccatcactcatcagtttctcagggccaggagccatttccactcagattccaggagcctcagtccacaggtcttggaaaactgccttgctctcaaagagcagtccaagattgtctgttctagttctttgccatcctgcccttgggcactgctcagaatctgggaccaggaagtgttagggacaagaggccaaggaatcaggtcctgctgacagagccgcaggtgccaggtgctttctgcaccccctccccactgtccctcctcccactagccctctccgagcctcaccggagccaccctcaccagagccggccctctctgagccctcaccggagccggccctcagcggggcctcctggtaccacatcagacaccaccacggatccactagctcggtcatggcctccagagacagctatgccgaagccgcggcgggggtcctaagggacacagggaacaggcaaggcgttacttctcagacccaggggctcccttggaggggcaggcttcagctcaccttgtacagtgtggctgtgtgttgttcccagatggtcagctcttccatgtctgccacctggtagggacagggacagggacaggctcatggggcaggaggaggctatggtgttcactgcctaccccaccctccacagtgcatcctctcggcagcagccccaccttcctcgggatcacagtcacagtcctccctacaatcctccctacagtcctcctccctgtctggcttacccactatacctccctgctccagcacaagagcctcatggctgctccccaacatcccagcctccctcctgcccagaggctgcctctcaagcacgttccaggccctcagagccttctttcagtcctgggtgaggtggcccggatacccccactgaaagctgaaccccttgcaacttcatcttaatgtcacgtgacgccacctgccaggccccacctcccaatctccccagctctgatgcctgggcttcagtttacttttggacggtccggaataatgttctgaagcctaggttagctccaaacgcatggcaatcctcctgcctcagcctcctcacatggaggaggcacatggggcacctccaacaaaaccctggcaaagatcttcaagtggcactctgaaagcttatctgcgctcaactgtggaatttttatttcttggctttcccaagtgcgccagggctccttagggggaggggaggcaggtggccaggcttgtcccagcctgcccagcttgtcccagctggtgtaggcaggtcacaggctttgtctaaaaccctctggggctccccttgccttaaggattggcatgacccctgctaccccatccctgcccatccatcgatttctcaactgtgctccgcaggccctggctctttctcttagctgtggaagacccgacctctccatcactcagtccagacaagccatcacctatagtccttggcaaactcctattcagcctctagtgcccggggctaaggtgccttccaacgtacacatctggcacccctccccttggagtctgggatgtcacagtctaatctagtttactccacgaattcccctaagtccgggtgctccgggtagtctaggatggggtcctagggactggataaggtccccacagtgtggagctttgggagggtttgaaaaccacaagacggcagtttaaaaatactagatccaacccctcagccccgcccctccaggtgagcgcctggctccgcccctgccacctgcggacaacctgagcctgagacctgaggagaacgggtgggacgagcctcccgcccaggggcactggctctccacccgcccctccccgcttaggacaggagggggttgagggagaggatgtagggaggggctggggacaggtccgtcgaccgggcctggggaaggtcattcctcctcctcctaaacgggcagaaagtcttgcagacataaagcttggagtgtgacccagcagccaagtctcagtttattcttcctgtgtaggagtttggactccatggcagaagggcaaaattcctccaggttccccagaactggctatcatccgacccgccaggctccttaaactctttgtacacagtaggtgctcaataaatgctagcggccaagaaacgaaacaaaacacagctacccactttcaagatcacacacgggcgccctcactgtctcagtgggattcgaactcaggtctgcggggtgaagcggttgaggaagctccaagaggtggctcttggggctagttcacagatttatctctccatatagccgtgggctagccaccgcgcctctcggggcctcagtttccctgcctgttaagcaggcgggcagggttttgaaagcctgagtcccactcccattccgaccaccaccagttccaagcgtccggcacaactcgcctggaatctcaccgccatggtgcacagcaagcgtcctggaaacggtcaggcagcccccaccatggaccaggaggggcctggaaacaatcagcccccactttgggctgggaggtggtcgcgacggggttggggccgcgctcccgcctttctagggctccgccagccgctcacggctgcacctgctcttcctccttcaagtcgggggccgccccgccccagccgggcacgcctccgggaagcggccgcgggccccaccgcgatccggtccggacaagcgcgatccggacctggtttcccacaaagccgatctgagccccgcggccggggcagccgaatgcatgggaagggcggccgggaaaacccggagctgtcacgaccaggcgtaacggagtccagggtctgggacgtttttgttctgttgttttcccacgtacgaaacgggcacacatcgaggttctcccgggcagcccgtgggtaagaagctttgcgagggagtcgggaagaggcaaagaggcaagagtgtagtgggcagggaggggcgttgcaggagagttctgaaggtgggttaagagtttgccctgacaagaacgatctctgtgtgcattggaacgtttgctgtgaaagcgtgagaacctgagttcaaatccccataacgaggtaggtgctcacgctcctgtgtgtcccgccccagaggtctgataccccctggcagcctccgtggtaactgcatccacatggctcacagtcatccgcagggaaacaccaaacacaagagtaaacaagtcaaaaaaaaaaaaaaaaaaagagagagaggctttccagccttaattccagtactcaggaggcaaaggtaggaagatctctgtgagtttggggccagcccggtctgcatagtgagatctgggccagcctgggctacagtgagaccctttctcaaaaaacaaaaacaaaacaaaacaaaaaaaccccacatacacaaaaacaaaaacataaccgtttcccagacaatccagtcgtgttcatggcctttcctgggccactctgactccaggccaagtgtgtatttcaaactcagactgcttcctcctcagggcctgccaccgagggttagctttagaaaggtccagtcaggttagcctagatttgggcttaaggtaggaggaagtcacctagataggcgggactagtgctggctccgcccacaaattcttcactagtaaagatagccggatcctcaacccaacccaaggtcaaagggcaaaactgggcactaacaggctcctgttgctacctcagggctctaactagaggaagaaggaagggaatgtgacagccagaggcaaagcagaaactctagtttctgaaagcttgctggagaaggtgggcataaaagaggggttttgaaggttgataaagagttggtcaagacaatctaatccaaatctttgggctatcttggtgcggcctttagccccagcacttggaaggcagaggcaggtggatgcatattagttaaaggccagcctggtctacagagtgagttccagtacagccaacgctacacagtgaacacttgtggggaaccccccccccaactgtcctgccccagcatttcctcccactcaccagcacaccttgtgccgagagaagaaacgtgtgttctcagaccctcacagttgaaggctcaatctcaggtcttttgccttttcactgtgtgccctcaggaagttactctcccactctgtgctcctatatgggcatctagcattatgggtaatgaaatcctaggttctgcatggcagagtgggtaggtggactaaaaggggcaccgtagtggtttgtctgtttgtgagtcactgagtgcctcggtttccccatctgaaagtgggaatgatagtggtttaaaggattgtttcccatacttagagacctattgcatgtgtaccacctagggcaggttctgctgttgttctgaggctggacctcatatgtagcctaggctgtcatggaactcacaatcctcctgcctcagcctccacagcacctgggacccatcctcagtccctgtgaaacagctgggggcagggggacttgctgccaagcctgaggtcctgagttcgatccccatagcaagcgactaccaatctgcatgagttgtcctccaatctccgcatgctacagcatgtgcgcatgcgcatacacaaataaatacttatgtagagattaagaattaaaggaactctccaatctgcccccagaggcaggcaggtggtgaaagcagatgcctcttggacaagcctgtttgggctgcagtaccgataccagccaggaggggacagtgtctgcaggccagaaagggggtgtaggatgggagacaagttctctaggactctgcttgcctattctcatacatctggggaaactaaggcatgcgtggagggcagggcctggggttgtggggtgggggtggagtcaagggtcactgaagggtgtgatgtcccctcaggtgtggcaagacaggtctgaccggaactcaagaatgccccaagagcttcaatggtgtacactgctgggtctgcaaggagggaggagcaggtcctgctctcaagaggagggacagaaagaatggaggctgcgtcagcgtcagcgggcaaaggagaggcagggatctaggtcaggacagtaaggagagggtgccagagggccaggaagattcagcggagaaaggcaggtgtggctcagactgaccccagggaggagggagccagggagagtttactgaaccgatcaccatggcggagagaagcaacgggaaaccgaccccgtttccacggtgcttgcgcattcgtgtgagtgcatcacatgcactgctaataaaaagaatttagactttgtaaatagctaggactggtggcacgcacctgctctccctgcgcgcgtgaagggagggctggggcaggaggattgctatcagttctagaggagccaggccgctgagctgaggagccatactcatcaccacaatgcacaaagtaaaatacagggagagtctgaggaaactcgcatctgggacaccaggggggtacgccaaccatgactactgtgagactcctcgcctcagtttccctgtaaacctcagcgcccaatttgactctgaaaggcttccacagcccctatctccagcatttggggctgcaataccagcttcagccaataggggacacgtgggacccagaagtggcatctggtgtcctagggctacagggttccctagcccacccccaccaaaagtcttcaaactgctcctgaggtctttctcatagctttctgttgttgttggttttggtgttgttgttgtttggtggtggtggtggtggtggtgtcgtcactatgtagaccaggctgatccaaaactcactatgtagaccaggttggcccagaacttactatgtagacctggggtgggggtgggtagttgtcacccagtctgcagctgtctgtacaaccacacctctgtgtcttccacagtgtcaagaacctcatgtaccctccaggggatatttgttcatttatagagtgctgactatttgtcaaatcttatcccaaataatggtatgtatggttcaggggtacagcagggtgaaaagacccctgaggcgggggctccatgagcgtgtggttgacatttcatagctcttgagcgccctttcagtaatataacttttgggcagggtttcctctgtgtgtcctgatggtctgccaaccttcctgccttaccactgacctctggcccctgcccctgaaccttcatctcagcacagcccctccacctgatccttcctgacagtcacccccttatcagccaccagagggcgcacacgaacactgagccctctcccactgctcagctctccatggctcccacccaccttggcagctcagctgcctgtcccgggctccgggctccctccattctgagcacacttgcctgagccttaaccttctacccaggcctgtcaccccagacgtcagttcacccccagtgctcccgtcttctcttcctaaggtagaacaaaccacacatgatggggcacacctgtcatcccagcctccgaggtaaggagggaagatcaagagtccaaggttatccttagctacttatggacacagacaccagcctaggctatgtgagatcctgtctccaaaagctgaaaagataaaattatgaatgtctgagccttgttcccaatatacgtgacatacagtaaatgctcaagaaatacacacgtctttgttaggcagcccgtccccatagccaagtgtcccactgacctcagccacgaagggtgttgggttctaccctgagcaaacactgcctctctggcacgcggcccggcccaggaggaagaaccgagcctaaattctcatcgtggactttccccagcatcggtgccacacggaagtgccaggccagacagggatttttctaagatgtcgccccagggaggtttcttgggggttagctctaaggccccctgtgcgacagtcttactctactgtgcagcctccgggagcagttactcctgtttgggcttcacttcattttgtgccaaataactgggaactgagctgggaacaagggcccccagcgccccagcgcctgccactatagcattagcttctccttggtgcaaaatgaaaaactgaggctgggctagtgcagcagccaataccagaactcccaaggccaggtccccctgtgtgctgatccttcccggagaataagataacctggggggggggggatggtggtgatgttggtggctggacacaccttcctgaaggaattgtttttctttgttttggggcaaatgacacagaaggttcctgtgcccctcccaactcctctgtcaatcccattaggcatctgtccatccgttctaccctcgtcgtgcaattctcagctgacagacgtgctttggggagctgacagagctcctgtcctctcctgtccccacaatgtataacctaggacaggtggcacattcatgccttggatatatggggtgaccctcagggagagttccagaaaaactcaagagttagttcaggagtaccccaacttcctctgccatctcccaaaactgcaggccagcctcccatgggaaccaagatccttcctgctaggggatcagggaccagcctccctagccaccacctgcgctcacaaagaccctttgaaggctgggctgcagcgtgctgggcgctgtgccagggcagaaactgcacccgctggaactttctgaaactgtgtcagatgtccccacaggatgccagcttccggctcccatggggggcatccagagcaaacttgggggtcccgggagcctgacatgggatcacttggatgcataaagcccttgggatgagctcagctggagacttaccggtctggaaggctgagtgaatggacgcagggtgggaggtggaagctgggtcctggatagctgtcaggcatgggtggcagggaggagacccgagctggctgctcgggccgggcaacctgtttgctcagcgaaagcggagtggaaggaacggtgggcgagtccctttgccgggtggaaccggcaggactgtgcaggttgtgcgcaattgtgagtgcaagagaggccggcctgcaggtgggagggtttgtggctcagtcgcaaggtgctctcacgtggccagacaggccttaacccctgagtacccagagaggcctagctagccctgcaccccacagcatctacaccacagagtaggtgctcacaaaacactgagcatcctacgggatgaatgggctgtgcctcgcgctgcaacttacccgctgtcaagcttccagctttcatcacaaggggggacactggaataatcaaaactctcatggagccacagcccagctcattactatgggattctaggcgggaactccacccctgactacgtccccagccccctcactggggaattgtaggccataccacaccttttagccacacccaagatcattatctactctattggcattgacttccctgtctgtacacctgaccccttgtgactttccagtttcagactttatttttggttttttggttttttttttttttttgaactttgcttcctcttaattcgagcactcctgacctagttccttcctgtgatgcccaaagagatctcagcttttatcaggtgtccatatcgctggaggagttggtgaccccatcttagttcctgcggcaagaagacttcagattcaggcttctaacccgctttcagaaggtgctgttactgggctccagtgaccacactttggaagcccaggcttaagtcaagttctgtccacaccacacaccaaagcgctctttctgatgcaattgtcttaacggatggtccacgcctgtcctagcaaggaggaagctcagactggagtgtctgtctcaaaaacacaacaaacaatatatattacatacatcttattattttgcaatatgacatatgcttatttttattgataacttatgttgtaaagcgataaaatgacagtagtaaaatacacttctaatatatgtaataaatttctttaacgcccacactcctatagcccaggttggtctctttaaatcaatatatagctgaggataactcagacccagcactggggaggcagaggcaggaggatttctgagttcttggatctcgtagactaggctggcctcaaacttggagatgcacctgcctctgcctccagagtgctgggattaaagctgtgtgccaccactgcccagttgtgggttttttgttggttttagttttggggttttgttttttcaaagatagggtcccacctatgtagccctggctaggctggaacttgctatgtagaccaggctagtcttagattagcttgcctctgcctccgtgtagtgtccgcctagggtgcccctgagcctcatgtctaggctctgccccttgatatccgattggctgtagtagactctagaccacgccccatctcggtcccctgcagacgctctggtttgtttgagctggtctgttcatccctctatggacgcttggaggcgctggtgagtcgtacttcactttagctccacccctgctacctaattggtcaggttcctcactttgctgaggccccgccttccgcccccataccgcacgtgaacacgtttcttcctgcaccggacgccggagggcgctcgcaactcccttgagtgtgtgccgccctaagcccagtccttatatccaattggttaggagcttcgcgtcgacgccaggctccgcccgggccccgccccctccctccgccctgtagtgcaggcggcgcttgttgttcagcggcggcggccgagctcgggtgcatcctcgggcccgccgccgccgccggagcgttcggccatggagctagaggtgccggacgaggcggagagcgccgaagcgggggccgtgacggcggaagcggcctggtctgcggagagtggggcggcggcaggtaatgcgatccccctggtcgttgcgatgggctcgcccctctcccccgccgtggcgcgtggtctcgaccgcctgcttcgcgctgcggtgcggcctgccgggctgatccattctcaagcgcggcacgggggttcacgcgctctcccattgcgtgtgcgggggagggggcatcagcgttccggccggggaggctgcaccgccccacccggggatgcggggcttgcagcgctcggcccattttagggtccttgggtgacacggtggagctgcaggcgggcgtgggtgcggctctttatcctggcagcgtgtgcatgcagcgagcctcttttagatgcatgcggtagcagtgaagcggtcctccggtttggagatagagggaacccgttttcttgctgcaggggatagagacaagcaagtcatatctgcccctttgagtgtgtggcgagtggcttctccacagtgtgtgggaatgctggagcaccctcattctaatgggggaccccacttgcggacactgcctggcaaagaagggcgagtgtgtcctccatgcgaccccctttgctgggctgtcaatcttgcaactgtcaccttctggtccctccctgctacacatcactgatcaccgatatgttggcctcagtttacctccctctaaaattcgggctggggaaggataaaggaatgatgttgaggtgtcttctctgtcctggctgggtgagcagatgacccgtcaatcccccaacctcccagtcccttctccctggaccctgtggggccacccagcttcctggtgtccccttccttgtcaagagcagcatctctgggtttgcagtctgtatgcagggcggtcgggatgcacagctgaaagagaacagaacactcccttctccatggaggtcacaggaactttctggattcacagaactctaggctccctcagtagtgctctgtggctgacagctgagttaggtctctgtgggctcacttaggcttccaaggttctccctcgctgtcctcatggaagaccaggagggaaggaggagccagggagccaggggtcttcaaccccaggcgctcagctttttttttctatgccattgggaacctggtagctaacctgcttctagcctccagccacctgcccttctgggcttgtcacctggtgtcccatgccatgctggagaaattgtgcaggggacagcagggcccttagtggccataaacctgattgctccgggcactcagttcccacgacagagtccacaaacattgtccctgtatggagcctttcgtcacaggggggggtaggggggccgacaaactagctggagcagacagggtctgtcaccgaactctggacaaacctgtgcctgactgacccccaggggctgtctctcccggaagttccttttcctgcctagagtcctgttagtcatccacacagaatcccatagctgctggtgagtcccaccctcccgtcagactccctgctgtgtccccacctgtaaaatggggaagccatctggatctgctctgaccttgggttgtgaagcactgccttaaaggagtcagttgcatttatttaccaccaactgcatacctgcctccacgtgaacagggtgggtgtccagtgtcggtgtctccagccacacggggactggaggtcaaaggcaggaagagtgaggcctaccccgcttcccagaagacctggtgctctgtggtgcctgtctcccctgcagccctgtcagcagcctgttatctgctctggtaatttccacctatctgatgggaaggaaacctatctctgtggtgtttagaatccagttacgttaagtctccttactccagaggcctggcccaaaaactgcctgcctcctgccttcctgtggctgctggggcccttgtgcgatttctgggtgtgtggtatggcttgggaatcctggatactaggacacgggcctggtgacctgcctgggctctggtgtgagtgttcctgagcttcggtggtcccaacctgccactgcctcctcccccatctaaattggtggcgaattatgtcagcgttgcttctaaaatcaccccagagcctgcccacgtctcctccaccccgtgcctctgctggtccagcatcatcatccttcattttgtttttcaccagctctctgttccataaggagccccataaaacctggctcagggccctccctctgcccatcccctcctccctccctgtctactcctcacaccctcaacgccagccatgggaacctctatgttcctgcagtggctcagcaccagagtagggtggcattcaacaggtgtgcagtgactgtcaaggtgtgccagtaagaggtggtggcctccatgtcaggatcagaactgttggccttatagacaaaaggttcagtcaagtcttcgcctaggtgttatccttgaggtcatgcagtcggatgacagctgcctcagtctcccccatggagagaggctctggggcccttcctcgattggactgttggggtcatggtgtgcgcaagagcaaggtaacgctgggacagagtagttgcagcccacgtgctaggttttgtcaataaagttttatcagcacatgggtcatgcccattgtcccacagtgtgccttggctgcctccttgttcaattgtggagctgggcagctgtagttaagactgttgttcacacagacgcacgcagactcagtctgcttccctgggaagatatttgtcagactcaggagcccattagataagggccagctatcatcaaggtgacattaagctaggacctcacgaggaatatctgcctgggcagagagctggcctcgggcattcgagtccctgggctcggccccagtgccatgtaagccagctgtggtggacaacacctgtcattccagcactagggaggtggaggcctgaacatcaggaaatgaaggttagccttggctacatgctcaaaggagtcagtcctctcctaccttagagtcctggggatagaattgcgctgctcaagcttggcagcaagccctcactcactgagccattttgctggtccagtgttgacttttcctgagcttctactgtgcctggtgggctaggggctttgatggccaggggctagcctggagtgcttgcttacggaggatttggatcccagcctgctcagagccctgagctgtctgtgtatgtgctgtgggtgcgattaagggcacaccggcattggtcatgggaagctgtgtcccttgaaaatgagtgagtgtggaaaggtgggtgaagaatctgctgggtttgaatggaccatgagtcagctactggctcctgactgttctgttactgggccgagtgtcatccctgtgcccggtcaccatgcaggtgaagaccctgccacaggattatgccgagctgggaatgagctcagagccattgcgaagctgtagcatcgcaggctagccatgcagagctgagcagacccttccctgtcacaggccttcggggttcctgactcccaacaatggcagtggctccccagcctacagtggctgcaccaggtagagacgcacatgtgcactgagcaagcttggactgagtcgctagccctctgagggtgctggagtccagggggctcaccatatccgggtcgaccctggtcagagatctgatagaggctgagcctcctgggatgaggggaccggtgggctcagtgggcaggctgggttgcaggagctcagctgcggccaccacagctgattctgtgaactggtttttgtttgttttggaaattttttgccactgtggccctttcaccatcgcctgctcccgtttgagctccctggtcatttttcttactcaccttggatgcagctgcctttggtcctatgctaaacacaacttgggcctcatgttctggaaactatcttttctgtttctagttgtgcagtcttttgttggtttgtaggagctctttgtatattgtagacccttccctttcacctgtgacaccccttgcgtcacactgctcttctggcaactactaatcatcagcaaattttagttcttctgttgtcaagagtgtccatctgactgttaacagcttcctggtttgacatcatagtcagaaattctccagtttcttaatcttctgtgtccccaccttttatttttgttattgccttatgtagcccagctggcctcaaactcactgtttagcatagatctgaaactaccagttctctttccttcatctcctgagtgctggggtacctgtcaccagctgtgtgcccgggtcacgtgacgtgacgtttaggatggtgctcagatcctggttgcatgctgggagagtaccctgtccactcagcctcagcccatcccgcctttttgcctgttgttttctgagctgggggttgggagtttctcgtagccaggctggggacacaagaaaactaaccaggaattctgtgcagtaggcaatgtgcttttgggggtcacaacctctgggtcatgtgtcctggtggggcacagtggggccctctgcctgagacttcggtggggtcgccttgcctgacgttcagctctttgggacagactctggagccttctcctctcttaccactggcactgaacagtgtctggctacttgaggacctgtaggactgtgggtggcctgatggcccggcccggcctggcctggcttcctgtttacctcccagagctgaccgacagggaagcacagggtttgtcttgtgtgatgggtaggagggacagtcaccctggaaaacaagggcagtggggtcgtaccccacccctccgccctgccagactcctgcactgctggcctccagcagctcctgagggcctgcagtgtgtatggctgcccccacctctctcaaccgccaccacctcgtgacttcctttcctctctagttccaaagaggtgacgagtgttcccgggacagtgacgggctgaggggaggaagtgctgccctgcccagccctgcacagagcccaggcctgcccagtcaggcggctccaaatggttgtctctgggtgcttccaggtcacccacctgccgcattaaagctgttggagatgtgtgagagaggctgctggctttattcagcctctctgaagtctaggtggagttcacacccacagctgcagcactcaggtgtggagtcgaagcttgtgttgcactcagtcatcaccccgccatccgtctgtctgtccatcagtcggcactacagccaactctgcatgtttcaaggcatgagctgcagtccctcctctcctctgcctttatgtgggctctgggcactgggcgtgggttctcaggcctttgcaccttcccccgctggcctcagtggcactgtatcaaaaccgcatagtctcattccagaaccttccaacaccccacccatttctcagcacctcctggcacacacgagtccactccctgtctgggagcccacaggatgtggcctttgtgtcatggtccctcaccgagtcccatgtccttcgtgtccctccacagtttgggcttgtaagagcctcactcctgttcatggctgagtaatactccaaatggggacaagacgccctggtgtgctgttcctccgtggacagatgtccatgtttccttgtgttggttgctttcggaaagtcccacagggactgtgcacagaatttgggtggattgggcttttcacttcccctggtgactgcctgagggtggactcgctgagtcacagagaaaccgtgtgtctgactggggacaagccaggctcgcccacagccaccagtacttctccttccctgccggctgcaggtggcttcctgtgactagcttcactgactttagtggctgtttttagtccttaatgttacgtatatgtctgtcttatggatgtgtgggtggtgccctgagggtggtaaggtcagtggtcaccttgccagaatcacttttctctttctaccatgtggtcctcaggtttgaacgcagaccatccagcttggtagcaagcaccttcacccactgagccctttctctggctcatgtggcctctcttctgagcacaggcacagtaggcataaggaaggcatagttaccgtggtgccagtatgtggtgtgccagatcccctggaaccaaagatacaggtggttgctagccatcgtgtggatgttagacattgaacccaggcccctctgaaagagcagccagtgctttaactatctagccatctccccagcccatcactgtgactgtccactgtctttatgtcttagacagggtatccctgcatagctcaggcaggcctcaaactcccaatcctcctgtctcagactcctgagagcgaggatgacagaggagggctgccgggagcagggagtccaggagttgtgtgtgttgcatgagctgtgcctctaaatgacctcaaagtcagcgttttgtatgggcagggccatcccctctgagtgtccctgaggggaaccagtgatgccagtgaggggtggccctgacttctgccatgttcatgctggactgaggtttagaggataggtgggcagagtgaacagtcacaggagaaagggactggacaggaaggaagggccatgttggtctgttgtccctgagccctaagtgatagcagccgccagcacagaagtgttggctgccagagccaggaatggaaccagctgtgcaaaggtactgtgagcagacatgctggcttgggccatgaaggggcagcatgcgtggcccaggcacctgggacggcccagtcatatgtaggctctgcctaggccagaacggaacaccctggtggaaggagttatcagaaatgcaaggacctctggggaatgggtgatttggactgggagcctccgcaccccaggcagcattggaccttggtcctgtttctcccacagtccatcccatgatccaggctgtggtctggcttccaggcctctcagcactcagcgctccacccaccactgacacaggttttcttgagaacattaactgaggttctgggggcaggcatctgtgcaggccgggtgggtgagaccctgtttcaacaccctcctgttgcccacacaccacaggaggcgccgtcttcctctgtagcccaggctggcctgaacctcgtcagccctgcctcgtcatctcgggtgctgggatggcggttgtgaggcaccatgcctgagttcttcatttctgcctttctgagctgttgggtcagctctggtgcattgggacaacactctggggccatggagtccaagggtccagtgctggcctgctatccctggcgtgcgataaagattaacccacagagagcgggagctgttgctcttccaggacttggcagattctttctgtggcctgtcccattgtgtcccagagtgccgacttcagcagctgctaggatccagttttttgcaagtgcatgacagagtgcgcacagccatgtggcatcctgcttaccagggcaaggtggtcatctacgggcaccccgcagctgccttaggagacactatgtcgctgagggtggcccttcttaattgtatggcatagattgtctcctggttccactacctatacttccctgtgcagggatgaccagcctgccacagcccagcattgctgttggtgttgctgcagtgatgctgtgtagccttcgtgacctctgcctcctcttgtcctcctgggttctgggatgatggatatacacaaccagggctgaccccttcccttacttgagatagtctttctcttccccttcctcctctgccccttccttcttcctccacgtcctcctccatctccatctcctccccctcttcctcctcctcctcccccccccctccatctcggcctccaagtcttactctgtctcctccatctcttgtactttctttctctttctgcagttctgaagaggccagggtgcggtgcgtgccctgcagtgtctctggaatgcatagtatccagtccctcagcagtttgtttccggtgcaaggtttcagaggcccacgtaggtcaggttgttcttgacatgggactagatcactcagacgaccctaaagtcccttaaattggctatagcagaaagatcagtaaaccacacaaatctgctgcatgcccacaggtgtccccagctccgcagtggttccagggtgacagactcaggagcatggtgatgtggccggccgccttctggacctgtttgttgttgttcaggaagctgagttttctctctcgagcttggagagagcccctggcctgtcccctcacacactgcagaggtgggggcggggtccaaatggggacctgctgctggggccatcacctgctgggtctgcaggctgtgagcagatggaaggggaagttggtaggtgtcttcgaaacttggacacagtaccctgatcctggccactcagaggccagggaccaagctctgtgacagatggagtctgcaggtcccatgaggcctgcgctaatagtgatgtgtttacctttgtggacacttacgtctacattttgattttgggatctcgagctataattggtagactgtagggatcacttgtttaagatatacacacctgtgtgatcttcagattatacagccaggtaatctacatagttccagaacatcacatccctcagagaaggccttctgtgtttaaggcatccaccaacgaacacatgcgttcccctctgtgttctcccaccctgggtgtgacctgtcatggatattgtatggctttcttgtttgggtcccctgtgttgctccagtgtgtgggtcaccgggacaaggatgcactgtgcagtatgagagcagcagaccattcgcttcctttttgaggtcttcgcacagccgccatgtctctgtccgttgctgctgctgctgcgtaacaggcacctccgatgtggaagccccacaccacactcgtgcatgcacctacacagatccccatgcggtgtgtgatgcctctcttgggtggccagaagtgggatcatgtcccaggcctcttttcagagacagacaggtcacctgtacatgcagcatgggagccaccatcagccactgggcccttcacagttgagcagtgtggctgtgcgggggatgtgtgagggtctcgctcagcagtgggcaaaccttgcaggagtctggcagaaggagctacggagaacacagctgtgccggggcaggatggagtagggcaggggcctttgttggcttgaggaggcagagaggagggaatcagggaggcagcaggaaaggaagtctcggtataacccagtcagcaggctagcatgagctcatggatagctcccacctctgctggccccaggccttgctctctgaggcagagtggtggcagggtcaagggcctgtgatctccctggctatagtttctgtttcctgtccattccagcccctttcctttttcctgtgcccagacctctctgtccccccattcctgtcactctaggatcacctgtaaggaatgtctgcaggtgatgggcatagcctgttttacagatggagtgacctgggttgtgtccccaggcagtgcgcagttgcagcccatgtgacaggtgcttgggatgatggggacacagcttccgacctccccaggagaaacccgctatagagagattcagactcacccgaggtcacccagacgtgtggcagcagacattggcctgaagcttgaggggtattgtcaccacttgcctgggtgctgccggcagacgtgggctgactgggcctcacgcaccgcacccgtagccagctggtgcccccgcctcccctcctccctgactatttttaaacataatttcctggaaaacggggctgcttgctcagtagacaattggctgggaggagagtgtctgagctgtgtcagggcccctgactctcccccctcctggccgcatctccagggtctgtcttaactcccatgattcagccagtgaggtcagagcccatggtccacgctggggtccatgctcggctacaggtggagcaggtgacttgggacctcagaatgttacctgcagccctgggagctgctgccagcagagctgaacccttccttctagccccagggagccttgcacaagttctagaccttctgcctctcctggtccttgatctccgcgccccagatgcagcttgttccactgtagaggcagacacgggtcagctgatagagccgtgccattgcagtggctgaagggttactcaccagcgccttatacagccgccgtggtccatccccatctcctgtcaggggcaggatcagtgtcctgaggttgtggtcctgcatccccctgtgctgtgcactgggagcctgcatcccttggctcacagcccctacgtcccctgaggagctgttagtgacgtcaggggaggagacagagtcaccctcattgcaacacccatctttctgtccacgagtgtctcccacaagcccagttcctgccgccatcacgcctccatagcccacaggggctgtgatcatttacctccccaagggtcatctcttggtcccagacgcagaaccacagactgttcactacagagaggccaaggcaaataccagggcagcttctagaaactttttacctgtggtcttcggtccctgggtcaacagcatcacagtccacccagtactaggtttgaaatccacacagacagtcacccgtgatctgtctctgtctgtgatccagtcatcgcaatgaacctggggcagggatgaaattacccctccccctccaccaccgcagggcaggggaggaagttaccccggtgcacaggcacacagcctgacacagggatggctccgtgaataaagggcttactgcacaagtgtgaagaaccaagtttgaggggctggagagatggctcagcagttaagagcactggccgctcttccagaggtcctgagttcaattcccagcaaccatgggatggctcacaaccttctataatgggatctgatgcattcttctttctgatgtgtctgaagacagctacagtgtactcatataaataaaataagtaaatcattaaaaaaaaaaaaaaaaagaaccacgtaagtgtgactccccagcaccaggtagaaagctgagtgacctgcacagctgttactccatcactggggagatggaggcagggggattgctgtgtctaacagatgccaagcagcctaagaaccatgagccctaggctcagtaacagaccctgacgcaaaaccaaaggcacagccagccatgatggcgcacacctttaatcccagccctcaggaggtagagacaggaggatctctgactccgaggccagtctggtctacagaacgagttccaggacagccagggatacacagaccctgtctgacaaaactaaaccaaacaagcaaaacaagcaaactggagaaggatgaggaaggcctggcctggcctctggcctctgggctccgtgctgattgtccttccccccctcccccccaggtatgacccagaagaaggctggccttgcagaggtgagtccccctgtctgaggaggcatgggctgacgtgctgctgtgtgtcctgaggctgtgcagagcacttctctggactcaaaaactggggggggggggggcggggcttcaacctggggaagcttgttacctggggatgctgacggctacacttaccaaatagtcatctggacggatgccaaagagctcccggaagtagcggaaggcaacaggtgcataggtcttgaagcggaaatcctggaagtggtgggcaggggtgaggttgctcccttcactgcagaggaggacgcagggggatagctgagaggacggtggctttttcgggtgcctcccccccatttgtcccatacacaaccccacacacaacttggggtcgctgcttagtgaggatattgtgactggcttcaggaaacacgttaaccatcatccctccctcgaatacacatgggcatggggaggnnnnnnnnnnnnnnnnnnnncactgcaagaggcagggccttggacaccacagcttttcctcgggccctcagaaggggagggtcccagggacaccccagagcctgcagagctgtgaggagaggggagctaggctctagtgtccggaggatgacattgggggatagataatctgggttcctggaagcagcgtgccccctagtggcaggtgtagagaagcacaggcagcttggccctggtgaccccccagcccccacagcacagcagccgccttctgcctcccaagccctctgcttctgcacttacagaaccttctggctaccttcccaaactgtttttggtccctgttccccaggcccccttggtgacagggcagccaggccctggccatgggaagaagctgggccaccgaggcgtggatgcgtcgggagagactacgtataagaaggtagccaagacaggtgtgggggctgggaagggaagcccccatgactggcccttagcctccctgcaaggatgttggtgtgaaaagcagcaccgtccggtctgctaaagtgtcagccgtcatgaatgtaatattgtgtcaccccacccccatgagacatagctatcccctctgagccctgcctcccacacctccagttcacttctgttgcggagcccctgctgtgtgtggctgtggaaggtggctgttagctggacagatgcagatggatatcctcagtgcagtaccgtgtgtgtgtgtgtctctgtgtgtgtgtgtgtgtgtgtgtgtgtgtgtgtgtgtgtgtgtgtttgttcatgtgtgtgtgtgctggacagcacagagaggcctccagggtcctgatgccaccaaccctccccacagaccacctcgtccaccctgaagggcgccatccagctggggatcgggtacacggtgggcaacctgagctctaagccggagcgggacgtgctcatgcaggacttctacgtggtggagagcatcttcttccccaggtaggccctcgcggctgcattctgagcacgccatctgtcaccagcaaggctccctgtgcccctgcctacaagtatttgagcagcaagaaggaggagacacacaggtgcccgcccacttgctccttggccaaagctggtcccatgagtgtagctgcgtgtggttctggccccaaaacccactcaaaagccaggcctggcacttgtctctaacctcagttcgaggaaggcagagaattcatggccacaccggcaatctccttcagaaaattcggtggcaaggtgttgacctctgacctccccatgcccatgtgtattcgagggagggatgatggttaacgtgtttcctgaagccagtcacaatatcctcactaagcagcgaccccaagttgtgtgtggggttgtgtatgggacaaatgggggggaggcacccgaaaaagccaccgtcctcacagctatccccctgcgtcctcctctgcagtgaagggagcaacctcacccctgcccaccacttccaggatttccgcttcaagacctatgcacctgttgccttccgctacttccgggagctctttggcatccgtccagatgactatttggtaagtgtagccgtcagcatcaccaggtaacaagcttccccaggctgaagcctgaaaacgagagctgtacaccacctcccaggggcaggagtgggtggttctgctgggttccggtgcacagaacagagagatggaggtctgtgacccctttaaggacacacctccctgtgacctcagatttcctgggctccaccatcacccaagagcacacactggggaccaagtcttcggccatgggatctggcttcaccctgccgctgtgggcctcctcacagcagcctgccctgttgtgctttttctggtccttgtttgctggctcctgttgagttggtcacagtttccaggaggctgtggattcatctagaaagtgcagctcgggcatcttggtcacaaaggccttgggggaagtgaactaagggcccagacacagggcaggtacctcggtcagttcccaggagggtcccgtatcacagtgaccatgatgccacgcggacaacagtgcaggagaggaacgcagccaggtgtgggcgtccctgcctctcaaagatatatatggctcaccacagtgggtggaggaaggacagacagatggcctggctggggaacgggtgtgacatggcttagacatgtgtccctacccatcagcatccccacctggagtgtggggaagactgacgtacagagatgacacatgaatgtcagctgtcaagaagtggggaagggaaatggccatgggctgagggccagcatgctgacagcctatgcttggaaggtgcttgtgacccaagatggctgctgagttgcagctaccacacagagggtccgggtagggcataggtaggaaggagagagatgtacccactgtcacccacttacagagcattcctcaaagcacgtgtccgtagcagctgaagggaggctggaggctcgtcacatgggaacatgcctgagcccatcacactctgtggatgacaatctgtaacatgggacttacttgtgtgggggtggggcagacaggccacacccctcacattgttgttcccgcctctgccctgtagtactccctgtgcaatgagccactcatcgagctctccaaccccggggccagcggctctgtcttctacgtcaccagcgacgacgagttcatcatcaagactgtcatgcacaaggaggcagagttcctgcagaagctgctgcctggctactacatggtgcgtgggagctgggcttctagaaccttctcactggccccagcatggggaagggtgcaggaacgcccacctctgtcctcccaccctgccacgccccttgagcccacagcagcatctcctcaggcgcatgagggccagggatgcagtgagccataggcacagacctcttacaaaaggccagcaatgcagggcttcctccgcttcacaggaccagacctccagtcccagctgcgtagctcagcacagaccttggaagcatcattcatccactgaatgatgcccaggtgggaccccagatgtcctgagctcaggagcagtgactgtgctggggatgggatgagaattctggccttcagagagcacagggagactccaggctcaagctttggccagggacagctcagaggcaaaggagcctgtcccccacctgatacactgaactgcatcatcccagggaaacacaggataaggagagaagtggtttccggcttctccttgtgtgccatgccatacagtcgtatgcagggtgcgctgatgagacagggaaactgcagactgacaccctgtctgcaaaccagagaaacaaacaaaaaagtgttaataggaactaaagagggaacccagtggttagagcaccagctgctctcacggaggacctggtctcagttctcagcacccagcgtaggctcacagctgcccatagccctggcctccgggcagcagacacagtgtgcatattcacacatgtaggccaacactcatggacatgaaataaaaacaactaggacagagccagatggtggtgccacacacacttctttattcccggcactcggcaggtctgagttcgaggccagcctggtctacagagtgagttccaggacagccagggctacacagagagaccctgacttcaaaaaccaaaagccgccgggtgtagtggcgcacgcctttaatcccagcacttgggaggcagaggcaggcagatttctgagttcgaggccagcctggtctacaaagtgagttccaggacagccaaggctacacagagaaaccctgtctcaaaacaaacaaacaaaccaaaagccaaccaaaaatcaaaacacaaaaaataagatgagaaggttgggggcgtggttggggtggagccccgcccagaatccaacagagggtctgggggtggagtaccggtaggcagttaggaagtcaccccccccaactcttctgagattgaaggatcaagttggaccttggtcatccacagcagccaccagccactgtacgatggctccttgtcctctcaccctacagaatctcaaccagaacccacggacgctgctgcccaagttctatgggctgtactgcgtgcagtctggtggcaagaacatccgcgtggtggtcatgaacaatgtgctgccccgtgtcgtcaaaatgcaccttaagttcgacctcaagggctccacgtacaagcgcagggccagcaagaaggagaaggagaagagcctgcccacctacaaggacctggacttcatgcaggacatgcccgaggggctgctgctggactccgacacctttggcgccctggtcaagacgctgcagcgagactgcctggtaagccccgccctcacgggggctgccatgtgtgctcagaagctgaacaatttgtgctggtgattcctattgtcccagcacgtgggaagctgaggcaggaggaccactcaggctagggtcaaagtgtgggcaagttaacctgtccccatatagaaaatgctgatgggggcctggggtgctgccggtggtcagcgcgtaggcagcaaggggctggcctggcctctgtccccagcgccacacaaaaagaaacaaggagttgaacttcacaggaagaccaacaaaatctactaaccggggctctcagagtctgaaccaccaagcaaagagcatagaagggctggacctaggcctcccgctcatttgtagcaggggtgcagcttgaccttcttgtgggtcctgaacagctagagtgtggaccttcctgtctgggatatgttcttttagttgggctgccttgtctgacctcagtgggagaggaagtgcctagcctcacagagatttgacgtgtcagggggaggatacaaagggggatcccccacctgctaagaggagaaggggaggagtgaaggattgtgggaggtgactgggagcggggcagtaaagtgaataagtaaaaaacgtaaaactaaaagaaaaaaagttagcaggtaaacagagctcaagggtagagaccctgccctctatgaggggcccagcgttccatcctgctgctgcagaaaccaggtgtgaagggacgccataatgtcacgccataatggtcctgagtgagcaggatgtgaggagaagttactgcctcctgggtatcctggaaggggaaaagggggacaagtgaaggggagaggacacggcccaaagactgaagggaggccgccaggagtggtgacacacacctgttattctacaccttcctgggaggctgaggcgggaggattgccacattcggatttcagtctggactacatagtgttaagggtctcatatagaacaggctatcctggagcttgctatatagaccaggctggacccagagacactgcctgcctctgtcttccaagtgctggctggaattaaagatgtgccccaagcaaggcctccctaaaaatagtttctcaagtccctgacgctgcagagttggggcaggggacaggcattggcagtcagcaccctgtcttctgagctcaggtccatagctctcaggctccctgaaggaccagctcagggggcctcttggctcttctgcctgtcctgagtggctctggcttccagccctgggagtcacccccctgcaccacccaggaccaagcaacctcctcctgggccaagccctcctccatccaggaccttgttcgtcttgacaacacttagacccctttgccagggtgctggggttggtggctgccccgcctgccccctgacctgtcctactgtcaggtgctggagagcttcaagataatggactacagcctgctgctgggcgtgcacaacatcgatcagcaggagcgagagcgccaggccgagggcgcccagagcaaggcggatgagaagcggcccgtggcccagaaggctctgtattccacggccatggagtctatccagggcggagctgcccgtggggaggccattgagacagatgacacgtaagtggggtgcactcactgtagcctatgcttcttcccggtggaaaggctgtgcatgcagttacaggccccaggcgtcgtgggcacacttacatcccagcacttgggttggaggcagaggcagggaatctcatgagttctaggccagccagcacagtgtagtgagaccctgtgtaacaaaaagagggacagtggctttgcagtgacccagcaggaggcctacgtgacacccctcccccttcatctagctggcaccccatggccctgaaagagaaggtaccctgccctcagagctgggagggagagctgtcattcacaggcatagggataggcctctcagaactgtcagccacaggctacctgtgagggacaagagtaagcaaaggccctgtgcagctgtccccctcaccatcttggcttttgtagggtctgcgtggggccccggaggggaccaggtgagcctgtgcgtcctgtgtggtgtgagatgggcctgtggggcttcagctgcagcagcttcaggcctgtgggccactgaggcattgaggaaggtcactaacaggactgtgccccagggagcaggcttgttgcattaacacctcaggatgtctgaggcagctgtgccctgtggtgtgcatgtgcatggagacctgctgaggttgctcaggctgggccccagggcagcttctgcccgtccgtctgctcccagaatcgtgagcctggccctcctgtgctcggctgatccgagtctctctccacaggatgggtgggattccagcagtgaatgggcgcggggagcgactgctcctccacatcgggatcattgatattctgcagtcctacaggtgcgcgggccacgcccaccaggttactcttactcccctttctacctggccacacccctcaggctacctggccatgcccacctactcactcttcttgaccccagcccacccagtcttccgctgcatctgggttccacccagattgactctgcccctgtcagttcagcgcagtgggttcctccaagccctgcctctcaggctggcattgggtcagtgggctgacagtctggggcccatctgtcaccaggttcatcaagaagttagaacacacctggaaggccctcgtccatgatggggtgagtcccattcattcattgcacccattgaccctgcactgagcagaccagggtgggcaggggacatacaggtgccctgcagctcagcactggcctctggcctggttcccatgggagtgctgggaagggtttcgctgtgtgctgggctgctggggcttccacagcccctgtctcagtgacccccactccagtgttcaagactcccactcccctagaatcgaggcttaaacagaaactttccaaagggtccttaggatggtcctggcagtagcttccagaatgtgtgctaaggttagggaggagaggcactcctgtcattcggccactcaaggggctgaggcaggagaaccctgaggcaggagggttggaggtcatccttggcctcaaagtgactgtgtgtcagcaaacaagccaaagaccggtgcatgtgcgtgtcctatgacttgtgaccccatccctgctccaccgtgcttccctaggacactgtctcagtccaccggcccagcttctatgcagagcgcttcttcaagttcatgagcagcacggtgttccggaagagttcctgtgagccaccacctgtgggagggggcagagggccagtgagttcccagctggggttgggggaagagtgagaccagccaggcgcgctccagtgagccccgatcggaggccttgggcccagagggcctgcatgtcaccagttcacataggcccagcggcaggacattgggaggggctggctggcagggcctcacccagcctcctgtgcagtcctgaagaatggagcataggacatagacagtgaaggagggggagttgctgccaggaagccatggaatctgaggctatcccagcactgaccccttgccccttctgactctgcagccctgaagtcctctccatccaagaaaggacgtggtgccctgctggcggtcaaacccctggggcccactgctgccttctcagccagccagatccccagcgagagagaggatgtgcagtatgacctgcggggggcccgcagctaccccacgcttgaggatgaaggtgacctgccagcctgggcacaggggctggggcatgccatactgtggatgcagaggtcttagggcagcctgaacccaagaggtggtgggaggtgaggagggagggagcgcaccagcaggaaggaatggtgcaggccctgcaggctggtcagtggtccaggtttatggcactaacgtgactgaccagactggacatggtggctgatggagcagaaggccagctcctgaggttggagccgtgtgggaggggggatagactgcagccatacaggctcctgcttgctgctcccacaggccggcctgacctcctgccctgcaccccaccgtcctttgaggaagccaccacagcctccatcgccaccaccctgtcgtccacctccctctccatcccagagcggtccccttcagatacatcggagcagccccggtacaggtaggcagggttcaggtgggtggagcagtgtggagccagtgctgggagcaggtgggcacagccctgtgtcaccacgctctgacagcaggtacccatcccctctgtgcctctcccacaggcggcgcacgcagtcttcaggccaggatggccggtgagtcccttctttccccgtggccccacccaccttaaaaggcagcaacacttggcactgagctccaggcttcaccccacagacactgcaggcctggccagcttccagaaccttccgaccctcctgcacctcagttccagacaccagagcagtgccaagctccccggcgtgcaggccgctggccacgtggccacctgcttgtgctgcgaatgcactccgggcctcagcaggacccagcggctactccccagggatcaccccaggctaggactccctgggaaccaggaattgcatgcagctctggggtcagggaggaaactgaggctgggccgtcctctgcaggccccaggaggagccccatgcggaagacctgcagaagataactgtgcaggtggagccagtgtgcggtgtgggggttgtccccaaggaggagggtgcagggtgagtgtccccctcactcagggatgccagtgctgtacatgcccagccagccctgcctgctcttaacacaagagggaacaagtatgtgcacacctgtcacccgagcactgaggcagagggcggtgtcctagttagggtttctgttattgtgctgagcgccacgaccatagttgtttaggaagggaagggtttatttccactgatagctctcaggtcacctccatcactaagggaagtcatggctaaaactgactgaggccatggagggcacctcagcctgcttttttatacccaggaccacgtgcagggtggccccgcccagagtgggcagggcctccctcccacatcactcaatagagaaaatgcccatctgactgggtgtggtggtgtacacctttaattctagcactttggaggcagaggcagggcaatctctgtgagttcaaggccagcccagcccggtgtacagaacgagttccaggatagctaggctatgttgagagagtatgtttgaaaataaatgtaaaaatcagtaaaagaagaaagaaaatgcactgtggtctcgtgcaggacagtgtgacagggacaggctcaagcaggggttaggggatagtgtgacaagggcaaactcatgtgcagggcagtgtgacagggacagacttgagcaggacagtggagttgggaccgatttcctcagtcaccagtccctcttcaaggatgcctgccttgtgtacagttgacagatgggtagcacggagggctatgagttgagatctgtctccaaaaccaaaaatagtgacccctgagatggagagagagttggtagatccagctagggctgggagagtgggctgtgcacaaaactatctctgaccctatcactgttctgtgtctccagagtggaggtccccccatgtggggcatcggctgcagcctctgtggaaatagacgctgccagccaggcctcagagcctgccagccaggcctcagatgaggaggatgcaccctctacagacatctattttgtaagttccccccaagacccctcctcaggcccctttgggcccttggcctccaaggcacctgtggacagttacaactgcttctgtctctggtgtgatcactctgggtggcagggccattgctccccttggccatggggacacctgagcaaagacggaggccccgtgtctctggcaagctgggaaccacgcgaaagcttcgtccttctgggggagggacactcgtgatagtgtggcctgggggcctggtgagtggctggggggtctccatgctgcctgctctgtgagatgggacacgccccttcgtggacaaggtagatctgaccccgtccaccacggagagaaatgctgtcatggttgcaggcccagaacagggatatacctgtaagcagtcagagctgcagcagccccctgggggtcagctggcactatcacaatgtcatctcttgaccctggtgctgaaacctcagctggggtctagggttgtcctctcccacctggggtcctcactgctccctactaactcacccacggtccctgagctgcttcagttaggtctacgctcccacctggtcagacatactgtcacctgtgttggggccttatgggatccctagtccccaacccagccacacatcctgcttccgtcgcctgtgcctgctagtcctgctcagctgcccacctgtatcccctgcctggttcccgcttcatcctctaccctctcctctcttccttcctcccgcccggcccactgtgtggccagttcgcccatgggagatactggcttttctctccccgtcgtcgccaactgcgggccgtgacaccaaaccacacaggcactgtaagtgaccacagcccgccacgcgtggagatggggctccagagcacagcacaccccttttctcaagtgactgagagaaagcacagctgtagtgtaggtcagctgagtcccgcctagaccagagacagagaagccctgtgacccgagcgccactccctctcaactacccaagccaggtctgcagtaccccagcttactcatgtcactctcgggtgtgggcacttaaccaggcttgagtgttgcagggaccactgagccaggacctgcccttccctccattgcatacttcacaggaggagaaactgaggctcaggccacacaaggaacccacagggcacagggttcagaggaacccatcctcacagtccatcactcgtcctagtgaccttccaggacacgtgactgcgctgcagtgggccggtctcgtagctggggctgttacctctctttccacaataagtaccaggcccagagaggcctgggtgacctgcacagccctggaggtagcaggactgtctgtcaccccagcattaaaaggtggaagcaggatctgcaatttcattgagccagggatggctaagttgggggtgcaaggctgccctctgcaggatagattgttggcctccttgcaggaggtagaccactggcgtctggctggcctctggggcatggcacactccgccatacccccaccccgctcttgacccccaccccgctcttgatctacttgctcagcaccatcagccttgttgtctgaggcccttctgtgccccactcctggctgtactccttgacactgggaagccctgcagaaggcaggatgacagcccaggactggctctcagcggtttcggccctgggagagcccgatgaggttcagcttggatggaactcgcaggagccatgtccctgcacctaccgtgctcagcggtcaaagcttgcagtgttgtctgccctgtgctcagcagcctgtgacttgcagcaggctgttggggctgtcgagggtaggggtaagcccagggaggtcagagcagggagggccccgctccactacaggctggatcagtggggaccagggtagtgggacagagggggcacatggggaggaggaggggaggaaacccccggcccgccccctgccggccctcctgcacccctgctttactaactgcttcccgctgctgctccccttgccgccgccgttgcttccccaaggccaagggttgggggcaggtgcccctcacagggacccggggttgcggctgctccctgggattggggtccccctcttttactttctgtctcttccttctgcctgtctgctcctcgccccctgctcttctgcacccctcctgcacgcgctgctcagcccaccgnnnnnnnnnnnnnnnnnnnnctgcacgcgctgcgcagcccaccgacgagaggagctgggtgtactccccgcttcactatagcgcgcggcccgcctccgacggcgagagcgacacagtaagtccccaggcagggtgggaggacaaggccggagctcctcccctcccctggcgactccctgccctcctcctctagctcctcctccccttcctctggcgcctccttctcttcactttgaatcctcacccaactctttaggctcctcttgctccaactcctccttctccccctctgcccctccccgctactctgggcacagggatctctaggtgtaccaaccttttggcccagggaaaccagacctggcctcggggccacccacacctgtagctccgaggctgtaccaggaagcttagtggatggcaggggccccgcctgggtcctgccctccctcacctgcccttctctggtctttgcagtaacttctatgcagtccccaatctggagcccagcgtccttctgccaccccagccacttcctggaggcgctgccccccactggggctcagagctcagcgacatcacctggcccaaccttgttctctccctccccactgacggacggcactggccaggcccagacccaggatagctcaggccgccatcagctgctacctgtgcctgttggggcagcaagatttggagtgcccatcctgtatttattttgggtctttttttttggacgaagagtgagcacaggtgtgattttctagaaagacgacaagacacagaaaacccaggaagaggctgcagccaccagcctaggtggatcaggctctacgtgtctcactactctggggacagtggccccgtagctccagtaaaagccacacactctagggctcttgttatggcctgcagaggagacaggccctggagcctccgcttgccagcccaggtgtgtgctcctgagttgggtcacctcaacagagcccctctgtcacctcaggtttgggacccgagcaaaccaggactaggcatgccctgtggtctttctgcatctgtttactgccactggaaggacatccccacgcatgactgtcacctaatgctggactgggagggtccatgttgtctgcctctcatccccttgaagccctgagctggtgccgtgggtcccctcaactaccaggggattctctgccctaagaagggcacagtcaggctgcaggctgagggctgggtcctaagacaccgtggctgaagaaaataagggagaaagtgacatcacctcagcaaagccaactatgtccaccgaacaccagggagattgcggccagtctcctcccctgggcacaccccagtgtgttgggtacagtccaatcgtgtcatgcccctgcttcatggatgttccacccacggtgtgctggtaggaggaatcaggctgaaatgttctgaaagccagcagcctgaagccactgcttttgggccagccgcgtaggcctcttgggttgcaccttcagggacagaggtcaggacctggctggcttccaaggactgcagcagccatggaggcagtgaggagcatgacacaatcatcatggccagaaaaggcatggccagggacaggacccgtgcgggggtggggcaaccgaaggagagatggacagatgtctgtccctggacctcagtccccttcctgttttgggatgcacagtgaacacactggtaagctgctgcaggagttaattcaggggctgcaaaggcaacttgggttgggccttgcacagaccaggcaggtataatatcacacctgtcatcccagcacttggaaagttaaagcaagagggttgtggcaaattccaggctagcctgggctacagagcgaaatgagaccaaaagataaaactcccagggctggccctaccactcagtgggcagagctcacccagctgcgtaagccctgagttccatcccagcaccgcagaaaccagatggggtggcacacagctgccgtccctgacttgggaagtagaggcagaaagcaggcatgcaaggtcatccttggctgtaaccagttggaggccagcctgggctacatgagaccctctcaaaagagaatctgtaaatatctttgtgactccccatcgtgtccccatcctgttctctccaacggccactattgccccaccgtggacggtgtgtgaactgtactgtaaggcctgggggctcctccaaggctgaagaggtgccctctccggcccacttctgttctcctcaagccatcccagcaagtcccctgtccagccccacatcaacctcagtgcaatatgccctccccgtggggtcccttggcacggtactgtctgcagccccttgtctctcacccctagctccactctccggtggttaaaaatcgcatcgcacatcctccccccaatcctgtttttattgttgaatccattctgtaaactacaaacctcgtgtgtcttactcatcaggacttgggatccctcgtcctcagcctatgtggtctggtgtttgacaatccaagcacagtgtcctcttggcaccaaccagaggggcctgtccctccagcgcagccggcaaatgtatgcagtccaggtccccgccccacctgtcacagcccctctttttgagatctgtaataaatctctaataagaaacagctcctctccggtgacttatgcgtgcgtgcgatgggagagcaggcgaagggtgggcaccacgtgttttgtctcccccgctctaaaccctccctggatcccacatgatgaatcccaattcgcagatgacttcctttctccaagcctaaacttccctatccatagattagccacaagttgagcgcagtacgcaagctggcgggcgtagtagtactcagactcgtcctggagtcagccagagactgtctgttcatgtcctgttgttttattagctcggaaccggttgctacaaggctaccctagaaaccgaggactcccgcgagcgcttgggtctccgggtttcaatttttagaagtacaccgggccctgcaggtttaagttccgcccactctagccacgcccctttgacgtccttttccaagcccagcaagacccctaagcgcagtttctgggttcattggccccgccctcagatccaatgtgtccatctcgcccccaaggtcccgcccaccgccgctctacttcctcccactcctcagtcggccactctcgactacatatcctgcccgtacccattcacagttcgtagttacagatgtcaatcttgcctcaatcagcccctcttccaccctctcaaatcctgatatgcactcctccgcccattggtctacgcctgtcaatctagtttaccagaccccgcccaccccggctcccgtaaccgccattcttgcgttccttctcaggccacgcccagcgcaggtccccggccgggtctcccgatctacagttgtcgatctccgtaagccccgcctaacccagccctattctttccccataagctcctctactaggctccgcccctagggcactgcccatgcaagtgcaggctccgcccactaggcgcctcttccgccctggaacaaccgcctcgtagctccgcctccctaagcacgctactcgccggtcacctagggcgcgagggagggcccacctaggtcagtctccttcactgcatgaatggagcgtcaatccgctagttctaacggcgtcccgttaggaatctactatgtgttcccagcttgagaactccggagaaatctcgggttatgttgtccctggagtcccggttagagggagtaagtcattccctgtgatcaggcgcactttggacagtccttagagcgccgcgccaaaggaaagcccccggcgccaagcttcctggttgtttacgcgcgcgcatgcgcggcgcgggccgccaaatgggtcgggactctcgctcgcgctcacggtctgtgggtcgcaggggtcggaagcagcggagtcgaagccggggccggagccgcagccggagtcggagtcggagtcggagtcggagtcggagccggagccggagccggagccatgggcggagcagccgaaggcgacgggaacacgagcggcggcgcgaacgcaagcggcgcagccgagggcgcaggtgagcgtcctgggggctgctcgggcctgggagccgagggacaggcggggcagtatccgagatgccgggctgcgccggggcaaaggagacttccggggaccgcgggccatgagcataggggaccgaatgactccactcgccacctctgcattcatagacattgtcttgtcccgggctggcctcctgcgtcagcctctggaatgctcgggattacaagccattgcctcacagttaaggttttttgcatttcctcatagttaattctgctcagttgacagcccttcttctcaactggcagtacttctaacaagttgaccaaagcctaatcaggacaccgttcatacagcactggagatacaagcccgaacagccacatctatcttttactgtgggtactggggattcgaactcatgtcctcaaaatactacctggtggtattcctctttcgtggttcctgggctgtcagagagtccatctattgggcctctcgtctgtcatttctcatcccttctacctgtcatctcagcaggacttgacggcactgtacacaccagtaaccccaacacttaggagacagataagaaccagcctggctgtagagggagttcccacctgatagcattgtagatgtcatatttaaaataaaacaagcactcagaaagcagagacaggagggtctctgagttccaggacagccagggctacacagagaagccagccctgtctcgaaaaaaatcaaaaattaaaagaaaataaaaactacataaaaaagaactactccctcacttttaaccttcatttctcttgctgtattgtctgttatggccctgggacttgtgtagctctactatgaaggacagcctagctcatgtggggagcaatgtgatttacaggccggtgaggctagaattctaggcaagtacctcagcacctaggatggtgcccagcagcagccagcattgaacaggtcttgatgtgtccttcccacaggtcagattcggaaggagagcagcggcagaagtctaggaggcgaagccagagccttcgaccaccccgatggcactcacagaaccagtcctcatgctctgactcgggtgaggagcgggctcagggctcctgggcccgtaagggtcacaggcgctcgtggtccccggggtcatcagcgtctagcttggactccccaagacgctcccggagtcccgggacagctaccctggccctgagccagcagcagagcctgcaggaacggctgcggcttcgtgaggagcggaagcagcaagaagagctgctcaaggccttcgagacgcctgaggagaagcgtgcgcggcgactggccaagaaggaagctaaggaacgcaagaagcgggagaagatgggctggggtgaggagtacatgggctacaccaacaccgacaacccctttggagacaacaacctgctcggcaccttcatctggaacaaggccttggagaagaagggcatcagccacctggaggagaaggagctgaaggagcgcaacaagaggatccaggaagacaaccgtctggagctgcaaaaggtaggccggcctcgcacgcacgcacacttgcatgggagctcacatcctcttctggaggctggatgtgcctggacacacgcctctcaccatggtggctccctgtgttgctgtccaggtcaaacagctgcggctagagcgggaacgggagaaagccatgagggagcaggagctggagttgctgcagcgggagaaggaggcagaacactttaagacgtgggaggagcaagaggacagcttccacttgcggcaggccaagcttcggtgcgctcctccctggccttctattggaaactacaatctcatgccaatctctgccaggcgtggcgtgtgaactcatgagacaaatccccggggagtcccgttaagacagtgatggggatatgggatccattgtccagagtatctccgcctcactgaaggaacctgagcacagacctggtcagatgtattgaggaccccagctcaaccctattgtcccaccttggggagggccaggctcacagggccatctgacactcctatcagtctgaacctgtttggctggttggggctgagggtcagctgtgccagcggaactctggccctgaccctgccaccctatttcctcctgcagctccaagatccgaatccgagatgggcgagctaagcccatcgacctcctggccaagtacatcagcgcagaggatgacgacctggcggtggagatgcacgagccctacaccttcctcaacggcctcactgtggcggacatggaggacctactagaagacatccaggtgctgcacatacttcggtctgggtagctgtacctggctctgccctgccctaccctgccctatattgcctcagccctcctccccacacccctccttcaggccccaccgctcacagccctgccccacaggtgtacatggaactagagcagggcaagaatgtggacttctggcgggacatgacgaccatcacagaggatgagattgccaagctccgcaagctggaggcctctggcaagggcccaggtaagcagtgtgggacatcttcccagctcctctgaggcctctgcagggcatggcagcgcctgaatgctggacaatagaatgtgtctcctaaggagcctcagggaatggccgcagcccgagacagctgctatccctgtctgcagagcctcagccttcaccagggcaagcagagtctaaattggtgtgctgcccagctactccctaccaggcaggcctgttcctgagccccgggtggggagctgggaacctcaggccatgctcaacaacctgacctacaggtgagcgccgtgagggagtcaatgcctcagtcagctccgatgtgcagtcggtgttcaagggaaagacgtacaaccagctgcaggtcatcttccagggcatcgagggcaagatccgggccgggggccccaacctggacatgggctattgggagagcctgctgcagcagttgcgtgcacacatggccagggccaggtgaggctttcacagggccttggcacctgtgtcctccctgaccagtgcttctttagtgattgtcacctcagcaccgggctgcctatcccgctgcttcacccaggcccctcctcctccctacccttatacacatttctttttcctccctctgtcccctcccaatctggcaagagaattgtatatagattctgtgcatgtttggcagtggtggctgctggatgtccccatgccccatggatggcaactgttggcttgccttggttcctctggatgtcccccatccaagtagaccaagcacctcagccagttggggccacactgtgtgaatgtgccctaccaagggactgagatagtgacaccctcctttttccaggctccgtgagcgccaccaagatgttcttagacagaagctgttcaagctgaagcaggagcagggtgtggagagcgagccgctgttccccatcctcaagtcggagccctcggccgcccacaggtgagcagcgtgacccggcaggtggggcacccttaggtgggtgaagaactggtacaagcctagcaggatgggcctcacctcttccttcaccacccgtacagccccgaacctgaggagcgaccccccagccccgggacttcagtggacccagtggagcctgtggaacctgaggaggccacagcaccaggagaagcagagggggaggcagaaggggaggcagtgctgatggaggaagacctgatccagcagagcctggcggactatgacgccggccgctacagcccacggctgctcacggcacacgagctgcctctggacgcacacgtgctggagcctcacgaggacctgcagcgcctgcagctgtctcgccagcagcttcaggctacaggtaggggctggcccagactggggaccttgtcatggcgggggcagggatgggtgtgggcagccccaggtgacccctctgccctcacaggtgatgcgagtgagagcgctgaggacatcttcttccggcgtgcgagggagggcatggggcaggatgaggcacagttcagcgtggagatgccactgggcggccgggcctatctgtgggccgacaagtaccggccgcgaaaacctcgcttcttcaaccgcgtgcacacgggcttcgagtggaacaaatataaccagacgcattatgacttcgacaaccctccacccaagattgtgcagggctacaaattcaacatcttctacccagacctcatccgtaagcgcgccacacctgagtacttcctggaggcttgtgcagacaaccgggactttgccattctgcgcttccatgcgggaccgccctacgaggacatcgccttcaagatcgtcagtcgtgagtgggagtattcgcaccgccatggcttccgctgccagttcgccaatggaatcttccagctctggttccacttcaagcgctaccgctaccgtcggtgacacctgtgggctgcctgcccctgtcaggctggcccctggacagctcccaggtgggaaggccaagaggaccaggaggcctccttcagaagccgtaggaatctgtggacttcagtcaccagcactgtgctggccgcagcccctctggcagatccctgcctgtcctgaaaggatttttaactgttcttgggaagactgcttggggtggcagaaaggtcttgtttccatggacttgttcaaccggggaaccccgtgtggttttgatacatttaatagaaagcttattctaaactggcttctgatctgagtcacagggcagataccacacccagatggctcagggaattggggtcaggactcagggtcttctctaacaagaccactgccgtctggggagacatggctgtcaccactggggtgggtcattgtttgcacccagtggaggccaaggataccaagtgtcacccattggcgaggctgagaggccaccctgtcatcccagcccctaaccccatggaatgtagcaagacacacacctgtccagataggactatactgcagcccaaaagtagccctgtcctgttagcccagggaggtgtgactaatggcctctgccgtggacactcactcatccccaaaagtcccaccaggacagagctgggacatctgagcttaggagatacttgtatgccttacacagcacatagcatgttgggcctccgtttctttacctgggctacaaggggtccatcccctcccccactacactatgaagtctccggcctgttggcttctcctgtgtgcagggtcccagcttgcaaagaggcagaactggggaaggggatgggggcatgcagctaagggcatcctgaggtgcccagcgttggagagcaggccccgccctccggaagggggtccagccatcccagggcactgaggagccataggtggtgaggcgggcatggatgcagacccttgctcagacctctcccaatgcacacaggactctaaagtcccggaaactgcctccagctcccacgccagttgtttccttcctttggctgtgtccatggctaagaataggccccatagcctggcccccagcctcggcggaagccacagccacagggggtacatcctgagcctcagctcccacaccaacccagcatccttgagcccaactcctgtccttgactgtggttgggagccttagcaggaaactgcagctccgggcctcacctgatggtcttgtgtgggctctacatcacactatgtttctgcctaagtttcaccatgcattctgagctctgtcacctccacacaacaaagatgagtgtccttcagccattacctgattctccagaccaaacatatccttatctcaggtcaagggacagaggaagaacatacaaccacctctctgtttcatccaccccaacccatccacatcaagagcagcctcagatcctcttcccaccacagctcctcaccctcaccaccaaacattcctgccaggacacctaggcagggtttctctgtgtagccctggctgtcctggaactcactctgtagaccaggctggcctcgaattcagaaattcaccagcctctgcctcccaagtgctggggttaaaggtgtgtgccaccacgcccggcttttttttttttcttttaagatttatttattattataaataagtacactgtagctgtcttcagacgcaccagaagaggccatcagatctcattatgggtggttatgagccaccatgtggttgctgggaattgaactcaggaccttcagaagagcagtcagtgcttttaccggctgagccatctcaccagcccccgaaaaaacccaatcttcataccccttacacccacagtattgatacctagccaaatgttgagaaggtaaagacatttgttttgcctcagcagcctgagatcagaaacgtgggatgatctgtgtccatttctgtccctagcttatgggatggatagacagggcaggcccagctaggaaatcagaggaactacaaacttcacgggggtagaggccagtcagggtcaggacctagtgttgggatgggtgggaaggcaggaagggtgggggtggtgcagcaggcaaggggcttcctgctgctgacaagagtctggctgaccctgggcagactatggaactgggagttgagtcacagccaggccagggcatctcaaatccccaccaggacctgtcagggccaaagagacccaaggtcacctcctccacgcaggcccccctcctccagctactaggcacaggactaacacccctgcctggctcagtcatcctgggcaactgtcagggcttcaggcagtgagtctgcaggggagggttccccaagactgctccatctctagaggacagcctggtctccgaccttacacctcccctaccccagccctctccttcccctccagctcttggtccctgcagtcaggctggagctggccttgctgacccaatatccctggaaggctcctggacagccttggcgaaggttagttgctgctgtgtcaggaccagccccatttggcctcccagctcttcccacatggcctccctctgggtccctgacctttcaacaactgatgtctctctctactctgtcacccttgtgccctgcttggttcccaccctagcggctgagaggcgaggccagcgccagcgcagggggtggggctgacgagagtcggcagaaagacagatggagacagggcgggacgggaaacagcctcacagtcccatccctccagccctggacgcctgagggtctccagtgctcccctgtacccacggccccagggcttctgttggggcctcccctcaaccaacgtgacttggtttccccagggaactcccctacctgctctctctgcctggcctggaacaccacagaggacacctaggtacaaacagcacaggtgagtcccttgcctccctactgtgactataccactgtacccaggtaagcctctgcatagatcctggggaacccagatccactaacaaccctgctgtggcctgcctacaggggggaatgatagcaaccaggtgccaaagttccctgaaggggatcctgtggtgtgacatttactccggtggtctagcctgggcaagtgcagtttccctggtggtacgtgggtacactggtttcctgtgtctgggtgaggccagtccaagatgctgtggcagtgatgaagttgggggtgggatggaatggagctgggagctacagtgtgtggcttggagctgggcatggtgattgtactcacataggctcagctcagaacctgggtcacatctcgatggcacatgtcctacccagagaggggcatccatccaacatgccagaaaacaggcctcggggcccctcccccagcccactgccacaggatgacacctgcaccctggaactgtggcacaaacaggaagcaggcagtggggggaacagcatgcggtgaaggtgaacctgagtctgtggggttgtgggcatgcacactgggtatttggggtgctggcagaacagcccactgggcacagctgcggccaaggctcagcctcaggagctcataagcagaaagtcaccagggaaggcaaattcgttacacggggaaaactgaggctgtgtagcgtggctatgggtgatggaggtgtggggagcccaggctgctctgaggcctggtgggggaggcttgttgcagatggaggagttgggagaaggaggaggggcctagcctgcagagcccagccacacaccacattccaccaaggctggaactcagccacccagcctgggcctcaaggaatgagctctagcgtcccagggcacacatatacaaggatgaggccccatcctagacagaataccactgccttccacccccaacggtgggaacatggctcaggaacgcaggaccatcccacatcccagggactcagggtgggagggttccagaatccttctgcttcc

SEQ ID NO: 1273 - DNA, 4185 bp, Mus musculus
ggcggcgcttgttgttcagcggcggcggccgagctcgggtgcatcctcgggcccgccgccgccgccggagcgttcggccatggagctagaggtgccggacgaggcggagagcgccgaagcgggggccgtgacggcggaagcggcctggtctgcggagagtggggcggcggcaggtatgacccagaagaaggctggccttgcagaggcccccttggtgacagggcagccaggccctggccatgggaagaagctgggccaccgaggcgtggatgcgtcgggagagactacgtataagaagaccacctcgtccaccctgaagggcgccatccagctggggatcgggtacacggtgggcaacctgagctctaagccggagcgggacgtgctcatgcaggacttctacgtggtggagagcatcttcttccccagtgaagggagcaacctcacccctgcccaccacttccaggatttccgcttcaagacctatgcacctgttgccttccgctacttccgggagctctttggcatccgtccagatgactatttgtactccctgtgcaatgagccactcatcgagctctccaaccccggggccagcggctctgtcttctacgtcaccagcgacgacgagttcatcatcaagactgtcatgcacaaggaggcagagttcctgcagaagctgctgcctggctactacatgaatctcaaccagaacccacggacgctgctgcccaagttctatgggctgtactgcgtgcagtctggtggcaagaacatccgcgtggtggtcatgaacaatgtgctgccccgtgtcgtcaaaatgcaccttaagttcgacctcaagggctccacgtacaagcgcagggccagcaagaaggagaaggagaagagcctgcccacctacaaggacctggacttcatgcaggacatgcccgaggggctgctgctggactccgacacctttggcgccctggtcaagacgctgcagcgagactgcctggtgctggagagcttcaagataatggactacagcctgctgctgggcgtgcacaacatcgatcagcaggagcgagagcgccaggccgagggcgcccagagcaaggcggatgagaagcggcccgtggcccagaaggctctgtattccacggccatggagtctatccagggcggagctgcccgtggggaggccattgagacagatgacacgatgggtgggattccagcagtgaatgggcgcggggagcgactgctcctccacatcgggatcattgatattctgcagtcctacaggttcatcaagaagttagaacacacctggaaggccctcgtccatgatggggacactgtctcagtccaccggcccagcttctatgcagagcgcttcttcaagttcatgagcagcacggtgttccggaagagttcctccctgaagtcctctccatccaagaaaggacgtggtgccctgctggcggtcaaacccctggggcccactgctgccttctcagccagccagatccccagcgagagagaggatgtgcagtatgacctgcggggggcccgcagctaccccacgcttgaggatgaaggccggcctgacctcctgccctgcaccccaccgtcctttgaggaagccaccacagcctccatcgccaccaccctgtcgtccacctccctctccatcccagagcggtccccttcagatacatcggagcagccccggtacaggcggcgcacgcagtcttcaggccaggatggccggccccaggaggagccccatgcggaagacctgcagaagataactgtgcaggtggagccagtgtgcggtgtgggggttgtccccaaggaggagggtgcaggagtggaggtccccccatgtggggcatcggctgcagcctctgtggaaatagacgctgccagccaggcctcagagcctgccagccaggcctcagatgaggaggatgcaccctctacagacatctatttttaacttctatgcagtccccaatctggagcccagcgtccttctgccaccccagccacttcctggaggcgctgccccccactggggctcagagctcagcgacatcacctggcccaaccttgttctctccctccccactgacggacggcactggccaggcccagacccaggatagctcaggccgccatcagctgctacctgtgcctgttggggcagcaagatttggagtgcccatcctgtatttattttgggtctttttttttggacgaagagtgagcacaggtgtgattttctagaaagacgacaagacacagaaaacccaggaagaggctgcagccaccagcctaggtggatcaggctctacgtgtctcactactctggggacagtggccccgtagctccagtaaaagccacacactctagggctcttgttatggcctgcagaggagacaggccctggagcctccgcttgccagcccaggtgtgtgctcctgagttgggtcacctcaacagagcccctctgtcacctcaggtttgggacccgagcaaaccaggactaggcatgccctgtggtctttctgcatctgtttactgccactggaaggacatccccacgcatgactgtcacctaatgctggactgggagggtccatgttgtctgcctctcatccccttgaagccctgagctggtgccgtgggtcccctcaactaccaggggattctctgccctaagaagggcacagtcaggctgcaggctgagggctgggtcctaagacaccgtggctgaagaaaataagggagaaagtgacatcacctcagcaaagccaactatgtccaccgaacaccagggagattgcggccagtctcctcccctgggcacaccccagtgtgttgggtacagtccaatcgtgtcatgcccctgcttcatggatgttccacccacggtgtgctggtaggaggaatcaggctgaaatgttctgaaagccagcagcctgaagccactgcttttgggccagccgcgtaggcctcttgggttgcaccttcagggacagaggtcaggacctggctggcttccaaggactgcagcagccatggaggcagtgaggagcatgacacaatcatcatggccagaaaaggcatggccagggacaggacccgtgcgggggtggggcaaccgaaggagagatggacagatgtctgtccctggacctcagtccccttcctgttttgggatgcacagtgaacacactggtaagctgctgcaggagttaattcaggggctgcaaaggcaacttgggttgggccttgcacagaccaggcaggtataatatcacacctgtcatcccagcacttggaaagttaaagcaagagggttgtggcaaattccaggctagcctgggctacagagcgaaatgagaccaaaagataaaactcccagggctggccctaccactcagtgggcagagctcacccagctgcgtaagccctgagttccatcccagcaccgcagaaaccagatggggtggcacacagctgccgtccctgacttgggaagtagaggcagaaagcaggcatgcaaggtcatccttggctgtaaccagttggaggccagcctgggctacatgagaccctctcaaaagagaatctgtaaatatctttgtgactccccatcgtgtccccatcctgttctctccaacggccactattgccccaccgtggacggtgtgtgaactgtactgtaaggcctgggggctcctccaaggctgaagaggtgccctctccggcccacttctgttctcctcaagccatcccagcaagtcccctgtccagccccacatcaacctcagtgcaatatgccctccccgtggggtcccttggcacggtactgtctgcagccccttgtctctcacccctagctccactctccggtggttaaaaatcgcatcgcacatcctccccccaatcctgtttttattgttgaatccattctgtaaactacaaacctcgtgtgtcttactcatcaggacttgggatccctcgtcctcagcctatgtggtctggtgtttgacaatccaagcacagtgtcctcttggcaccaaccagaggggcctgtccctccagcgcagccggcaaatgtatgcagtccaggtccccgccccacctgtcacagcccctctttttgagatctgtaataaatctctaat

SEQ ID NO: 1274 - protein, 625 aa, Mus musculus
MELEVPDEAESAEAGAVTAEAAWSAESGAAAGMTQKKAGLAEAPLVTGQPGPGHGKKLGHRGVDASGETTYKKTTSSTLKGAIQLGIGYTVGNLSSKPERDVLMQDFYVVESIFFPSEGSNLTPAHHFQDFRFKTYAPVAFRYFRELFGIRPDDYKLCNEPLIELSNPGASGSVFYVTSDDEFIIKTVMHKEAEFLQKLLPGYYMNLNQNPRTLLPKFYGCVQSGGKNIRVVVMNNVLPRVVKMHLKFDLKGSTYKRRASKKEKEKSLPTYKDLDFMQDMPEGLLLDSDTFGALVKTLQRDCLVLESFKIMDYSLLLGVHNIDQQERERQAEGAQSKADEKRPVAQKAKTAMESIQGGAREAIETDDTMGGIPAVNGRGERLLLHIGIIDILQSYRFIKKLEHTWKALVHDGDTVSVHRPSFYAERFFKFMSSTVFRKSSSLKSSPSKKGRGALLAVKPLGPTAAFSASQIPSEDVQYDLRGARSYPTLEDEGRPDLLPCTPPSFEEATTASIATTLSSTSLSIPERSPSDTSEQPRYRRRTQSSGQDGRPQEEPHAEDLQKITVQVEPVCGVGVVPKEEGAGVEVPPCGASAAASVEIDAASQASEPASQASDEEDAPSTDIYF

SEQ ID NO: 1275 - DNA, 4263 bp, Mus musculus
ggcggcgcttgttgttcagcggcggcggccgagctcgggtgcatcctcgggcccgccgccgccgccggagcgttcggccatggagctagaggtgccggacgaggcggagagcgccgaagcgggggccgtgacggcggaagcggcctggtctgcggagagtggggcggcggcaggtatgacccagaagaaggctggccttgcagaggcccccttggtgacagggcagccaggccctggccatgggaagaagctgggccaccgaggcgtggatgcgtcgggagagactacgtataagaagaccacctcgtccaccctgaagggcgccatccagctggggatcgggtacacggtgggcaacctgagctctaagccggagcgggacgtgctcatgcaggacttctacgtggtggagagcatcttcttccccagtgaagggagcaacctcacccctgcccaccacttccaggatttccgcttcaagacctatgcacctgttgccttccgctacttccgggagctctttggcatccgtccagatgactatttgtactccctgtgcaatgagccactcatcgagctctccaaccccggggccagcggctctgtcttctacgtcaccagcgacgacgagttcatcatcaagactgtcatgcacaaggaggcagagttcctgcagaagctgctgcctggctactacatgaatctcaaccagaacccacggacgctgctgcccaagttctatgggctgtactgcgtgcagtctggtggcaagaacatccgcgtggtggtcatgaacaatgtgctgccccgtgtcgtcaaaatgcaccttaagttcgacctcaagggctccacgtacaagcgcagggccagcaagaaggagaaggagaagagcctgcccacctacaaggacctggacttcatgcaggacatgcccgaggggctgctgctggactccgacacctttggcgccctggtcaagacgctgcagcgagactgcctggtgctggagagcttcaagataatggactacagcctgctgctgggcgtgcacaacatcgatcagcaggagcgagagcgccaggccgagggcgcccagagcaaggcggatgagaagcggcccgtggcccagaaggctctgtattccacggccatggagtctatccagggcggagctgcccgtggggaggccattgagacagatgacacgatgggtgggattccagcagtgaatgggcgcggggagcgactgctcctccacatcgggatcattgatattctgcagtcctacaggttcatcaagaagttagaacacacctggaaggccctcgtccatgatggggacactgtctcagtccaccggcccagcttctatgcagagcgcttcttcaagttcatgagcagcacggtgttccggaagagttcctccctgaagtcctctccatccaagaaaggacgtggtgccctgctggcggtcaaacccctggggcccactgctgccttctcagccagccagatccccagcgagagagaggatgtgcagtatgacctgcggggggcccgcagctaccccacgcttgaggatgaaggccggcctgacctcctgccctgcaccccaccgtcctttgaggaagccaccacagcctccatcgccaccaccctgtcgtccacctccctctccatcccagagcggtccccttcagatacatcggagcagccccggtacaggcggcgcacgcagtcttcaggccaggatggccggccccaggaggagccccatgcggaagacctgcagaagataactgtgcaggtggagccagtgtgcggtgtgggggttgtccccaaggaggagggtgcaggagtggaggtccccccatgtggggcatcggctgcagcctctgtggaaatagacgctgccagccaggcctcagagcctgccagccaggcctcagatgaggaggatgcaccctctacagacatctattttcccaccgacgagaggagctgggtgtactccccgcttcactatagcgcgcggcccgcctccgacggcgagagcgacacataacttctatgcagtccccaatctggagcccagcgtccttctgccaccccagccacttcctggaggcgctgccccccactggggctcagagctcagcgacatcacctggcccaaccttgttctctccctccccactgacggacggcactggccaggcccagacccaggatagctcaggccgccatcagctgctacctgtgcctgttggggcagcaagatttggagtgcccatcctgtatttattttgggtctttttttttggacgaagagtgagcacaggtgtgattttctagaaagacgacaagacacagaaaacccaggaagaggctgcagccaccagcctaggtggatcaggctctacgtgtctcactactctggggacagtggccccgtagctccagtaaaagccacacactctagggctcttgttatggcctgcagaggagacaggccctggagcctccgcttgccagcccaggtgtgtgctcctgagttgggtcacctcaacagagcccctctgtcacctcaggtttgggacccgagcaaaccaggactaggcatgccctgtggtctttctgcatctgtttactgccactggaaggacatccccacgcatgactgtcacctaatgctggactgggagggtccatgttgtctgcctctcatccccttgaagccctgagctggtgccgtgggtcccctcaactaccaggggattctctgccctaagaagggcacagtcaggctgcaggctgagggctgggtcctaagacaccgtggctgaagaaaataagggagaaagtgacatcacctcagcaaagccaactatgtccaccgaacaccagggagattgcggccagtctcctcccctgggcacaccccagtgtgttgggtacagtccaatcgtgtcatgcccctgcttcatggatgttccacccacggtgtgctggtaggaggaatcaggctgaaatgttctgaaagccagcagcctgaagccactgcttttgggccagccgcgtaggcctcttgggttgcaccttcagggacagaggtcaggacctggctggcttccaaggactgcagcagccatggaggcagtgaggagcatgacacaatcatcatggccagaaaaggcatggccagggacaggacccgtgcgggggtggggcaaccgaaggagagatggacagatgtctgtccctggacctcagtccccttcctgttttgggatgcacagtgaacacactggtaagctgctgcaggagttaattcaggggctgcaaaggcaacttgggttgggccttgcacagaccaggcaggtataatatcacacctgtcatcccagcacttggaaagttaaagcaagagggttgtggcaaattccaggctagcctgggctacagagcgaaatgagaccaaaagataaaactcccagggctggccctaccactcagtgggcagagctcacccagctgcgtaagccctgagttccatcccagcaccgcagaaaccagatggggtggcacacagctgccgtccctgacttgggaagtagaggcagaaagcaggcatgcaaggtcatccttggctgtaaccagttggaggccagcctgggctacatgagaccctctcaaaagagaatctgtaaatatctttgtgactccccatcgtgtccccatcctgttctctccaacggccactattgccccaccgtggacggtgtgtgaactgtactgtaaggcctgggggctcctccaaggctgaagaggtgccctctccggcccacttctgttctcctcaagccatcccagcaagtcccctgtccagccccacatcaacctcagtgcaatatgccctccccgtggggtcccttggcacggtactgtctgcagccccttgtctctcacccctagctccactctccggtggttaaaaatcgcatcgcacatcctccccccaatcctgtttttattgttgaatccattctgtaaactacaaacctcgtgtgtcttactcatcaggacttgggatccctcgtcctcagcctatgtggtctggtgtttgacaatccaagcacagtgtcctcttggcaccaaccagaggggcctgtccctccagcgcagccggcaaatgtatgcagtccaggtccccgccccacctgtcacagcccctctttttgagatctgtaataaatctctaat

SEQ ID NO: 1276 - protein, 651 aa, Mus musculus
MELEVPDEAESAEAGAVTAEAAWSAESGAAAGMTQKKAGLAEAPLVTGQPGPGHGKKLGHRGVDASGETTYKKTTSSTLKGAIQLGIGYTVGNLSSKPERDVLMQDFYVVESIFFPSEGSNLTPAHHFQDFRFKTYAPVAFRYFRELFGIRPDDYKLCNEPLIELSNPGASGSVFYVTSDDEFIIKTVMHKEAEFLQKLLPGYYMNLNQNPRTLLPKFYGCVQSGGKNIRVVVMNNVLPRVVKMHLKFDLKGSTYKRRASKKEKEKSLPTYKDLDFMQDMPEGLLLDSDTFGALVKTLQRDCLVLESFKIMDYSLLLGVHNIDQQERERQAEGAQSKADEKRPVAQKAKTAMESIQGGAREAIETDDTMGGIPAVNGRGERLLLHIGIIDILQSYRFIKKLEHTWKALVHDGDTVSVHRPSFYAERFFKFMSSTVFRKSSSLKSSPSKKGRGALLAVKPLGPTAAFSASQIPSEDVQYDLRGARSYPTLEDEGRPDLLPCTPPSFEEATTASIATTLSSTSLSIPERSPSDTSEQPRYRRRTQSSGQDGRPQEEPHAEDLQKITVQVEPVCGVGVVPKEEGAGVEVPPCGASAAASVEIDAASQASEPASQASDEEDAPSTDIYFPTDERSWVYSPLHYSARPASDGESDT

SEQ ID NO: 1277 - DNA, 90334 bp, Homo sapiens
gaggaagcaccaagccagggggcaggactttctcgagatgctgagcctgaggcatcagctgggggcagggccagcctccagagcaccacccccgccaccagctccctgtcctttgcgtcttgactcttggccgcctgacatttctacttggctgtgcggcccggggtaagtggctgtccttctctgagccagggttcatcctctacaaaccaggaagctgatgagaccagaggactgcgattcggaccgggatagctcgtcttgaccccagaatgaccgagaatctgttacccgctttattacatccggcactcaacagccctgtgccttggtgactccatatccccccacccctttttttttttttttttgagacagagtctcactctgttgtccaggctggagtgcagtggcacaatctcggctcactgcaacctccacctcctgggttcaagcaattctcctgcctcagcctccggagtagctgggattacaagtgctcgccaccatattcggctcattttttgtatttttagtagagacagggttccaccatgttggccaggctggtctcgaactcctgaccttgtgatccactcgccttgacctcccaaagtgctgggattacaggcgtgagccaccgcgcccggccctcaatatccccattttacagagcaggaaacagaggcccggagagaagggaggtgtggaagccagatctaactgagtccacgggtttgctctcaaaacccaggcaaggtgggatccatgtcgcccacccccacggactcccgaatctcaagcaagcctgctccctgggagctctgcagccacacagccacaaggtgaccccaaatgccgggccgctctgtcccccactatgcgatcatccatgcctcctcggccccgggggaccctcttggttctggagagagacttgagatgcaatcggacacttggctcacgaggaagctcccttggtcttcccatttgggagcaaatgacccagaaaaacacttttgctgccgacccctcccctctctggctctgagcgctccttcctccttcccctctgccccatcccacagagattttgctcggaggagtaaagattggaaaaagaagtctgggcgcagtggcttgcgcctgtaatcccagcactttgggaggccgagggggttggatcacctgaggtcaggagttcgagaccagcctggccaacatggtgaaaccccatctctactaaaaatacaaaaattagctgggcatggtggtgggcgcttgtaatcccagctactcgggaggcagaggtggaggcagaggttgcagtgagccaagatcgcaccactgcactccagcctgggcaacaagagcaaaactccgtctcaaaaaaaaaattagcaaaagaaaggccaccccaatccctccctgcaaagctcctggaggttccagcagtgagaacagggtgaggggttggggggcaggagacgcagttgtttgaaaacttgggagccttttaagaagttccaggaggctcagagatgagtgaggtcgcagcctttcccacctgtcacctcctagcctcgggctgcaggaggtaaacccaggctccgtctggactgatatcccctcccctcctcagttagggggatcagagaccaacctgtgcccctttgccgcctccccggtccctgcgccacctaggtaacaatgacccttttaagtttccagctcagcgtcctgggcaggccgccaggtgcagtaactgccggtcagataatccctacgaaactatgtcagatgcccacgcaggagtgtcagtttcctgctttccgaggagccggggagacagctcgtggtgggggaggttgggggggagtccaaggaccctcagctggggaaggccagctcagacaatgcacactgggtggaaaagcacagtggggcgggggacttacctgtctaggaggctgggtggcctctgggcaggcagcaggtgccagggcccgggtgcctgcctggcacgggtggtggggagggaacccgaggcttgtagctctggcctccccacctgtttgaccaacttttcctctcttgtggtggcaacagggaggcaggtcgcctgccagtggaactgacgaccacagacacagggagacggaccagggtgaggggcgggccagcaggaggactgggtgtgtggctctgtcgcaaggtgccctcacgtgggagcaactggccttaacccctgcttgcccagaggtgagcttgctcctgcctgtgccctcaccgccgaggccctggtatcaagcgtccgcacatggtaggtgcttaggaaaccctcgttggctacattcagacatgaatggaccgcactcccggagtccccctccctcctgcttcttgcatctggagctgcccagtctctgtgcttgctgagcctcctgccaggcacgccggcccatcaggctgtggcttggcgcactcccttccccacgcagatctgtgcgcagtctgcctctctgctacgaagtgactgggttcctacgtacagaagcttctgccacttccccgctgtgtggctttgggcaaattacaggggcttcttgctgtcctcatctaaaaaacaagaaagggtcaggtgtggtggctcacacctgtaattccagcactttgggaggccgaggtgggaggatcacttgagcctgggaatttgagaccagcctgggtaacacggtgaaacccatctctagaaaaatttttatatatcttttgtttgttgtttgttttgagatggagtctccctctgtcacccaggctggagtgcagtggcgcgatctcggctcactgcaacctccgcctcctgggttcaagtgattcttctgcctcagcctcccaagtagctgggattacaggcgtgcaccaccacgcccagctaattttttttttttttttcagtagagacggggttttcctatgttggccaggctggtctcaaactcctgacctcaagtgatctgcccgcctcggcctcccaaagtgttgggattacaggcgtgagccaccgagcctggcctagaaaagtttttttgttgttgctgctggctgttgttggttttgttttgttttttgtttttattttattttttttttatttttttgagacagagtcttgctatgttgcccaggctggagtgcaatggcttgatctcggcccactgcaacctttgcctcccggtttcaagtgattctcctgcctcagcctcccgagtagctgggattgcattacaggcaccagccatcatgcccagctaatttttgtatttttgtagagacggagtttcaccatattggccaagctggtcttgaactcctggcctcaggtgatccgcctgccttggcctctcaaagtgctgagattacaggcgtgagccaccacgcccagcccagaaaacttttttaaaaattagccagatgtggtggtacacacctgtagtcccagaaactcaggaggctgaggtgggaggatcaattgaccctgggaggttgaggctgcagagagctatgactgtgccactgcactccaacctgggtgacagagcaagatcctatctcaataaaataaaattaaccaggaagggttgggcatgatggctcacacctataatctcagtactttggaggccaaggtggcaggatcacttgaggccaggaattcgagaccagtctgggcaacatagtgagacacccccccatctttaccagtacattaaaattaaaatttaaaaaattaagtctgggctcaatggctcacccctgtaatcccagcactttgggaggttgaggtgggagaattgcttgagttaggagttcgagaccagcctggccaacatggtgaaaccccatctctactaaaaatacaaaaattagccgggcaaggtggcatgcgtctgtaatcccagctactcaggaggctgagacgggagaatcgcttgagccccagaggcagaggttgcagtgagccgagatcgcgccactgcactccagcttgggagacagagcaagacgctggctgaaaaataaataaatattaaaatgccacctcacagaggtcatggactttgtcgtgctcatccctgccgtgtcctatggcctagcacagtgcctggtacacagtaggtgctcaatacatgtttttggaatgaatggactagggtccctccagcctgcagtacctcctgctgacggtagtagccactatggccaccaggcggcgccagaaaccacgcaaccggcccccgccgggcagcctcggttttccaccctgcgtaatggggacagccaaccaggggcgtggggggatgcggggaaggcacagaaggctggtggctctcccggaccccagcccctcctctctgtcccttgcctctcccctcctgtcaccccatccctgccctagttttcttttttttaagttttttgtttgtttgtttgtttttgtgttttgagacggagtctcactctgtctcccgggctggagtgcagtggcgccatctcggctcactgcaacctctgcctcccgggttcaagcgattctcctgcctcagcctcccgagtagctggaattacaggcatgtgccactacgcctggctacttttttggtattttcagtagaggtggggtttcatcatgttggccaggctggtctcaaactcctgacctcaggtgatccacccacctctgcctcccaaagtgctgggattacaggcgtgacccaccgcgcccggccaagaggctgcttttaactgcttgttttgatgttgacttttgcgtctgtaagtcatgactgttcggccagttttagtaattttttttaagtatatttcctcttcattatcctcatcaatgatctaacctccagcacttcctccactttatctggcatccaaattgcctggaagggggaagtcatgaacacccagattttaccacccccaccaccccgcccagtttctggtgtgtgaagtctgcgttggagcctgggaaactgcatttcttttccttttctttggtttgagacagagtctcgctctgtcgcccaggctggagtgcagtggtgcaatctcggctcactgcaacctctgcctcctgagttcaggtgattctcctgcctcagcctcccaagtagctgggactacaggcgcatgccaccacgcctggctaatttttatacttttagtagagatggggtttctccatgttggccaggctggtctcgaactcctgacctcaagtgatccgcccaccttggcctctcaaagtgctgggattacaggtatgagccaccgtggctggccccttcccccaaactttatctggcacccagtttgcctggaagggaggagtcatgaacacccagattgtgccctcccaccaccctactctgcccagtttctggtgtgtgaagtctgggtgggggcctaggaacctgcatttcttttacttttcattgtttgttttgagaccaggtctcgctctgttgcccaggctggactgtagtggtgtgatcatagctcactgcagcttcaaacttctgggctcaagcgatcctcccacctcagcctcccaagtagctgggactacaggtgtgcaccaccatgccaggctatttttgtttttttgagaggagtttcgctcttgctgcccaggctggagcgcaatggcgagatcttgactcactgcaacctctgcctcccgggttcaagcaattctcctgcctcagcctcctaagtagctgggattacaggcatgcgccaccatgcccgactaatttttgtatttttagtagagacagggtttctccgtgatggtcaggctggtctcgaactcctgacctcaggcgatccacctgcctcaacctcccaaagtgctgggattacaggcgtgagccactgcatctggccacgccagactaatttttaatttgttttgtagagatgggatcttgctatgttgcccaggctggtcttgaactcctgggctaaagtgattctcctgcctcagcctcaatcccaaagcactgggattacaggcatgaaccactgcacctggctttggaacctgcatttctaacaagctcccagggtgaggctgatgtggctggcccagggaccacaccttgagagccagtggtctaaatcttttttcaaaacagattctgggtgaatcaggagctctgtccatgacctgcgtccaaagaactcttcctggagccttaaaatggtcaaggccgcctgcagtggctgacgcctgtaatcctcacactttgggaggccgaggtgggcagatcacctgacaccagcctggccaacacagtgaaatcccatttctactgaaattacaaaaattagccaggtatggtagcacacacctgtggtctcagctacttgggaggctgaggtgggaggatcgcttgaacctgggaggcagaggctgcagtaagccgagatcacgccactgcactccagcctgggtaacagagcaagactcatctcaaaaaagaaaaaacaaaaaatggtagtaaaatacgcacaacatacaattcacaattttcaccatttcttttttttcgagtcttgctctgttgcccaggctggagtgcagtggtgccatgttggctcactgcaacctctgcctctcaggttcaagtgattctcctgcctcagcctcccgagtagctgggattataggcctgtgccactatgcccagctaattttttggtatttttagtagagacagggtttcaccacattgaccaggctggtcttgaactcctgaccttaggtgatctgccagcctcggcctcccaaagtgctgggatgacaggcgtgagccaccgcacccggcccattttcaccatttctttcttcttcttcttcttcttttttttttttttttttttggagacagagtcttgctctgtcgcccaggctggagtgcagtggtgccatgttggctcactgcaacctctgcctttcgggttcaagtgattctcctgcctcagcctcccgagtagctgggattacaggcacgcgccaccacgcctggctaattttgtatttttagtagagacggggtttctccatgttagtcaggctggtcttgaactcccgacctcaggtaatccgcccacctcggcctcccaaagtgctgggattgcaggtgtgagcccccgcgcccggcccattttcaccatgtctaagagcacagctccgtggccttaagcacattcccatggctgtgcaaacatcaccgccatcatctccagaatgttctcatcttctgagactggaagtctgcccctgtgaaacactcactcctcgtctccccccaagcccctggcaccccccatcctactttctgtctctgtgaatgtgacaactctagggacctcctaggagtggaaccacacagaatttgtctttttgttttttttgtttgttttttttttttgcggggacagacggggtctttctctgttgcccaggccagagtgcagtggtgcgatcatagctcactgcagccttgagttcccgggctcaagcagtcctcccaccttagcctactaagtagctggctaattaaaaaacaattttttttgtaaagatgaggggtctcactacacctagctaattaaaaaaattttttttgtagagatgagagggctcactatgttacccaggctggtctagaactcctgagctcaagtaatcctcctgccttggcctcccaaagtgctggaattacaggcgggagcctctgtgcccaccccaaacattatttatgtgcataggtaatataatcattatgatttacatttatgtaaataatataaacgttattacttaaattaacataaacaacataagccttattatgtgcttatataaagaacataaatatggccgggcgcagtggctcacacctgtaatcccagcactttgggaagctgaggcgggaagatcacgaggtcaggcgttcaagaccagcctggccaacatggcgaaacctcatctctactaaaaatacaaaaattagccgggcgtggtggcacgtacctgtagtcctagttacttgggagggtgaggcaggagaatcacttgaaccctggaggcagaggttgcagtgagctcagatcgcccccctgcactccagcctgggcaacaacagcaagactccatctcaaaaaaaaaaaagaaggatataaatattgctacttacatttgcataaatatatataatttattatgtatttctataattatatgtttcttataatagcaaactgtattattattgataaaataatataaagaaaacaataacatatctatacttacgtaatacaaacgatggaatataaatattatttgcaatatgataataaacaggtagttaattgcaaatgttattgatatgtattgcgtagatcaatgttaataacatgtattgtgtagatctatatatatatatatattttttgatatggagtctcgctctgttgcccaggctggagtgcagtgacacgatctcagctcactgcaagctctgcctcccaggttcaccctattctcctgccttagcctcccaagtagctgggactacaggcgcccgccaccacgcctggctaattttttgtatttttagtagagacggggtttcaccatgttaaccaggatggtctcaatctcctgacctcgtgatccgcccgcctcggcctcccaaagtcttgggattacaggcatgagccaccgcgcccggccctgtgtagatcaatattatttacatgtactgtgtatatcactgttattggtatattttgtgcatatcaatgttattgacatgtagtgtgtatatcaatgttattgacatgtagtgtgtacattaatgttattggcatgtagtgtgtatatcaatgttattggcatgtagtgtgtatatccatgttattggcatgtagtgtgtatatcaatgttattgacatgtagtgtgtgtatcaatgttagttacatgtattgtgtagatcaatgttattggtattcattgtgtatagcaatgtgattggcatgtattgcatatagcaatgctatttgtatgttttatgtagatccatgtcaatgatatagtatagattcatgttattggcatgtattgtgtatatccatgttattggcatgtattgtgcatatccgtgttattggcatgtattgtgtatatccatgttattggcatgcattgggtaactccatgttattggcatgtgctgtgtaggtccatgtgtggttttttttgggacagagtctcactctgtggcccaggctggagggcaatggtgcgatctcagctcactgcaacctctccctcctgggttccagcgattctcctgcctcagcctcccgagtagccgcgattacaggcatgtgccaccacgcccagctattttttgtatttttagtagagacaggatttcaccatgttggtcaggatggtcttgaactcctgacctcaggtgatccgccctcttcggcctcccaaagtgccgggaatataggcgtgagtcaccgcgcccggccagatccatgttattgtcatgcgctgtgcaggtccctgttattggcatgtgctgtttagatccatgttattggcatgtgctgtgtacatccatattattggcacgtgctgtatagatccatattattgtcatgtgttgtgtagatccatgttattggtatgtgttgtgcacagcaatgttattgatacgtatcgtgcctgtcaatcttactgacctaatacgatggaatggcgagcctggctctgtactcccacccctgggcgcgagggggcactcgaggcgctcctggctgcgggtcgcaagcaggccccgcccccgagccccgattggccgcgcgccgtccgcggcgtcgcacgcacgcaggccccgccccgtccgccccgcgccggcccggcgcgccctcccttggccggcggcgcttgttgttcggcggcggcggtcgcagctcgggtccccctcgggcgcccccgccgccgtccgcgcgcggccatggagctggaggtaccggacgaggcggagagcgctgaggcgggggccgtgccctcggaggcggcgtgggcggcagagagcggggcggcggcaggtaacggcccggcctcccggggctgcggcccgctgggctcgtccgagcgccgagagtcgcggggctgcggggccggggcgggggctgcacggtcgctgcgggggcgccgccggttccaggagcctggggcggggcagtcccctggagccgcggggaggacggggctgaagccgcgccgggaagcgggaggcctgcgaggggctacctcccaccgctcccgggccgggggcgactcggcgtgggcgccgctggggatccccgttctgcctgacccgctcccaggggctgcccgtcgtgtgagtggcggctgcttgggtggaggcgggggtctctgaggccgtgcgtgcccacctcctgatgtcacctccctttctgtaagtccccagacctgagtccgggtgcgcgacctttcctcaccttcctgggcctcagtttacctccctgctaaaatgaggggaggaaaagggttacatctcaagatgcctccaccgccccggctgtgcacacagggtgccctgtcgcccccttttcctctccccgagccttcccccaggacacactggtggggctgcgggctgggcggggggcacggctgtctcatgccccctttagctgcttcctggacctccagccgggtaggtggcggcagctgggccttcccttctgtggggacggtgtgcagagcccagaggaagggaacagttccttctcagtcgaggtcacaagctcccaaatcggaagtttccggattcacaaaatcctctgctcctcccaggcagccagcagcagcgtctctgtagacacccacacgggcatccgtcctccttctccccccaggcctcccgaagcttccttggttggcaggcgggcaagcgggcgggcgggcgatgcgtgctgcctgggagttggggagatgtctggagagagagagagtgtggaagtcatcaagtcccccccccaccccccgccttgaaagacactcgtggcttccctcccggcggccatctggaaccgcttggtaggtgacccggttccttccccagagccagtggcctcgcccctttctttgcgggcagccggtgtcctggcctggccagcaagagacatggtggaggaacccaggcagggcaccaggccccagcccgggttcctttcttgggccccccaacttccgctgtcagccctctgaccccagctggtcagagacaaagtagcccaggactcgctgaccaaaagaaaaccacaccgcgaccattcatcttatcaggggctctgggagcaccggggacagataaagttgccagctccagactgagcatggtggtggggtgggagagcgggggagtgggggggtgggggtggggggccggggagggctggaaggtcagggtctggcatctctgcccatccctgaaatccacagaaatctgaccccagctggccatatactgcttctgaatgtttaaaattcagagttgcctcactcctccaacgccatccctcctgatgttagcgctggtgagtttaggttgtgcctggctgggccacagagacgtgagcacataaaggggcctgcttgttcttcaccgagatggtttcatgcctcactggggcttctgtgccttggcagaggtattttgagtcaggaaattaggggtgctgagcaacgcccctggcttctgcccactccatgccaggagcacctgccagttgtgacagccacaagtgacccagacaccgttcagtgtcccctgggggcaggacggccctggtgagaaatgccacacgtttatgactctgtgaactgcttgctttttatctctggtcatctggagtctccccaccctatgttggtatcggtttgtagagagggcgagcgccaggcagtggttaagggggagccccagagttggtcccgccgatgtccccctcccagctccgcgcttcaggtgctgtgtggccgtcacttccccgggcttcagcgtcccgtctgtgaagtggggtgatgaccgtgtgtgctaggggctgagcctgggatgagttggcgctcgtgcttggtgattgtcgtgccggttggccacccctttccggcctctccaccatcggtgcctccaggcccctgctgaggcccatgcccgtggtttctggagtcaccgctcactgttagaagcgatggcgacaccttccagaaagctcagctacagcgggagccttgtccgacaggggccgagggaggctgcccgtttcccacggcactgccagctcccagtgtcatcgtccttggcgatttcggctgatccgatgggaggcaaagcaatgtctcgttggtgtttagaatttggttcctctaattgcctgggctcctggctcccgaggcgtggcctgaatggcgtctccatgggccgtggccgtggggcacgtgggggcggtctcgggaaggccggggcttgggatgcggctgtgcccactgtgtgggccgatggcctgtggtggagtttggtctgagctgtggcctgggcgtgtctgagcctctcccaggctgtcctgtctctgtgatgccccagaacggtcagctccatccctgcccctgccccactcccacggctgatctgtctctgtgatgccctggaaaggtcagctgcatccctgcccctgccccacttccacggctgatctggcagcaaatgatggcagcttcaccttcagaactggcccagaacccactgactccttccctgtcctctgcctctcccgggtccagcttggtcctcccgggtccagcttggtcctccctggtccagctcggtcctccccggtccagctcggtcctcctcggtccagctcggtcctcctccgtacagctcggtcctcctccgtctggctgagtactccccggtccagctcagtcctcctccgtctggctcagtcctcctctgtctggctcggtcctccccggtccagctcggtcctcctccgtccggcccagtcctcctccatccggctcggtcctctatccggcttggtcctcctccatctggctcggtcctcccgggtccagctcggtcctccccggtccagcttagtcctcctccatccggctcagtcctccccagtccagcttggtcctcctctgtccggctcggttctccttcgtccggctcagtcctccttcgtctggctcggtcctccttggtcctcctcggtccagctcggtcctccttggtccagctcggtcctccccggtccagctcagtcctcctttgtccagctcggtcctcctcggtccagctcgatcctcctccgtccagctcagtcctcctcggtccagctcagtcctcctttgccccctgagccaggcctggcgcccctgctcttcctctgctccctgtcccacattccaggaggaccccattaaaaaccagcggcccgagtcccgaccctcctctgctcgcagccctccatggctcccacctcccttggggtcaaagacatagtcctctttgaagcccatcaggccctgcacagcctgccccgggccctccctgccctccctgccctcccctccgcactctgccctccctgccctcccgtctgcactctgctgtaggcccatgggccccttgctgttcctccagcatgcagggcatggtcctgccccggggcctttgcacggctgccccccacccccaccccggaatgcccctcctcccatctgtgtcctttgctcccttagcgctttccaggttttgtgggagcatctcctctccgtgaggcctccctgccctgctgtcaccacacagcggtctccccttctccgtcccctgccctcccggttcctcttccctgattgtgccaccatagcgtttgtcaccacctgaaacatatggctctgctgacgtgttttctgaccatctcctcctgagcgagagctccacgagggccaagaccgtctgtgccactcctgcggcatcccctgcgcccggaagagctcagcacagtgcagatcctggtgaacatcaggtgcatgaggccagcagtgccagggaggaagggtaaggtagaatggggtggctgggaaggccttgccaagaaggtggcatccgagggagacctgtgggcattgggcaggaagagggcatggccccagcagaggccccgcctgcctggagcacagtgtagtgtggtcacagggcggccgggcagggagtcagcaccgccaccagggcctccctgtagctgtggtggtctgtgtaaaaaggtcagggaggccgggcacggtggctcacacctgtaatcccagcattttgggaggctgaagcaggaggatcacttgatctcaggagtttgagaccagcctggagcaacatagcaagacccctgtctctactaaaaaaaaattaaaagaagtagctagacgtaatggtatgtacctgtagttccagctactcaggaggctgaggcaggaggatcacctgagcctgggaggctgaggctgcactgagctgtgatcgtgccactgcatgcctgggtgacagcagaatcgtatctcaaaaaaaaaaaaaaaaaagggtcagtgggattgtggtgtctcttgttgcaagtcagcagggcccaggcggaggctgaggacactggggacggaaagttccccattctctcccgccctggccgcctcccgggatgcaggtcaggcactgtgaccaccacagcctgggtgtcccagtggagaggcctcgggggccggccctcctgggttcacacccagcgccattgcatgccagccggggatgtgcagcctcggtgtacctgtctgtaaagtgggcgtgatggctgcctttctcctgggctgcatggagaatcatggggtaaagcccttagaaggcacgggacaggcagccggccccgtgagaaagctgggtgccccctccgtcccaggttgctgttggaggagagggagtccccttcgtgtgctgcttccggggcccaggtgccaagcgagctcacctgggcgctggggtccgccatgggagtcggctcgtgaaagtgtgagttccactcctgggctccagacctttgttgagcacctcgtgtgggccaggtggggctcagggtgcccagtcttctggtgctaacgggactgcctcgctgaccccttggagccctcaggttgctgggcgtcaggctgcagatgggaacaagtggccacgtgagaccccacccgaatctgtccatgccgcttcttgtcaacaaagttttattggcaacggccacaccatttgttccgttgccggccttggtggcccccacgctgcagcggcagagctgggagctgagtggccatgcttggggctacgtgtcccacgaagccgaaaacacttgctgcccggtcctttacggaagatgtttgcccagcccagagccgggctgcgttgggcggtgatgagtgtggtgagggcacctgggaggtcaagtggccaggcctgcggcagctgaggactcggagggaggtgactgtccccacgagctgaataagggtgggctgtggctcaggcgatgtaggcagcggaatagtcgcgccgaggccgtggggtgggaacttgctgcacccacttgagccgcagaagtgaagtcaacgtggtgggagagggtcgcgtggggtcggacctgaggacagcgggtggcacgggcatctgagtggggcggcgagcccgattcacagcgcctggtgggggatggtccgtgggcagtgctctgtggggttggggcaggtgtccaggtgagtgccaccggtgcctggaggcagacgaggggcctggaaggattttggcctgggccctggagctggtggctggggtggcgaggactgaggacagagcaggactgggagcccaggcactgtggcaggtgtgtgccgatgtggggtgagcaggcagtggggacccccaaagcaggtggaggctccgggagcctgggcagggtggtcccagggcctggtgtgggctgagcctgccttggccgcttagacccgtgtgcctctgagcaagtgacttccctttgttttaaatttttttttttttttttttttgagatggagtctcgctgtctcgcccgggctggagtgcagtggcgcgttctcggctcactgcaagctccacctcccgggttcacgccattctcctgcctcagcctcctgagtagctgggactacaggcgtccgccactacgcccggctaatgttttgtatttttagtagagacagggtttcaccgtgttagccaggagggtgttgatctcctgacctggtgatccgcccgcctcagcctcccaaagtgctgggattacaggtgtgagccaccgcgcccagcctcttttaaatttttaaaacttttttgtagaggtgaggtctcactatgttgtccagggtgcgagggtctcgaacccttggtcccaagcagccctcctgcctccacctcccaaagtgctggggttacaggcatgcgcccccatggtggccccttctttcccttttggaacaagagctgcgggtgtcctgagtgcctggcaggacagggatgggtgaggccctagcccctgggaagctgcacgacctgggtctttgtttacagatggggaaaccgaggctccaggagggctggagagtccacacagggtggggctgtgaacgaggagcggggcccaggcctccctgccgcctgccgcctgccgcctggccccggcagcatgtcccttcacgcaggaccaggccggtcaagaccctgcaaggatttgccagcaggcgccagctggacggggcccgtggtggtgccagtactcatggggattacagcctgaggggattagctcggagcccctgcacctgcctccccgccaccctgagaggccagcttgggaggggctggagtcgagcatgagggcccccaggtgcctgagctggcatgggggtgcgaggggacccggcctctggctgagtgaagagaggaccccagcaccctgcccggccgctctcctccactgaaatgcctcatgcctccactttgcaggcagggctgctgctgaaggtttccgggagtggggtgtggttcgggcatcgtctacgtgtgctttcctgcgtgtgctgtggccgggtgctgggagcctgggggaacgagagggccaggccccctaaggaactctgggagtggggccaggacatacagacagcaaagaaaagcaaaacacgcaacgcagtggacaagtgccacggagaagagccgagcagaggaggggagagagtggcggcggaggtgccctcaaggctggggactcgggggccacacttgaacagagatccaggggaagtgagggggttgtggaagtgtggagggagctgtctggcagaggcactgtgcaaaggctctggggcaggaccacgcctggtgttttagaggaacagtgaggaggggagggcagggaggggacggggcagggtgtgcagggccttgtgggctgcagggaggacttgggctttgaccccaagggaggtgggagccatggagggctgcgggcagaggagggatgggcgagactcaggagctcacaggcaccccctggtggctgctgtggggaggacagatggggtgagggcgggacgtgggctaggggaaccagggcagaggggactgcactggcccaggtgggcgaagctggggctgggccaggtggggaccatgagcagtgcgccatctgggatggattttggaagcagagccagcaggaccttttgaaggttgagtgtggggctgaggggggattgagtttgaaatcaagattttagcctgagccctggaaggacagagctgccctcagccaagatggatgcaggaagggcagcatgggggccgccggggcccagcatggccgagctgcgagggaggccccaggagcccctgtagggagcgttgggggccgtggtgggagccggcagtgggactgggtggggccgtcgggaccctggtggtggctgtgctcagtggacggtgtctctgttccattgtgctgttggcaggaggacagctgagatgattgggttcggttgcccagccgctccgtgcctcagtttcctcatttggaaagcaatgtcccttgaggattagatgagtcaatgcacacaaaaggctcagagccggccctgcccatggtgggcgcccagggagtggggacagggacgtgagcgggcagctcccactgtgcacccttcccgtgcggtgcttggactggccacggtgcatgcgctgacatgggcggggctgctggggcagggaaaagagcctggggtgggagcagctgcctcggggcctgtgcctgtgggcgcgtatgagccagcctggcttggcgtctgctgctaaaacaaacatccccactctcccggccatcccagaggctcatttctcgcttgtgttgggggctttggtggttttgctccccgatctctcagatcccaggttgacggaggtgctgtcacccccagtgcagtaaaggctctatgcttctgtaacccagaaaggtggtacgtgtattcagatgcactctgattggtttaaatcaggcctggtgaggccaagagagcaggaggtgactgctattgaaaagctcttgtgttacagttcccgaggctttggttggaagggacgggccaggcggggtagatgggctgggtgtgcctaggatgggctggtttgactcccgactgtttgcggctcttggctgttggggtggtccctgttctgggagctggccctggggtgattcagggcagggaacctgggcgtggcgcgtgagagtttgatcaggtgcgtgggctcgcggttggttgctctgcacgtcacagtgtgctcgcaggcgggccgtttgcaacgtttaggaatccgcttaccctggaaggggccgtcatccccagattagcgaggcccccaagatgtcgtaaaatccagaaaacaaaacgcagcatcagcactgtaccagaccgggcgctccgtgttccggcagcggaggacgcgtccatctctcccatcctcagcagccatatgggtgcaaggcgacttcttccctcactgcgtcattgcagcgtatattcgtcttcttgtgactcagagaaaaagtccttgtggctcttcgcagcatttcctctttgttttcttggaactgcgtttccacaaggggagcagagaccactagaggcgaagggactcgccacacaggagctccctcccactcctcccgacggtcacctgtgtttctatcaagagctggaaaatggagtgtccccaccagggagacggggtcaccaccgaggctggctctgagctgcctcagctcctgcaagctccgtggccccgacctccaccctccccggcccattttccttgcacagttccttcttgtaagcacacacgtcaggttgaactctgacctcattttctgggacctgtatgattgtgtctttcccagtctacagttatctgtcaccattttgttgattcgtaggagctctttatttgttatggcagctactcatttattggtgacacaagtgcaggtacttctttgcccatcttctcctacgatgattgttaacgtctggcaggtattttggggtttatgtggtcaaacttatcactctttccttttctggtttcctagtttggtgtcatgaatgggaaagtcttcctgttctgaggttatgattaaattctgctaagacttttataacttagcttcttttttgttcacatttcaattctttttttttttttttaagacagggtctcgctgtatcacccaggctagagttcagtgacacgattgtagctcaccgcagcctcgacctcctgggttcaaaccagcctcccaactagctgggactgcaggtgtgcgccaccatgcatagctaatttttcatcttttatggagacagggtcttcccatgttgcctgggctggtctcgagctcctggcctcaagtgatcctcttgccttggcttctcgatgtgctggggttacaggtgtgagccagtgcgcccagcctatttctggactttttattctgctccactcctctgcctttaccttcatgctacagccatgtctcgtcttgaacaaatgataacatgttcacagttaaaaaaaaaaaaagtaatcagacttgcagtgagtaaaaagtgagtcccacctcaccctctccatctctgtggagataatgactgtcaccccaggtgtttctctggcccatacacttggggctcagattatattaggctattaaaaatagtttatttggaaagctttccagcctatagaaggggcaagaatgctacagtgaagacctgtacagcccgcacagagatccaccagctgctaacgttttgccatgtctttatcattctgtgtgtggggggggagtgtacgttagtgtgtgcaagtttgtgtgtgtgagagtgcatgtgagttagtgtgtgtgtgttagcgtgtgcgtgtgtgattatgtcaggccatttgcgtgttgattgctggcatggtacctctctgcctgaagcagccagttccattatttgtggtagttctttattttattttaattattttatttttttgagacggagttttgccctctcgtccaggctggagtgcagtggcgcgatctcagctcaccgaaacctctgtcttccggtttcaagcaattctgctgcctcagcctcccaagtagctgggattacaggcgcccgccaccacacccggctaatttttgtatttttagtagagacagggtttcaccatgttggccaggtgggtctcgaactcctgaccttgtgatccagccacctcagcctcccaaagtgctggggttacaggcatgagccactgcgccaggcctgtttgtggtagttcctttgtgaagctgctgcagacacttcaggcgcacactgagccctggctccaggggaaacccaaggtcgggttcctgtgagcctctgggcatgatgtttccatcagccagtcgatacgtgaccttgttgtatgttcgtttttatttcaaggcgtgttattttagggctgggtgcggtggctcacacctgtaatcccagcactttgggaggctgaggtgggagaataactggattactgagcccaggagtttgaggctgcagtgagccgtgattgcaccactgcactccagcctgggcgacagagtgagatcctaagaaaattttaaagacacccgtgttgttgatttatccacagggagctcacagaccataggccgcgtgcgccaagccccccccaccccccagccccatcccgggcactctcccaggcccccgcccatttgcaggctgtgttggggacaaggctggaagggggaccgggggcatgtattcggctgtgtgggggctcaaaaacggggtggggggccatggcgacgtgggtgtgggtccccctcccccggcccaccagctcggtgtgtctctcgctctcgttctccccccactctcctctctctctctctctttccgctctcagtcctgtttgagcaaagcttctctcactacgggtttctccatggggctcatccgggtctctagccctgagggacacgaaaccacctgaggacaatgcctgggggggcaatttcagcagcagaatcaccagcaaaaccgcaaaaaacacacgcggctctcagtggaccagggaaaggccaggtgctcacagcaggagttgaaaccagggggcgagggtggcctcaccggagctgcctggggacgtgtgtgccccagagtcctgggggtgctgccctggaaatagccttccggtcttctagatccctccccgcccacagcagggggccagaggccgtccccccctcgcaggtgaggaacaggagctcctgcgggctcccctgcggcaccccgctctgtttcccaccacggcctaacctcaggctctggaaggaattcccttcagggacactgtactccccggagggacgctgcgcccctggaggacagggacgctggggagccagccgcgaggggcgtccacctctgctgtgctggagacggagcgcgcaaggaggtggggaccacgcgcagaccctggctgcgggagcctcagctcggggcccatcaggatctcccgcagcccgcacgggccgggcttcccccaggggctggcgtgtgctctgtgcaccctgacccatcccgtcggccccgccacctgcgggctggccacgccccacagcctcctgccccggcccgcccgggagcttggtgctgagagtggagcctctttctccctggacattggggccctgggaaacgacccaacacctcagggcctgcggagttctggatgctccgcccgcctgcgcagagcttcctgtttaccggcctggctcctgcccgcccacctgctgcggggaaagcgatcactctatgccctgcggggagcacccggcagggagaagggagaaggggcaaggaagaggggcggcctactactcgggtggaccccaggctgtccctccaccgtgctggggtcccccaggtgtaccctcccctccagccacctcaccccttccttgctgtgtcccgcaggtgttctgtggtgtcctctgagggcctgtgcgtgtgtgtgcgtgtatgcatgtgtgtatctgcatgtgtgtgcgtgtgcatgtgtgtgcgtgtgcatgtgtgcatgtatgtgtgtgcgtgtgcatgtgtgcatgtatgtgcatgtgtgcgtgtatgtgcgtctgtgtccccttcccacaggccctcaccgctccctgcacctgtgggtcctttcttcctttcctgccctgttgggacatattccttattgcacacttggacttctttcttaaattcttttctttttgagactgagtctcagtctgccacccaggctggagtgcagtggcgcagtctcggctcactgcaacctccgcctcccaggttcaagcaattctcctatctcagcctcctgagtagctgggactacaggcatgtgccaccatgcctggctaattttttttgtttttgttttgagtcggagtctcactcttttcacccaggctggagtgcagtggcatgatctcagcccactgcaacgtctgcctcccgggttcaagccaatcttcttcttcagcttccagagtagctgggattataggtgtgcaccactatgcccggctaatttttgtgtttttagtagggacagggttttaccatgttggccaggctgctctcgaactgccgaccttaggctatccacctgcctcggcctcccaaagtgctgggattaccggtgtgagccactgcacctggccttgatctgtttttttctttgcttgcttatgcttttggtgtttatttaagaaattgttgcctaatccaaggtcacaaagatttattaccccattttcttaagtagttttatagttttagctattacattcattccagtttgtaattattttattttattttattttattttattttatttatttatttattttgagacggagtttcgctcctgttgcccaggctggagtgcaatggtgcgatctcggttcaccacaagctccacctcctgggttcaagtgattctcctgcctcagcctcctgagtagctgggattacaggcgcccgccatcacgtctggctaattttgtatttttagtagagacggggtttctccatgttggtcagactggtctcaaactcccgacctcaggtgatctgcccgccttggcctcccagagtgctaggattacacacgtgagccactgcacccagcctttatttttatttttttgagacagagtctcactctgtcgcccaggctggagtgcagtggcgtgatctcagctcactgcaagctctgcctccctggttcatgccattctcctgcctcagcctcctgagtagctgggactacaggcgcccgccaccacgcccggctaatttttgtatttgtatttgggaggatcggcctcccaaagtgctaggattaccggtgtcagtcactgtgcctggctaggaaactctgtaaagggctgagtagtaaattttttagcttttagtctaagtacggtggctcacgcctgtaatcccagtgcttcgggaggccagggtaggaggatcagttgagcccaggagtttgagaccagcctcggcaacaacgcgagacccccgtttctgaaaaaagaattagccaggtgtggtggcgcctgtagtcccagctactcaggaggctgaggcaggacggtcgcttgagcccaggagttggaggctgcagagctatggtggcaccactgtgttccagcctgggtgacagtgcaagaccccgtctctacaaaaaaatcaagatgaacattttagggtttgtggtccagatggtctctgtcacaactcctccacactgcggttgtagcacttaaggagccagacaattcgtgaacacatgggtgtggccatgttccaataaaactttttttttttttttgagacggagtctcgctctgtcacccaggctggagtgcagtggcatgatctcagctcactgcaagctccgcctcccgggttcacgccattctcctgcctcagcctcccgagtagctgggactacaggcgcccgccaccacacccggctaattttttgtatttttagtagagacggggtttcaccgtgttagccaggatggtctcgatctcctgacctcgtgatccgcccgcctcggcctcccaaagtgctgggattacaggcatgagccaccgtgcctggcccaataaaactttctttagtgggctgtgttcggcccctggactgtggtataccagcccctgctttagacagtctttgtaggaccttatgagttccatataatcagcgagactcctgtctttttacctgtgccgaagttgtctaggagaaagttctagaattgaagttgctgccaagggcacacacattagaaatgctgccaggctgccccctaggggagaatctattgacacgggcatcacccccagccgtgtgaggaccccctgagtccccaacccattgctggcaggctggtttcatatcatgtcttttatcattagaggggtctgggcgtctttttcagatgttcacactgtttgttttcttttcctctgcctgttttacaagttgagtgagttaatgctttgagaaaagcctcatttctataaataaaaatgacaaaatatgtatttcagacggcaccaaaggatggaagttgcaaattaagagaccctcccccatcccacacccagaaataacttggaaccttctaagattcacgtgtctggccctgactgctgagtgacgtgtctacagtggtggaagccatgtggcactaagagcttgagttctcctggtgggtcacagggaaccagatcctggtgctcagagggagagagccgcccggggctttgctgcctgggccctacgtgccgggtgaccttcagcaggtggtggtcccgctctgggtgcgtctgtggtgggattcgtggattatgcaacaaaccactgccacactgagaggcttcacgctgcagtgcttttgctgtcagtttcccagtattggctgggcttggctgggctcagcaggtcggttctgctgcggcatctggcttgtgccagcacaccctggtggcctcctgtcccaggcctctctccgcattgctgccaccctccagcctggccccagcatcgtactggagggattccaagagagcagaggctgatggaagaattccccccatgtcacttctgcatcatgtgattggccaaagcagggcttgagacccgcccactttcaaggggaaggaattcggccctgtccccgggatggaagggaccctggcaggcagcaggtgtccccatctgtgtgtgagtgctgtgagattgtgcgctggatgatgtgtgtggggtgagggggcggcaatgagctcatcttgatgcctctaattataaggcaaagaaatgctcatgcgtgactggtgtggttaccactgcagcgctgtgagcgggaggctcttcttatcgttccgtctttattttgaggaatcctgaggtccagtgggtgacacagaggccacttcccagccaggaggctgtgggtgctgctccaggcaccgaagcatctgctctgcctctcctgtgctgggggccgggcctgctgcagagacagagtcagcactggtcggggtggtgggggctccaacatgggggaggtgtgggactgcccgggagaggaagcgggggctccagcgtggggggggtgtgggactgcccgggaggggaagcaggggctccagtgtgggggaggtgtgggactgcccgggaggggaagcgggggctggctgtgctctgcacaggatgttcctgctgtgcccgggctgatcccagctctccagacacggtcctgccccggggcctccgtactggctgtgcctctgcctgggaggcccctctgcccttcccccgcctggctcctcctcactctcctcccgtccctgctgtggtgacgcagactggggcctgacatcctggaatcaggtgcgtccacccctacatttttgctgcatgatcaggcaagcgatctgacctctctgagcctcagtttccgcctctgcataatgggagcagtaatagtgcctacgtcacagggttgttgggacaattgcgtgactaagccatggggttctcatatggtgcgggccccgccacacacacggcgaaggtgggctagctcgtctctggccagctcctgcctgcgctccagctgttccagggtggctcagtggttagagacgggaagcagcctgcgcccctgggctcttgaccccatccaaccccgtttccctcctgagccaagcccactgtgccctggacccagatctccgtggaactcctgggaggaggacactgtcgcaggcagccttacccacgtgccaggctcgtgctgtctgcactgttgcagaggggaaagatgaagtcgctgccctggccgggctcatggcctcagagggaacaaatgtggaggatccaaggagtagagagaagtaaacccagcgggggcagggtgaccagggaggggactctctgaggaggtgacatttgatctagacctgaacaaggttgggtgggagagagagttccaggcagaggcgcagcctgtgcggaggccctagggcaggaccaagcctggtgtggggagggagggggaggagaggagggaggggaaggacaggaggggaggggagggggaggaggggaggtgttctccatctgggcctctgtccagcaaacgttcattgaggcaacatctgtgacctcacacagtttctgagtcaggagtctgggagcggcgtagctgggtggtcctggctcggggtctctcatgaggctgtggtgaagctgtcagccgggactgcctcctctgaaggctcaactggggctggaggagccgcttccaagagagcttctgctctttattttttatttttttaatttttttatagggacagtcttgctctgtcacccaggctgaaatggagtgtcaccatcatagctcactgcagcctccaactctggggctcaagcagtcttcccaccgcagcctcccgagtagccgggactacaggcacacgtcaccacgccagataatttttttgttttttgaagaggtggggtcttgctatgtcttgctatgttgctcggtctggtctggaattcctgggctcaagcaatcctcccacctcggcctccaagtgtgctgggatgacaggtatgagaactgcgcctggcccacaatgcctttttttttttttttttagatggagtcttgctctgttgtccaggctggaatgcagtggtgcgatctcagctcactgcaacctctgcctcctgggtttgagcgattctcctgcctcagcctcctgagtagccgggattacaggcgcgcacccccatgcctggctaatgtttgtatttttagtagagacggggcctcaccatgttggccagactggtctcaaactcctgatctcaggtgatccacccgcctcagcctcccaaagtgctgggtttataagagtgagccactgtgcctggcccacgatgccttttctaagaaatgttaggcaccttctctttgtctccctctgtgctattggtgggggtggtgacggggtcagaccagcatgcagcgtgcagcaggctctgcaatctgggctcgtggaagcatattcctacacgccaggctgacggggaaggagttcgctttggatcctggtgggcctgaggggccagaggaccaaacgcaggccccagggctcgtttggctaagtgaccccctggagtttatctgaagaatgtgccttaagtttgctcctcccccaggggctgccctggggctgctgtttgccctcccccaggggctgccctggggctgccgtttgcccttcaagtccaggctggagcgaatgttgctgcctttgactagcagagacctctgagcctcagtttacatagctgtaaaataggtccaatgccagtcacctcatggagcattgagagggtcagagacgcagcttgcagagcaccagcccgcggggggatgtgtgtacgagctgcagcttttattacagggaacttcaaacaaaagacaaaagtgggccaggcgcggtggctcatgcctgtaatcccagcactttgggaggccgaggtgggtggatcacctgaggtcaggagttcgagatcagcctggccaacatggcaaaattccgtcgctactagaaatacaaaaattagccaggtggtagtggtgaacgcctgtaatcccagctacttgggagactgaggcaggagaatcgcttgaacccaggaggcagaggttgcagtgagccaaaatcatgccactgcactccagcctgggcgacagaacgagactctatctcaaaaaaaaaaaaaaaagtggacagggtggtacaggtacgggtgttcttttcctgaaacattgtacacacccggagaatagtgtcaggaacaccctgcccgcccccactcccatcccacatacctccatactgtgttgactccgggttcttgtgtgtgcagatgcggggggcgaacaggggcgagattctaccatcccagtctctaaaacagggtctctgcctctcagcactgccgacctgtgggacctgatctttctctggggtagggccatcctgggcactgcagggggctgagcagtgtcgctggcctccgcctactttatgccaggagcacccttagtcatgacaatcacaaatggccccagacatcaaccagtgtgccctggagggcagagtctcccctggtgagacctccatttcggtcactccctccacccccagggccacgctcaaagcctgtcccagaggagatcctggcctccgcctgatctcctctgaccctttacaaaagtttgctgacccctgacttaagggataaacagaaaagatgttttttgacctatgtagtaatagatgggtgtcttttatgtgattctgtgctttccaggtgcttaaaaccttttcttattagacattgtatttagacagtccgggcgcggtggctcacgcctgtcatcccagcactttgggaggccaaagtgagtggatcacctgaggtcaggagcgagaccagcctggccaacatggtgaaacgccatctctataaaaatagaaaaattagctgagaatagtggcggatccctttaatcccagctactcgggaggctgagacgggagaatcgtatgaacctgggaggcggaggttgcagtgagtcaggatggtgccgttgcactccagcctgggcgacagagcaggactccgtctcaaaagaaaaaagaaaagacagttgcatttagacagagagccggccgcctcagtggtgtgtcatcccccaaacccaagagatgcttgctgattttggtttggatggatggatggatggatggatgaacggatgaacgagccaacagacaatcacctgacaccattcaccacgctgggagtctcagaatcagaagagagtgcatcttcagggtaagaactagcctgtagtcacttcagggccattgttccaggcttgattgtggggcttcaggcctttgccacgtccccccgagggggctgtagccagggtgttctcacagggccagagggcaggagctgggatcccccaaaccccaccatagcccgggcagtgtctcccacagcatctgcctcttcgtttgctgcagaaagtttcttgagcgtctgcaacatgccgggcacgttctaggctccagttgcctgctccaccactccgtccaccatgcgtgcccagcgcagcacgtcaagccacatccagggcgccccttgggcccctccaaccctgcaggtcctgactgctcagcacatctgacccaagcctgtgcttcttcctgatgccccatcttggtagccaactcactgtgtgcctgagcccaggtcccaggtcacgtcctctccagtgctccccctccacagctgaggacccctctggatctcccagatccagcccagcccgcctgccccagctccattcaccggtgctgctgcgcccctactgagtagcgagtaggtctgggagagcaaccgtgaacgagacgccaggtctgtgctcccacaggaaggagcaagatcagtcccaactgatgtgcagtgtgaggaaatagaatgggatgcaaggcgggtaggaaggtggctgtgaggacggtctccctggggaggtgagaggctgagacccaaacgggaggacaggagccggccaagcagggacacaggcgcagcacgcgcaaggcccctgaggcaggaacatgcccctcaaaggtgtggtgctgggtggggagcctgggcacagggcccggcccactggagcttgggggcatcctctgtgacccgtgtccccactcaggttcctcaagcagagttccctcaaaaaccgtgtttcttcagagcttgaaaacacctgtgtccaaggtaaagactcacctttcccctgggggaaagggatttttaaagagaattttcaaaagtgctgaaaagttgaaagaattgggcagtagacccacgacttaccgcctgggtcttgcaattggcagttggctgtgttcacgccatccctccatcccaccatccctccatccctccctccatcttgccatcccttcatcctccatccctccattctccatccctccctccactcctccatccctccatcccttcctccgtcctgccatcccgccatccctccctccatcctgccatcccgccatccctccatccctccctccatccatcttgccatcccttcatcctccatccctccattctccatccctccctccatccctccctccgtcctgccatcccgccatccctctgtccctccctccatcctgccatcccgccatccctccatccctcccgccctccatctcgccatccctccatctcgccatccctccatctcgccatctctccatctctccctccatccttccatctctccatccctccttccacccctccatccctccatccctttatccctccatccctccctccatccctccttccatctctccatccctccctccatccatccctccctccatcccaccatccttccatcctccttgcctccatccctcctccatccctccatcctccatccctccatcctccatctctccatcctccatccctccatccttcatcactccatctctatccctccatccatctattctccatccctccatcctccattcctccatccctccatgcctctgtccctgcatccctccgtccctccatccctccgtccctccatccctccatccctccacccctccattctccattcctccacccctccattctccattcctccatcctccatccctccgtccctccatctctccatcccttcatcctccattctccatcctccatccctccatctctccatccctccattttctatcctgccatctctccatccctccatctctccatccctccattctccctccctcctccatcctccatcctccttccatctctccatccctccattctccatccctccattctccatccctccgtctctccatccctccatctgtccatccctccatcctccttccctctattcctccatcctccatccatccatccctccctccatccctccattctccatccctccctttatccctccatccctcctccatccctccctccctgccctccctccctccctctgtctatccctctcccacccctccatccctccctcgctccatgcctccatggtatccctccctccctgcgtgggtcgctccctccgtgcctccgggctccatcctccatccctccctccatcccaccatccttccatccctccatcccaccatccctccattccgccatccctctcagcttgttttttggaagcctttcaaagttgcagacctcagcacccccacctgtcaacacttaacacgattcagcatcttgaactggactcactgtctctttttttttgagagggagtctcactctgttgcccaggctggagtgcagtggcatgatcttggctcactgcaacctccgcctcccaggtttaagcgattctcctgcctccgcctcccaagtagctgggattacaggcactggccaccacacccgcctaatttttgtattttcagtagagacggggtttcaccatgttggccaggctggtctctaactcctgggctcaagtgacccgcctgcctcggcctcccaaagtgctgggatgacaggcgtgagccaccgtaaagcctggcctaaaactttctctttttcttttcagtcttcattcctttctctttttctagtcttattgctccagccagcacttccgctgcagtggcggctctcacagccacacccctggtcttgtggttgacattaaggcatttcccataactttttgctttatacttctttcattttatattttattttattttattttaattttaagacaggatcttgctctgttgcccaggctagagtgcagtggtgcagtcatagctcactgcagcctcaaacttctgggttcaagtgatcctcccgcctcagcctcccaagtagctagaaatacaggtgtgcaccaccactcctggctaatatttaaatttttttgtagagatgggggtctcacgatgttgcccaggcaagtctcaaacttctgggctcaagccgtcctcctgcctcagcctcccaaagtgctagagccacctcgcctggtcttatatttctttttaaagtaaaagcagtctccctttctctcctttttttctttcttggtagtattttggggggacgtgaaattcatgttgaatttcgttgaaggtttttctggattcggagatgggatcacagcgtttttcaccgttgactttgggtaacttcctaaatttccccaaatccccatttcccggcctgtcaaacggtgatcatgaattaggtggcagctggatcaggtgctcacaggcgcctcctggccacgcgccgtcggggagtgggccgtggggggcgaaggcagaggcgagtgtgccaggcggggggccgagtgatggtgcagccttttatttctagatctgcctgtttttcgagaaacccaggtttttctccaaaacattgtgatttctagagttgaccgaacccaaacaccgcagggctcagaaccaagcccgggcgggccactcaccagggtgtgctgggagtggtgggtgccggggaccgcggatgtaccgggtgacagtttacggcgactcgctgggcttggggctgcagggccgggcaggtacctgagttcacatctctcatcacttcccggtggggaccatcagtcgggtgctgcctgtccccaaacagggaccccattgcctaccatgccaggcctgtatgggttagagacggtcacgcgggaggcctggccacatgggttctccccagcggtgtcagaatccttccacctctcccagcctcggtttccccatgtgtcaaatgaagccgtgaggagtggctgcctggtcaggctgggtgggatcctgtgtggggagagcttggtcggcacctggtgcagatatttgctgttgcagccgtgttgaacatctcacccaagggtttaacctcaggggctactgaagcggggcatcacctggggtcatcctgcccccctggggacacggggccatgtctggagacatctgtggttgttacagctggggggtgcccctggcatggagtgggtggaggccagggatgctgctcggcaccctgcagtgcccaggacggccccagtgaccagcccagagaacaatccagccctaagtgctgaggggggagatcctggtttgcatgggctttggggggtgcctggaggcccccaagccgtttgcatgtgggtacactcatatcaagagagaagaggcctgaggcagggccgtttgatgtcaccatggacgagactgtccatcccggtccataccagagaggagcagaagctgagggtcggcaccagcctttcagacctcggtagttgctgtttactgcgtttcacaaaagccttggtccatgatggagagaaaagaaaggttgaactcagttctacagcacagacagtgtgagaagctccagcctgcagcagactggctgcccttctggtcaagccttgaccaagtcccccaacctcctttagagacaagcaaactgaggccctgggggatgaccgagtttggagaaggttccagatggtgtatgtcactgggcaatgcttttgcaactaaagggatctgcatcttcattttgcttttctgggacacaaaattcactctttgaaagtgtcttactgcttacttattgcaactgagtaaattcttctcggcgtattcacagagttgttcagtcactgccactaattctagtacatttccatcaccccgaaagcaaaccctgcgcctggcggctgtcactctccatccctccccagccccagcacccatgcatcccctccctgtctctctggatcagcctgtcctggacatttcatagaaatggggtcacacactgcatggcctcttgtgtctggtatctctcactgagtgtgacgtcttcaaggtgcatccgtgctgtggcctgcgtcagagcctcactccttttcatggctgaataatccatgtacagattattaatgcttctttgaatgtaagaagtccaagtaagacaaaggaattaaaaactgtaactcctcctgttccaaagaagtccacagataggccgggcacggtggctcatgtctgtcatcgcagcacgctgggaggccaaggcgggcagatcacgaggtcaagagattgagaccatcctgggtaacacggtgaaaccccatctctactaaaaatacaaaaaagctgggcatggtggtgcgtgcctgtagtcccagctactcgggggaggctgaggcaggagaatcgcttgaacccgggaggcggaggctgtagtgagccgagatctgcagctactcgggggaggctgaggcaggagaatcgcttgaacccgggaggcggaggctgtagtgagccgagatctgcagctactcgggggaggctgaggcaggagaatcgcttgaacccgagtggcggaggctgtagtgagccaagatctgcagctactcgggggaggctgagacaggagaatcacttaaacccaagaggcagaggttgtagtgagccgagatctgtttcagtcagctattgtataacaaaccacccccagacagaagcttcaaacaactgtgtatttgcttgcgattctgttatttgggttgggttcagttgggtggttcttctgtaggtcatacctggggttagttccatggctgtggtcggcagtggcaggaaattcaagctcgtcctacacttgcctgtccaaccctcagccaggatggcaggaacagctggggccgcccggtctttttgcagggagctggcctctgagtgtcgtggcccaggttcccagaggcacagtgagaagtgccagccttcctcacgcccacaccatcccttgcatcacattctgttggtcagagcaagtcacactactgccaagcgtcgcagccatctgtggacagccacagaaggcctttctgcagtttagcaggagaagattcttgcacggcctacccttgtccgccgggtcctggtctgagcctcaccagagctgagggtcggccctgccgcctccgggtccccaccccagcctgtgtcgtggagtgccgctgcccagcctggccgtcctggcaggtcctcagaggggcctgtggtccccatggtcggaggcctgcacggcgggaggccagaggatgggttgttccagcgaatgagggaggtgaccgtgagctctggcccggggttgcttcctgcttgtgggatcgcaggaccccgtgcctgggccgtcctcacacacccgggttgctgtgtcacggcgagcctgcacctgtcctggggtgcccagcagttgccctctgggcagcggccccacccaggggtgcaggccccctgtgctactctgacacacctgggtcccactgccgcccctttctcactggccttcccttgctgccctcagagctttgccagagtctgtgagcaggtgacagagcaggcctgggacccctgttgtggggatgacaacagccatgtatcaggtggtgccgtgtgccgggcagtgaggaggggatcgtttggtgcaggttggctggaggaggcctctgaggggtgatgttcaagccaggtctggggtgaaacaggaacaaaccgtgagggaatcttgggactggcaggccaggcagaggcaccgctcgtgcaaaggccatgacacagggtggcgctggcgtgctggagggacagcgagggcccgtgtggctggagcagagggaggagcagagggcagggagggggccacacagggtctggtggggtgacagggcctggtcttcaccctgcagggttgcagtgaggcctggggagacccttgtctgcggtgggggcggggtgggtgggccccctttcgcagaatccctcccctgccgtgggctctccccggccccccagtccccagccccccagtccccagcttcatcatcctgggccttccagggccctgcccactctccccccgcccccaccgcctccagggctggggctttctcctcccagccatgggggtctggaccttggttctacagggatgaggccaccactgttcctgtcctgcctgctgtcacagtgccctgcaggtgcccacaggggctgaggcaccttccacccaccctcgagcttgcctcgctgggccctctgccccacggcgccctgtcggtgagcccagaatgtgccctgtttcctctcactgtgatgcctccctccctctggccacctgtccagacctctccgtccccattcttactttgggtctcactgcagagccagcctgacaatctgcctcctcccccagtttagtcattccctgcctcagtgtccatgtcagacagatgtggagaggaagctctggcggaggcctgttgtgcagagaaaagaggaacgggtatctgtcagtccatgggtcagtcaacaaacacgcccatgctgtcagcccagggcaggccccgtcctgagggagcccccaggctcagcaggagggaccaggctggtctgcaggatggggcggtgtcagtggggtggcaaaggtggctggtgtgggacacagtgtccagggagcactggcagggccagggcggagaccaggcgcaggccagggaacagctgggtgcagaggcggccatgtggccccgtggagaatggcagtgcctctagggctcgagctggcttcagccgcactttatagagagagactgaggctcagagagaagccctgggcacacagggaggtggggtggccgatgaggtcaccgtgcagccagcgatcagagccgtgcaccgcaggcccgggtcgccaccacgtcctgtgatggggccaggagagaggggccccagcggcagagcccccgcctcgggcctggccagcggaaactgctcagaggggccacctcccggctccgcagcgcggctcgcctttcctcccccgactatttttaaaacctaatttcctcgaaaacggggtggctcattcagcagataattagtcacgtctcaggctgagcagagctcaccgtcatgacagccccctatgggggtcacggcaggctctgtgccctgagcgggcctcatggggagcgaggattgagtgaagatggcgctcacctgcccccaccccctgggcaggcggtggcagcaaggctgtgctttctccccgtcccctctcctccacaggacactcggctctggtctccccttgctgcccgttcctgcctgccctgggagccccacattttccctggggtcccccaaccgagtgcctcccctctccgtcctgctccacctccacctcagtgcttcggccccggccagtcccttaaccctacaggcccccagtgcagggacgttcccagcagggcccgagccgcctgcccctctcctctcctctccccgttagccagctcaggtgagtcgggcaggtgaagacgtggaaccacagagggaaactgaggcagggggcctacacccaacacgggtgaccccgaggtgcctggtgaggtcagcagagctgggtctggagggcctcactgcatccactgggtcccggggccgtagggagcctgggagagtccgggcaggggtggacccaagcgctgtgacctctcagcatcggggccactgaggaaaacagctgagtcacccaagtgggtgtgggggggccccagaggggtggtttcgcgagtagagtcaggactgtgggcagggaggccccagacaggccgagcagggggacgcccgggcccccgatgaggtctggaacgtcccgccccggcccaccgctggcttcctgccctctcttcttttccttcccccacaccctggacgtaaaaccgtgaattgttctgctcccgggccgccaacccaaacatcacgtcagcgtccagcaccttccgccccgccgcggcccagagcaggccctttgtggcctgtcagagacctgggggcgactggccctgtcctctggaaggacagagaagcagcccgtctttcccttcaccgtggcagccggaatcctgagtcaccccactccctccgtccccgtccccgcccctgcagtgagcaccatgggtctgtcccccagatccctccagggcccacccgctgcccacccagccctgcagggcatccaggtggcccgaggggaggacccttcagctgttcttgctgccttgagaagtacgccccctcccacccagggctggggtcctcactggagggctccgtgtgaggtcctgggctgcccagacaaagtccccgggactggggggcttggagcagcaggccttgaacaggcgtttgttctggctcagctctggaggccaggagcctgaggtccaggagtgggcagggctctgccctcccgaccgacctcggagaagctccacacccctctgctcctggtgcctccgggcatccttggcgtttcagggcctggaggagtggtgccctccccgcctccaccccacacggcatcttggcctccctgagcggcttctcttataaggacagcggtggatccagggcccaccccactccggcatgacctcatcttacccaatgacatcagcaaagactctctttccaaatacggttgcaggctgaggttcttggaaggacgtgaatgtcggagggacaccgtccaaccccgcaccctcaggcaggcgtggggactgaccacgactgcaggggcccaccagcgtctcgaatgcggccccctccccacctgccgcctgcagaggctcctgaccccagccccctccccacctgccgcctgccccaggttcctgaccgcagtcccctccccacctgccgcctgcagaggcttctggccccagccccctccatacctgctgcctgccccgaggctcctgaccccaggcccctccccggcctgcccctgccccgaggctcctgaccccagcaaagttttccacctcgtgccttcgtcttgtctccggcagttctgacccggcagcagagcaaagctatgggctgctccaccaagtcgcattcagttgccttcagtgcccgcggtggacgtgttttcagacggcagggcggtcaccggggtgcagcctctggatgggacacacgtgggtctcccgtgcacccaccgagagcagcacagtgcccatgggggccgaggggcgctggcagggctgatagggtggggcatcgccgacccaggcccaggtttgactttccttctccttctgtgtgacctcgggtgggttcacccctccctctgagcatctctttccgcgtcataaaacagaagggctcccgccttctctgcactctttgctggctttgtaaggccttggtccagaaagactttttgtctctcggggaaattctcctctgtcccctctcccgagtccacacccagccgggtccccacccctgacggcccccgtctgcaccgcggactccgcacccacctcctcacctgtctgcacctccctgaacctcgcccagttggcccctcacatgtcctggcctcccctgctcacctcagccggcctggaagccagggccagaccagttccaacgcactgctgcccagcccagagcagggaggcagccagagggccgagccctacggagcagggcacctgccgcaccctcctgcacacactccggcgcagcctgagtgtctccacgggctcataataatcccctttgagggcctgccccagcacccccagctgccagacctcagccagccctcccttccccaaccctcagcctcttcctctaggaagggggaatggagtgagaagatgctggcagagctggggtggagtcagccctgacccacagcccctgtgattgaaaagaagcatttgtctccatgcccctgggccctgggtggtgccagcatcggaatccaacagggaggcactccccttcggtacccgcctctgcatgagcctggaggacgctgctgttatccgtgcagcgtggctgcctcagccaccttgtgacctttgtgctgccgttccctccgcctggaactccctccggctcccacggcatccttgttcggcactgagctcagacaggaccagcccagggaagcccccccttgctgatccgcaccccgcctgtcaccccacatcaaacacccagccctgcgcccacccctgttgaccgtgagccccttgagggcgagaccaggtcttccccaggcctgcatggtggacgccagcacgtgcgatccctgcagtcgctgacatcgcttcccacctcagggctccgaggccaggagtccagccccagaacggggcctcaccaggctaaagtcaagctgtgggcagggctgggcccagcacaagctgcagaggagaatccgtttcccccttttcccagcatctagaggcgcccgcatctgtcggctcaggtcccttcctccctcttcacagccacagcgcagcctcttccagtctctgtctgactcaccctctcgcccccgctcgtgaggaccctgtgaggacatcgggctcccaggtcccccaggatcatctcccgtcggtctcagggcctgtaatcacagctgtagagtctgttcccgttctccagatgaggaccccagggccctgctgctgggagccagggctggggatgtggtcctgggtcctaggagctgagtctcgcctgctcccctcgtcccagcctccttgcatggaggaaggtgctcccggctcagcccaggcctgggctcgttggctcaatcctgcaggcctctgttgtcctctctggagctgcggcccaggccctgctgcgctgaccggaggctgcgggcccaggagccagggcagggctgggggtcccctcgcagcctctcttacccttccacaaacctcactctggagaggggcagggagggcggcagccctggggacccctggccagttcccactgaccgcagctgcccaggtgctgggcgctccctgcaactccagcctgccctcgccccagcgggggcctgccccccctcactccccacgctggcacctgatttccccatgcccgagcctctcctggcgcctgcctccgaggaagcggggcttggtcagttcagacctgctcagttgttgactgcccagaacctcatgtctgggtgtgaagggggtcagagccgggggaggtttgctccctatttcccctcccctcctccaggcaggtccaagccccaggccctccgtggtgggtgccaagcctaggcgtcaccagctgcccatctccctgaggctgcaaagcctctcccctgctctaggccccagtggctgccaaccagggtgaccatggcaggccccagtggcccccaccctcatcacatcctcccagcgcactcagtccatgtcttcacttgtgtgtagccttgagaccagccccacgcggagttacacacgccaggcctggggcgccagaaggtgggccgggggctgggcccaggactcccagaggtcaccggtttcctgtctgatacccagcttgtctcttctgcaggtttggctcagaagaaggcggccccaacagaggtgagtgtctggagcggacgaagggcctggggtccccaccctgacctgctgcctccctactcgcggagaagctgtgtggcctggggcagctcactacacctctctgggccccaaatgccgtccagtgtccacaagcaggatgaacgtgaggtctacaccaactgcgtcttgagaggtcggggtgaaattccgtgatggaggagggggccctgcatctgaggggccacaccctcagtggcaggggtgcctggtcagggctgcaggggcaggaagggcttctctgggttccaggccacgtggagcctggattctggggggtgggcggtggggagagagcagctctcgccgggggactgggggcaggaatggaagacctggctggagggttagacgctgcccagagggcgatgcccgaggctaccagctgcacccacgccctcagtgtctgtgagccacacaggcgtagtgcacagtgaggctgtgtgcagcctatgtgtgcatgtttgcctgcgtgcgtgtgtgcacgtttgtgtgtgtgcatgtttgcctgcgtgcgtgtgtgcacgtttgtgtgtgtgcatgtttgcctgcgtgcgtgtgtgcatctatttttgcttgtgtggatgtttgcctgtgtgtgtgcacgtttgtgtgtgtgcatgtttgcgtgcatgtgtgcacgtgtttgcctgtgttcatttgcctacgtgcgtgtgtgcacgtgtttgcctgtgttcatgtttgcctgagtgcatgtgtgtttgcctgtgtgcctgtttgcctgcgtgcgtatgtacacgtttgcctgtgtgcacgtctgcacgtgtgtttgcctgtgtgcatatttgtctgtgtgtgtgcacatctgcatgtacatgggtcctgtcattgctgcccgtctcctcccgagagctttctctgcacgttggccctgcctttgcagcttctgccagccccgtggcgccgagtggccttcttcccagccccagtgggcgcagtggggtgggccgtcctctgagggcacccgagctgctgcatctcccgtcttcccgcatgcagtcctcagggcacctgtccatgagccccattcacaggagcagtccccaaggcacctgtcccacctgggccacccttggccctgcgtccgtagccagagcttggagggctttgtccaccaggcctgggaccctgggatccttcctcagagtcccccggcgtgggggcagtgtggagggtggcgcgggtggagggtggcccgggtggcggggtgaattcctggggagagcctgccccctggcggccacctgggagaatgcagggaacatggctgagcagcgtcggctgtggagggagggcaggggcaggggtcagggctgcaggcgtgtccctggggctgatagcggtgggatggggtctggccagtggagggtccatggggtctcctagcaaacgcagtggcgctccttaaatgacggtgccaggcggggctgttctccttggttggcctctgtgtcccttcaggctcccaaggcccctcctcacatcctccctcgagggcaacaagctgaggccccctggggtcggcggtcccatctgctgggacacccgcgctgcccgacagcttgcaggagccgggcctgaccctggccagtgagaccatctccctcagggacaaggtggtcttttcaatccttccatcccagcggtctcacagttaggggccctggtgagggagaggagttacgactcccaccaccacctcaggcggtgggtgagatgctctgaggctggcctggctcacaccgtgttggcaggaagcctgacccccgctctgttcccacccccacctcagtcctgtttttttaaaaaatacccactttactgagatgtgatttgcatactgtactctctgaagtgtgcagtgagtgacttttagtacatttgcagagttgtgtggggacatctgtggttgccacaactgggaggtgctcctggcatggagtgggtggaggccaggaatgctgctcagcaccctgctgtgcccagggtggccccaccccaaagaacggtccagccccagtgtccacagcacctgggggagaccctggaattagagggctggagctgcccaatcctcttgcccttcctgaggaggcagaggtctccaccttggagtgagcgcttctgggtgtccagtgtgggacactgaggggccccagccagcccgccaggcgcccacgggtgaggggcctcctgctgcaccccggagtcgcctggacctgccccctgccctgtgcacccctgctgggcccaacgactaaacctttcttcccagggtttcagagcgtgccctgtcccggtgggcgtgctccttagggagttaacgcttcctgcttcctcttcccaggttctgtccatgacggcacagccgggccctggccatgggaagaagttgggccatcgaggtgtggacgcatccggcgaaaccacctacaagaaggttcctcggctccccttagctggctggagggagcgggacagagcagaggggagggggatcccactggtagcatggatggggcctatcgcccccgacacaaaccagggtctgcccagggacaggtgtgggctgtgtggaggcagaggctggagtcctcagtcctgcatgaggccccactgtttgctgtccttgccgggcggccgggcagcatgttctgtggctcagcctggctgcaacgcctgcccggctctgagtccctgaaacctcgggcagagcctgggctctcggccctggtgagggagaggggttatggaccccaccaccacctcgggcagtggatgggacactctgaggctggcctggctcacaccgtgttggtaggaagcctgacccccactctgttcccacccccacctagggcctgttttttcaaaagtaaccgttttactgagatgtgattcatatactgtacaattcagcctttaaagtgtgcagtaaatgacttttagtacatatgcagagttgtgcagccgtcacctctaattccagaacattgcatcagctcaaatagcaactctgtccctgttagcagtcacccccatcccgactcccagccctggcacccacatccctttcctgcgtctgtggatcagcctgtcctggacgtgtcatagaagtggaatcacacactgtgtggctttctgtgtctggcgtctctcactgagtgtagcgtcctcagggttcattcgcactggggcccgtgtcagagccttgctcctgttcatggctgagtcgtgttctggtgcgtggggcgcccgtgctgcacttgtcctttgctgcgtcatggacgctcgggtgcttcacactcctggccattgtgaattgtgctgctgaggacacgtgtgtgtgagtctgtgtggatacatgtgttcgtttgtctcgggcagacacccaggagtggaattgccaagtcacgtgtaactcggtgtcatcttttgagaaactcgcaaactgttctccatagcagcggtaccgttttcacacccagcaacagtgaatgaggcccagcgtccccgtgtcctcaccagcactcgtgattgttgtctctgattctggcgtcctcatgggtgtgaggtggtgtctcttcgaggtgtctttttgtttgttttggtagagacaggggtttcaccatgttgcccaggctggtctcgaactcccaggctcaggggatcctcccaccccggcctcccgactggccgggattccaggtgcgtggcccccctgtggtttgatgtgctttcccttggtgcccagtggcatggagcgtctttgcgggcttcagggccgtttgtatgttatctttgggcacatgtctgttctgtccgtggcatctcggggaggtgaacatacaggccagaccccccaccacccagagtgtggcttaggagggagacaggccgaaactgggcagtggcagaaaccaactcccaactcccgacctccctccctgccacctcgcacctgcgacaggagcactggagaccggaattagagagcggaggtatgagccggcttcccagggctaaagtgaacatggcgcgagagcacacagtgagaataatgcaaacgatgccaatggcaaaaataacagcagccggccgggcgcggaggctcactcctggaatcctagcactttgggaggccgaggcgggaggatcaccagaggtcaggagttggagaccagcctgggcaacatggcgcaaccttgtctgtactaaaaatacaaaaaaataattagccgggtgtgctggtgcgtgcctgtaatcccagctcttgggaggctgaggcgggagaatagcttgaacccaggaggcggaggttgcagtgatccaagatcgcaccactgcattccagcctgggcagtagagcaagactctgtctcaaaaaataataacggggccggcgtgctggctcacacgtgcaatcgcagcattttgggaggcccaggcaggtggattagctgaggtcaggagttcgagaccagcctggccaacatggtgaaaccccgtctctactaaaaatacaaaaattagccaggcgtgacggcgcgcacctataatcccagctactcaggaagctgaggcaggagaatcacttgaacctgggaggtggaggttgcagtgagctgagattgcgccactgcactccagcctgggcgacagagcaagactctgtctcaaaaaataaacaaataaaaataataacagcagctgacaccacgtccgcaagagggccagaaccattgtgcccatccctgtctacaggcagggaaactgaggcacatagcggccatgtgggttgcccagtgtgaccacgtgcgttacatagaaagcagctaacgggaacctgcgtctgcagatgtgaaagtgatctgggcatctcgctgtaaatggtaccccctaaaaacaaactcttgacagtgaatcgacccttttgctaagttggagctgtttcaaaatgggagaacctttagaacctagctagccaacaggactgggagggctgagtgacgtggtgcggcagttgcagccgagccctgtcctggctgtgtggcccgagggagggtggcttcatcccccggcctgatgtcgacagctcagcagccgcaggacaggcagccccggggaccaccaggagggggttggcaggtgccgggtcccaagctgcagctggtcacgatctccaccccccggtgcacacagggggtgcagggcagcgtggggagcagccgggggccctgacactctggtctccctgcagaccacctcctccaccctgaagggtgccatccagctgggcatcggctacaccgtgggccacctgagctccaagcccgaacgcgacgtgctcatgcaggacttctacgtggtggagagcatcttcttccccaggtgggccgggcccccggagcctcagggctcacccagcacacacgtggctctgaggcggagtggcctgtcctgagcgcccttctctgctgaaagcagcacctggcccctcctggcgcctccttggccttgagctctggccctctgtccgtcaggacgtttgtttgctgctgaatcagagacccaatgtaaaggcagtttaagaacaggaaaaagaaaagatagaagttagctcttttctaatctacaaataaccagtgggcagtgcagggctggtcaggaggttccatggtgttggggtcctgggatccttctggtcaccccacaccgccatcctcaatatacagctctgtgaccagtggtcccaggtggctgccaaagctcctgccatcacggctgcattccagccacaggaggcaacagaaggagaacaacagcccttccctttcggacatgaccagtgtttctgctccactcgtgtcattggctgagtgcagtcacgtgagcacacctagctgcaagaggctggggcggcatggtcctgttcttggcggccatgtgcctggccaacactgtgggccccgttgttaatgaaagaagagagggtggttactgggggacagtcccatcgggagccccctgttgcttgtgggattgggccgtttcaaggaagtcttggagctgagccgctagaggctcagctgctagaggcactaggagggaccatggcgggggtgggggagaggtgcccaccacccctcacaggtttcctcccgtccttcctccacagcgaaggcagcaacctcacccccgcccaccacttccaggacttccgcttcaagacctatgcacctgtcgccttccgctacttccgggagctctttgggatccggccagatgattacttggtaagcatatttgctgttacgggcttccaggcttgaaacagaacatgttcagggtctcggagggtctgtgggtcaggcatttgggggcagcctccctgggttcctcgtgtagggttatggtcaggttcagggccggagtctcctgtgagactcaccgggaaagcaggagagatcggcctccaagctcacatcactggcagctgcaggactccgtcctggctggcgttggctgggagcctccattcctcaccatgtgggccttgtcatcagagcaggcgagggtgtccactcaccaaacagttggtatagtcttctgcagcctggtgccaaagtgactgacccattttcagacttaagggttagaacaaggcactgggacgtgggtgccactggggaccagcgtagagtcggacctcctagctctagccatggctttattgtttcaggttagcaaagtcaaaatctaggccaacccctttgacctagcagcccattatccgggctcctaaaagaggtgtttggagggtggtgctccccacagtggccctggagctcatcagcgccagcacccccttttttttttttcgagacagagtctcgctctgtcgcccaggctggagtgcagtggtgcgatctcggctcactgtaagctccgcctcctgggttcacgccattctcctgcctcagcttcccgagtagctgggactacaggtgcctgccaccacgcccggctaattttttgtatttttagtagagacggggtttcaccgtgtcagccaggatggtctcgatctcctgacctcgtgatctgcctgtctcagcctcccgtagtgctgggattagaggcgtgagctaccgcctcagcctcccgaagtgctgggattccaggcgtgagccccggcatccaacctgcgccatcaccacttctaaaagctccgggtggccttttcccaagcctgcctggtcatcccgagaactttgtatcagggaagactggaactctgtagacaagtgcggttggcgttctggttgtcacgacagcacggtccccggggccgggagcctgtggttctccgatcctgccctcacccacggtggtcggttccttgtgcctttctttggtggttgctgactgtgcgtgcgtttggtttatctcagtctgtaggaagcgcccgaggctgcgctcttccagggagaactagcatgtgctccagccaggggtacgtgtgacacccccccctcccccgccccgagaactccagcctgttcaggtgcccgggagtcaccatgctccgggtcgtgtcgccaaggcccagcctccggacttcagtgtcccagcgtttgcctgagcttggcagggcagtggggagtgaaaacacagctggggtttttgcctagaaatggccctcgggtgacctggacgctaccgtgtgaggcggccaggaacagaaggcagcagcctggctcgtagcagagagacagcacccgtgtccattagcaggagtggacggataaaagccgatctggggccatctgggtctcacctagaacccgataagatcgcattccagggccttaggccaggtgtgcacccacagcatctggggagccagcccggtgttggtgacccccgaatccttctgctcatctcaggagtgtgagaattctcttgggggcctccggtgctgagcaggcggcagccccctagcctctgtccaggctgtggtgtgagtgtggccgtgtgccacagcgggaggacgggctagtgtgcgtgttgctgtccacagggcccctgagcttgagtggggacaggtagggttcggaggggactcgaggttgccggtgcttctctgattggacagctgaggtcacagtcccccctggtaaggggggtagctccagcaaggcccacagctcaggacagccaggaaggagaaggcggaggtgggatgcagggtggggctcagccctgcccagtggtcagcagagggtggagaggaggccaaggtcagcggcgcagctgccgagagccccagcaccgacgaaggaggctgtggggggttgtcctggcactgcctggctcagaaatccacgcatggggcctgcttccccgtagcagctgaggcccatggaggccatagccctgcaactgccattagtcatgtggcttcagaatttccctgtcatcggtgttctttgtacaaagccgaacgtgccctttccacagtgttttccgctctgcaggtgagatcggcctccccctcctgccaccgtggacaggcagcagtgatttgtgtctcggagggacactccggctgcttggggtgtcccctgctccgggtgacctgaggacagcggcccagggcttggcggggtcccctggcctcccagggagggcgccagccccaggagagacccgccttcgctctgcgctgctgcgcctgtgtctgggaggctggagggcgtcctgccgtggcggggaaggcggaggagccgcgtgggctctgtgtttcctgtggatatttgtggctcgtggctgtgggcagaaaaaggcaggcagatggctgggctgggcgacagcagtggcctggacagatctccctccagcctcagagtccaccccacacggctctctcaccctgcaccatcactcccagccaggccatggcagaagcagcgcatgcaggaggaaggaccctcgctgttctgagctgccaaggttggcagggctgttgctgactccgcaaaatccagcctgtgttgaccgacgtgtgataactgatggcgccgttccctggcccgagagcacctcgggcagtgcagggcgggggtggtgacttgagcccaaggagggactggggcattcccaggccctgggcctgatgtgacctcatgtttccggcgtcctctggtccccaaacatattcacagatcagagtgtgtgtggcgctggggacccaactcacgcctcaagcccctggctcttccagcattttccaaaggtggttcccctcacttgttggggtgtttttttaaacactcttgctctgttgcccaggttggagggcagtggcgctgtcacagctcacagcagccttgacctcctgggctcaagtgatcctcccacctcagcctcccaagtagctgggaccacagatgggcatcaccatgcctgtttttgttttctttcttttttttttttagtacagatgaggcctcgctctgttgcccaggctggtcttgaactcctgggctcaaatgatcctcctcagcctcccaaggtgttgggattacagagtgctgggtgagccgccgtgcctggcctcccctcgcttctgctcgccaccactcctgactctcgtggacaccccccacctgtttatcacagcagcattggaggcggcacgcagcactcggagaccacccttctgtcgtccagcagatacggacccagcgttgaccctggggggcctggcttgctccgctgatggggagctggctctgacctcatccgtgtacaccaatggcgaccagttaggattttaaagggcgtgacacagatggccttagccccatgcacacttcattggttccatacccggaagacgcagggtagcacccgtgggtctcatcttcattctagtccttagcaaatcgagcacctgtcgagtcagtgacacaaaaaaacttccacctgcacggaccttctgcctaatgtccaggagagggcgtgggggcagagagacagcgagcacatcatgaaacaaacagcaggggctgagaaaaaggggcagagaagtggggaggaagggcttggactgtggggtgccaggggccagagtggggcctgcccatcagagatgcagcttccatcccagagcttaccttctagtccagtgtggctgctgaggttccagccatcacatcagcatctcaggagggaaataggtgggaaggagagaagggcaaatacgcaggtatgccagctgcctgtcgcccatctgtggagccttccctgagttccacctgacagcttctgcttatgactcatggggcagagctggcgttgtggccccacccagcttcaggggtgctgggagcaccttttagccacgcgcgtcagcaccccggtgcgatcaggtgtccgctcctaaggagagcagcaggcagcctggggagtgcgccctagcagaccagccctcgggctgcagagtcagctcggcctcaggctccagtccttgctggctagcctcaggcaagtctctcgccctctctgagcctctctttccgcatctgtaaaatgcagcgacccgtcatcagttcctggggctgttgggcagaccggaagccagtgctgtctgtgtgtccggcagcttggggcccgctgacccgcctcctctgcttccagtactccctgtgcaatgagccgctgatcgagctgtccaacccgggcgccagtggctccctcttctacgtcaccagcgacgacgagttcatcatcaagaccgtcatgcacaaggaggccgagttcctgcagaagctgctccctggctactacatggtgcgtggcccgccctgcggggcagatggctcctcggtcaacccccttctcccggctggcgggagcagatgtctgcaaggcttgggcaagcaggcatccttggggcgtggtgagaggcatcttgggtcccggggactcaccctcgggggtcccccgtcaggcttcaccagcaccagtgttcaggagccgccctctcttcctcctgtggccacacgccttgggggccgtccccgggcagggctgggtgggcaccggcccctgcctggctccccatccccaccttgccaacaccccctatgagccgtgggccccagaaccagcagcctgcgggcagcgtctgtcagctgccacggaggcccaaggggcccaagggtgactcagagggttccagagaggagggggatgggccaccagatggtaccccacaaaagaccagctgctcaggcaggcgtgaggcagctccatccggcccacccctcatcccgcatgactcacagaaagggtgcgtcaggccccgggaggggggagtaggagtaggagccggcggctgccacagtgttcctgggcctgggattccggtactcgcccagacgaggtgggcgccttccatgttgccaggcccaagctgctgcccggccctgggcagcacagcacagcctgtgactcagtttcccttgaggcctcctccatccactctctgtgatgcttagcgaggggcccgggctccttagatcaggctcagcaaactcagtctttaaaggcccagagagagtgtttttggctctgcgagccagtgtgctgtgtctccaggactgagctctgcctggatggcagcgagctgctgtgaccacatgagaatggatgggcgcggccatgtgcccatacgcattatttatggaccaagaaatgcgaattccatatcactttcacgtgtcatcaaagactattttctatttctccacttttttatttatttatttatgttttgagacggagtctcgctctgtcacccaggctggagtgcagtggtgccatcttggctcactgcagcctccccctcctgggttcaagccattctcctgcctcagcctcccgagtagctgggactacaggcgcccgccaccacgcctggctatttttttatatttttagtagagacatggtttcaccgtgttagccaggatggtctcgatttcctgatgtcgtgatctgcctgtctcggcctcctggagtgttggaattataggcgtgagccaccgcgcctggcctcttcattttttttttttttttttttttttgagatggagtctcgctctgtcacccaggctggagtgcattggcgtgatcttggcttactgcaagctccgcctcctgggttcaagcgattctgctgcctcagcctcctgagtagttgtgattccaggcacctaccaccacgcctggctaatttttgtatttttagtagagatggggtttcaccgtgttggtcaagctggtctcctgacttcatgatctgcctgccttggcctcccaaagtgctaggattatagatgtgagccactgtgcttggcctttttttttttttttcttttgagatggagtctggctctgttgcccaggctggaatgcaatggcacaatctcggctcactgcaacctccatctcctaggttcaagtgattctcctgcctcagcctcccaagcagctgggattacaggcatgcgccaccactcccagctaatttttatttttaatagagacggggtttcaccatgttggccaggctggtctcaaactcctgacctcaggtgatccgcccgcctcggcctcccacagtgctaggattacaggcatgagccatcgcactgggccctttccactttttaaaaatggaaaaaccattcttagctcacagccctacaaaaataggtggtggccggattcggcccaggggctggagttcacctagcctgcccaggctggtgcctgagtccgcgcccctcactcctctccctgtgggtctgtctcagccccgacacctgggcagcttcccactgggttcgtcattgagaggctctgggcagggggcgctgttgcttcacttgggtgcccctgagtcacccagtgcctgcttggggtctacagggtacagcaggacccagactcgtcactgcgcctggggacccagatttggagtgaaagtctgagttgatcagttcaacacaggcaaagcataaccaacatagaggctgggctcacgcctggagtcctggcactttcggaggctgaggtgggaggatggtttgagccctggaggtggaggctgcagtgagctgtgatcgcaccgttgcactccagcctgggcgacagagcgagaccctgtctcaagaaaatacatgtgtgtgtgcgtgtgtgtgtatgtgtttgtgtgtgcatatacatacatgtatgtattttaggatacagcattgcgtttccggcctccagacctcccaacaggcgagcccagccagggcgatgtctgtgggcaggcagggagtgtggaagcttctgctggaacagaagcgcctgccttggggcctggctctgtagaaacagaccctcctggagctcacagttgtggcccatgagagtcagggtgccgtgggaaggccagctgggtgcctgcataggaacggggtccccgagggcttctggggagagaggggggctggccaggggcatccatgagccccctgaggcagaggcctgctttgcccgcccccgtgagtctgtggcccagccgccctccacgacttgccctcttcccccggcagaacctcaaccagaacccgcggacgctgctgcccaagttctatgggctgtactgcgtgcagtcggggggcaagaacatccgcgtcgtggtcatgaacaacatcctgccccgcgtggtcaagatgcacctcaagttcgacctcaagggctccacctacaagcggcgcgccagcaagaaggagaaggagaagagcttccccacctacaaggacctggacttcatgcaggacatgcccgaggggctcctgctggacgccgacaccttcagcgccctggtcaagacgctgcagcgggactgcctggtgagggctcggccccggccggggagggagggtggcaggtgggactgcgtggtgagggctcggcctgggcaggcagggccagggagggtgccaggccgaggcccacctgccctgcagcctacagcaggccccaccccagtgtgggatccagaagcgctcaagcttttatggccttaacctaaaatgtggccggacacagtggctcacgcctgggatcccagctctttgggaggcaggcagatggcttgagcccagggtttcaagaccagcaggggcaacattgtgagaccccatctcacaaagaaaacaaaacacttataacatgtccccagacccagcccttgggggtcgggagtgtctgcactgctgagaagtggttcctctggaggttacacgatgacagtggtagagtccccccaccccccagagaagagcccagccttcagatgctgtggtcacaagcccagagctcccagccagccatgagagcttgctgtgcctcagtttcctcacccatcaaatgggatgactgcttgctctgcaggccacagtgagggcccatgtgcgtccagtgagggtctggctcctgtccccgtggagcctgcgttggctccgtgttagcgaaagaatgatatgcacggctcttcctctgcctgggttagctccgtcgtccccgtcccaccccggcagcttcgaggcatggagccaaggaggggaggccccagcctgtcaggagcagagcctgggacctcccagctccccaactccacccaggccccgctgctgaccatccccagctccccgacccctttgagaacttgacccatacccccagaaaaccgcccagaccactcaggggccttgaggctaccctgggcatccacccacctgggtgtcacctgtcaggccgggcacgtccttgcccatgggcctgggctggtcagagcataggcccggctccctgtctctcaggaaggagtaaagccaggaagggaagtccctgtctcagtgcccggggcagcctgctgtgaggctggaagcccccattctctggcctgctctgatgccgctgtgtgaccgcagcccctctgttcctcaggataacactagaacccccactcctgcctggccgtgggactccatctctcacacccgagcccacggggccatccgtgctgggaaccccatagggtccgggagccgttgtgggggatagagacggctgacggcgtggcgtgttcctgcccgatcccgccaggtcctggaaagtttcaagatcatggactacagcctgctgctgggcgtgcacaacatcgaccagcacgagcgcgagcggcaggcgcagggcgcccagagcacctcagatgagaagcggcctgtgggccagaaggcgctctactccacggccatggagtccatccagggtggcgccgcgcgcggggaggccatcgaatcggatgacacgtaggtgggcggggggccgccggacccgtcccgcttcccttccccacaggctccagttccccatccccgtcccaagtgtgaaaacaggcagggagggctggcgagggcatgcgtgggtgacagacagagtctgggagccttgtgccagcgcctcagagcgaagccaggccgtagtgcgggccgcaggctgagtgcagggttccgggccttggcttgcaatggtgggggcgtttcccattcacccgtgactgggccgaggccactggccatccacaggaatgagagagagatagcgtttcccggtggcactcagaggggtctacacgccacccgtgcagagaggggccacaaaggtgtggaaggcgcatgggaggccagagggatcgggcgaggcagggctcacagcaggacacagcccacgaagcagagggactgcaaaatccgattccacacagatcaaagcagctgctggctgggcgcagtgtctcatgcctgtactcccagcaccttgggagaccaaggtgggaggattgcctcagccccggagttcagtaccagcctgggcaacatggcaagaccccatctctacaaaaaatataaaatgtagctggacgtggtggcacgtgcacctgtagtcccaactacttgggaggctgaaggcgtggcaggcgtgagcgtggcaggcggaggttgcagtgagccaagatcacaccactgcactccagcttgggcaacagagtgagaccctgtcttaaaaaaaaaaaaaaaaacgctgggcgcggtggctcacacctgtaatcccagcactttgggaggctgaggcaggtggatcatctgaggtcaggagttccagaccagcctggccaacatggtgaaaccccatctctgcttaatacaaaatattagctgggcgtggtggtgcacgcctgtaatcccagctacttgggaggctgaggcaggagaatcgcttgaacccaggaggtggaggttgcagtgagctgagattgagctattgcactccagcctgggcaacaagagctaaactctgtccaaaaagaaaaaaaaagtggctgccacagaagataggaacggtggtggagagaggaggccacatctcagtggcctgcagtcatgtctgctggacaccaggggcagagggaccaggcaggccctgccctcacagggctcagggtttggctggggagatactcacagagctctcctgggacactggatgtgagggctgggtcattctctggggtggggctgtcctgggcactgcagggtgctgagcagcgtcccgggcctccacccactccgggccaggagcaccccccagttgtgacaaccacagatgtccccagacatggccccggatgcgggatagacaggtgtcgtatagcagtgctgagattgtgccctggtcacagcagcaccctgacagtgggggcaggcccgagccttcactttggtacctgttcagtcttcacagcggccttggaggagggaggtgggcttcccctgtttccagctgaggaaataggctcctaggttggggggcagccttccccagtgcagccacgaaggtgtggagccaagttccacctggcctggccccagggacggtgctggctggcactggctggcactaggccaccagctgggctttggtttgcagcggtggtggtatttcccatggatggcagaggaggagccggggccccaaccagggtgtagctgcgggggggtgcgggagccaaggccaggcacagctccccctcagaccatcctggcgtttgtagggtcttcgctggcctggcgggggagcaggtgagcgtaccagcctgtggcgtgagcagagcgtgcagggcgccagcccagcgggtctgggtcccagtggcttcaggatgactgctgcacgtgtggcctcactaaccgcgctgggcaggggacgtgtgggcacggtgccgggtgacagttaactcccgcgctgggcaggggacgtgtgggcacggtgccgggtgacagttaactcccgcgctgggcaggggacgtgtgggcacggtgccgggtgacagttaactcccgcgctgggcaggggacgtgtgggcacggtgccgggtgacagttaactcccgcgctgggcaggggacgtgtgggcacggtgccgggtgacagttaactcccgcgctgggcaggggacgtgtgggcacggtgccgggtgacagttaactcccgcgctgggcaggggacgtgtgggcacggtgccgggtgacagttaactcccgcgctgggcaggggacgtgtgggcatggtgccgggtgacagttaactcccgcgctgggcaggggacgtgtgggcacggtgccgggtgacagttaactcccgcgctgggcaggggacgtgtgggcacggtgccgggtgacagttaactcccgcgctgggcaggggacgtgtgggcacggtgccgggtgacagttaactcccgcgctgggcaggggacgtgtgggcacggtgccgggtgacagttaactcccgcgctgggcaggggacgtgtgggcatggtgccgggtgacagttaactcccgcgctgggcaggggacgtgtgggcatggtgccgggtgacagttaactcccgcgctgggcaggggacgtgtgggcatggtgccgggtgacagttaactcccgcgctgggcaggggacgtgtgggcatggtgccgggtgacagttaactcccgcgctgggcaggggacgtgtgggcatggtgccgggtgacaattaactccccagtctgtacctgagaccccgtggccctacctgggcatgcagtgtgcgtgtgtgtgcatgtgtgtgtccaggcacacgtgtgtgtagggggtatgtgcccaggcctcctagctgggactcctcagcagtgcctgggcctgggtttgaggctgggggtgatggagggatgtcaggacagaggttcccgggtgccaggccccactccgagagcttggccaagttgccacccacaggagcagatggactccctagccctggagtccccagccccgcctgccccgagtcccagctctgcgggatgctgatggtaccctcggcctctctccccaggatgggcgggatccccgctgtgaacggccgcggggagcggctgctgctgcacattggcatcatcgacatcctgcagtcctacaggtgggtgcccgggtctgcagtcctacaggtggacgccccgggtctgcagtcccacaggtgggcgcccgggtctgcagccccacaggtgggcgcccgggtctgcagccccacaggtgggcgcctgggtctgcagtcccacaggtggatgggcgcccccaggacacccatgcacagaggcgcttgcccgtggaaacagccgcaccagcagctctcggggcttcctcaacctggaaagctcttgcttggctgccccttcttgagccctaaagggaaggtgtttggtcgccttgaaaatctagagtgagttgggcgtagtggtccacacctgtaatctagcactgtgggaggccgaggcgggaggattgcttgagcccaggagtttgagaccagcctgggcaacatagcaagaccccatctctacaaaatatcaaaaaattagctgagcgtggtggtgctcctgcagtcccagctacttgggaggccgaggcaggaggattccttgggcccaggagtctggggctgcagcagtgagctatgatggccgtactgcaccccaggctgggtgacagagcaagaccctgtcccaaaaaaaaagaaaaaagaaaatccaaggagtgggtttgaggcctcactttggggctcgaatatttgttttttggtttttcatttgtttgttttaagacaaagtctcgctctgtcactcaggccgaagagcattggtgcgatcttggctcactgcaacctctgccttctgagtcgaccctattctcctgccccagcctccccagtagctgggattactggcacgcgccagcacgcccggctaatttttgtatttttagtagagatggggtttcaccatgttggccaggctggtcttgaactcctgatctcaggtgatctgcctgccttggcctcccaaagtgctgggattacaggtgtgagccaccgtgctcagctggggctctagaatgtttaaaaacagtcaccccctcggtactatggacattgggaccagatggttctctggggtggggccgtcctgggccctgcagggtactgagcagagagcctccacccactccctgccaggagcacctgccaccctgagttttgacagccacgactgcttgaggccatggcccagtgtcctggggggtgcacagtggcccctgagtgaggtggcctggcatgggcttggctgatgtcagctgccactccgggtgctctctccacaggttcatcaagaaactggagcacacctggaaggccctcgtccacgatggggtgagcgcctgcaccctcctcccattcctcctcccatccctcctcctcctgtgagtgcctgcaccctcctcccatccctcctccctctgtgagtgcctgcaccctcctcccatccctcctcccatccctcctcctcctgtgagtgcctgcaccctcctcccatccctcctctgtgagtgcctgcaccctcctcccatccctcctctgtgagtgcctgcaccctccccccatccctcctccctctgtgagcgcctgcaccctcctcccatccctcctccctctgtgagcacctgcacccctcctcccatccctcctccctctgtgagcgcctgcaccctcctcccatccttcctccctgtgagcgcctgcacccctcctcccatccctcctccctctgtgagtgcctgcacccctcctcccatccttcctccctctgtcctcctgtctgtcgtcccagccttcctcccatccgtcactccacaaacgcagagtaccgcctggggccaggcactgaggactaacgtctgtgtgaccacagcctgtagaatccaagatcccaacaggcacccccatttttcaaaagagcgtgtagaaggtccaggcaggagcttccagaataagccttgagcgggtcaggatggcagctggcagaggcctctggggatgtcttaaaccttgccaaggcccggaacctgctgcccagggcagataggagcgctgtctcggctctgacgaggctggccagggtgtcctgtgctgccgccgcatgtccctggggttgtccttgtcccctggcccagagtggccgggcaccacctcccactgcagcctgcgggggtggagtcgttcacagtcctggtacgtggccactcctcacccaaggaggctgggaaaggaggttgcattctgggaggccgagatcacatcccagcagggccccagccaggccatcctgcctcagcctcccctacaagtccacgtgggccactgtgcctggccggaatactttattcagctggtttaaaaagtcaaaaatgctaacaggtctctagtggaaaagcctccacccattccctggcacccagtctccctccccagagggagccactgttccctgttccgtgagcccctcccaggaagccatggcgccatggacccatctcgagccttttcacacagaaggtgccccccacacacatacagcgtctgtctggggctgtccccagctgttgattgatgcaccctctgcccccgggcaccccccccaactctcttccaggacacggtgtccgtccaccgccccagcttctatgccgagcgctttttcaagttcatgagcaacacggtctttcggaagaactcctgtaagccacctgagccccgcaaggtgggagggaccctggggaaggcccagagcgccgtggggcaggagggactctgcgggaggccgagagccccctgggcagggcagtaaactcagagcccctgtgcccccctcagaccgggcctcatccggaggtagggtagtcgggatatttgctctgcacagcggtagagcacgggtctggagccaccgccagagcctgaatcctagcctggcctcgtcctgcccatgtggccttgagcaggcacctgcctctgtgccttggtttccccattggcacagcactgtgagggtacagtgtttatatatgggatgggtgggcctgactcagcagatagctcacagtgtgtggggctgcccacagcatcaccatcgccaaggaaacgcaccccgggcaggggaacgcaggaggctagcccagcagggcatggtcgggaaggtcccagggcaaacagtggtggggaaggtggggactcgggattcacccacagggtgcccgggggaggtccccatctctcagggctcagcttcccctcatgggccactgtagcatctggacgcagactctgggttccaggcccctgtgcagacctcagcccgtggccaacctgctgccagatggattcccccctggggtctgtttctcagccaccctccccaccagaaggctcccgggctccccagcatcctgcacaggcctggcccacagagatgcttgggaagtgtctggtggggggcatgaatgatctgcgggtccgcacccacgggggttgcagggaggtggcagggacaggcacgccagtgcccagcgcttgcaggcaggctgctcttcccggcctgcacacttgctcacggcctcgaggtcagggaccccctctcatcaacaccgtgggaattggcagacaccacgtgtcaggatctgtctccagagagccagccgttgagcctgtccccacaccccactctctgggaccgatgccacaggatcattccgtcatccagggctgtttgccagcctttggtgattgtaggaagctgcacaaggcaaactgagcacctactgtttaccaggagctgtgtgggtcattctgggggcagaggtcacaagagcttggtgaggaggcagagctcacacagcactgaggacaggcctggccctgtgcgggacatcacctgccccacctcaccccaccgctaaggtcggcccccagggcccagagagaccgagccgcacagccagcgggtgagcctggatctgcgctcaggccctacatgctgagccacaggcttctctaaccacaacacctggtgctccccaaggctgtcagtgtccatctgaaagtgggggccctgcccgggctgggccgcacatagaaggggttgaagcctgcaggcatccctggccagctcattagatgggagtcactggtctgcaggatcccaggaggggcaggcactgtgccaggtcccagtgtgtctcatagagacagtcgggtgggcaggacagggaactcgggctcgcagtccctccccaggcagaccccagttttccaccaagaggttgtggtgcttcctggcctcagggaccggtaggggtctggtgggccacagggacgtggggtatatgtgggcggcggccctgtctgggctttgctatgagcccccagcaaccccaagcaccaacccccacccttccctgcagccctgaagtcctcgccctccaagaaggggcgcggcggagccttgctagctgtgaaaccgctggggcccaccgctgccttctcggccagccagatccctagcgagcgggaggaggcccagtacgacctgcggggggcccgcagctaccccacgctggaggacgaaggtgaggggcagagggcagagtgcgcttgtgggcgctacagggggtgccagcagcagccccgtgggtggggtgccgcctcatcctgagtgcccatcgctcagccaccccctccggatctgcagggccgcctgcccagggagtgggggctgctgggaccgccccagggaagagcccagggggagctgagtatagaaggctccaccaggtggggtggtgacagctcccgccttctctcacggccactgtcatctgaggtgcaccaggatgccatcgaaggcatgcagcccccaggctagggaatgaaggaagggacatagccatgcaagggccctggggcaggaccacacctgctgagggaacagcaaggagcccgtgtggccaagcagcgcggaggggaagggagggggggtggggaggggaagagagcagtggaggggaagacagcggggagggagagtggagaggggacggggccaggctgcacagggccctctgggctgtctggattctattttgagagcggtcagaagcctttgtgtgagggggaacgtcgtccttccctgccgtgtggggaggtgggagtgtctgggaggcgggcgggcactgggctgtgggttcccagggtgagccaagcctcagggagaatcgactgtgtgtttgggggctcggaggctccgcaaggtgcccacagtcctctcccctcaggccggcccgacctcctgccctgcacgccaccttctttcgaagaagccactacagcctccattgccacgactctgtcatccacatccctctccattcctgagcggtccccctcggagacgtcggagcagccgcggtacaggtgggcgaggcatccgcagtgcatgtgggcggggcatccgctgtgcgtgggggcggggcattcactgcatgtgggcggggcatccgctgtgcatgtgggtggagcatcgtatgtacggtggatgtacatacactgcatgtgggtgcgcgggggcggagcatccaatgtgtgggagggaggagcatatgtacaggtgggcagggctgccagggggcaggtaggcaggcgggtaggcaaggcaggtagactgagcaggcgggccactctctttctgggtgtcacgtgtttgctgtatctctgcaggcggcgcacacagtcgtctggacaggatggcaggtgagacccaacccccttccttccctgggtctcaccagctcctcctgcacagctcccagctccgtttcccgccccccagcccctctgctctctgcccattctctcctggggacagatttaagattgtagcactcggccctagcaccgcacacaatcttccagccactttgtttttcttacagccagagccagggcagctctggtctgtggatccttccttatttcttcttctattaagttttttttttaacttaaaacaagatacaagagggaatatcgtgaaatgcgccccctcctgcccacggcctgtcccctccccaggagcaaccactgggactgtgggttttgtctcttggaagatactttctgggaacacagcagacgtgcaccaggcttgtggttcccttttattttgacacaaatgggcacacccgtgcacgccgcccacaccttgctgttgtcactcgactgacggggatctcaggggtgggtgcgcgccgttcctgtcacgcctgcgtgccgtccttccatcccatggactgcacctggctttaagtgcccagccctcggggacatttgcgaggtccctggggtctcactcttgtgaacactggggcagtggcgcggtgttgcttttcttaaccgtgttttaatcgctgccgcctggtgaaagaaaccccttggtgccctgggtgggatgtgaccctccctgcagtctagcgtgccatttggagagacatgttacatggccaggcccggcggccgggacactgagtcacttgtgtcagggcctcggctgccaggtgcaggcactgcctggagggtgggcagggtctgtggcacccacaccggtcggggctgccatttgctcatatgcccccagagcccgctacaccccaggccctgctggcaccacagtcaccaagggacccaggtggacagtccccgggctgggagtgacagccagaaagaacagacccaatcaggaggctcccaactcccctctgggactggccctggagttcactgggcactcctgggggtaggatgggggaagtgaggagggaaaccgaggcacaacctcccattgcctgcaggccgcaggaggagccacccgcggaagaggatctgcagcagattacagtgcaggtggagcctgcgtgcagcgtggagattgtggtccccaaagaggaggacgcagggtgagcacggcctcggcgggaggtcggggcgcccacctgctgcgggcccagaggagccaagagcaccccgaggtttcatcatgaagcagttctttcttactaggttgtattcacagatggtggattttcccataagtttattttttgattgaagggagtggttctcgactagccggggtgatcctagcccccaggggacactgggcgatgcctggggacatttgtgactgttagaactggggggtgctcctggcatggagtgggtggaggccagggacgctgctcagcatcagcctgcagtgcccgggatggccccaccccagagaaggacctggttccagtgtccacagggcccaggcaagagaccctgggctaagggttgtgtaagagcatctctgaacttccaagtatttaactaatttttttttaacctttttagtatttattaatttaattttattttatttttaattttttaaattttttttgtgagacaggatattgctctcttgcccaggctggagagcagtggctcaatcttggctcactgcagcctccgtctcccaggttcaagtgattctcctgcctcagcctcctgagtagctgggactacaggcacccaccaccacgcatggctaatttttgtgtgtgttttcagtaaagacagggtttctcccatcagccagctgggcaggcttggtctcaaactcctgaccttggccaggcacggtggctcatgcctgtaatcccagcactttgggaggctgaggcaggcggatcacgaggtcaggagatcgagaccatcctggctaacatggtgaaaccccatctctactaaaaaatagcaaaaattagccgggcgtggtggtggacacctgtcggcccagctacttaggaggctgaggcaggagaatggcgtgaacccgggaggcagagtttgcagtgagctgagatcgcaccactgcactccatcctaagcgacagagcaagactccacctaaaaaaaaaaaaactgacctcgagtgatctgcccaccttggcctcccaaagtactgggattaattttattgatttttgtattgaagaaaaaggcttaaaagaaatatctgtttttttaaaaaacacaggacacaatagttctggcccttttggggatatggtgtcagctgctgttattattattttctttgagacagaatctcgctctgttgcccaggctggagtgcagtggcacgatttcggctcactgcaacctccacctcctgggttcaagtgattctcttgcctcagcctcccgagtagctgggattacaggcatgcaccaccacgcccggctaatttttttgtatttttagtagagatggggtttcaccatgttgaccaggctggtctcgaactcctgacctcaggtgatcctcccgcctcggcctcccacagtgctaggatgacaggcgtgagccccgtggcggcccctgtatgtttttacttttctgtcatctgtctggtgtgtataatcccatgcttgcactgttaccaaattcttcttgcctttgtaatgatttttgcctgagatgcttttgtatttttgttccaagagagcttttttagcgctcacagcagcgtagacccaaaactaaagccctgggggtttatcttccacccagtgctcctgccactgtcaactctttgccattgccaaaccttgcaccgtgaaatttcaggttttgctgaaaggaactgtacctccgacatggcaggagggcatgtttagcctcattcctgggatgaacacgatgcaccgtgtggccatagccaaggccaaggccgttcctcacctcctctccgtgcctccgtttccgcaaatgcaacacaggggcagtagccgcaccctctccatcccccatgatagactcagtgggttaatcacgggagccagccctggcatgtagtaagtgctcagtgaaaagaacaaagaggctgggctcggaggcttccgtctgtgatccctcctaaaggaggctgaggcaggaggatcgcttgaccccatgagttggagaccagcctgggcaacatagtgagaccccatctctaaaaaaaaaaaaaaaattagttgggtgtagcagtgcacacctatagtctcagctacttgggaggccaaggttggaggatcgcttgagcccgggcggtggaggctgtagtgagccgtgatgacagcactgcacgccagcctggctgatggagccagggcctgtctgaaaaaacaaatcaatgaaagaaggaagaagctctgatcccagcggctaggtgccatctctccccacttgacagatgaggaaactgaggctcagaggaggaacaggccctcccagggtggcacagccggtgagggtgaggccagcacgtgcccacaggtgtgtgtgtctgagctgggagtggcagggccgagctgtcagcgggctggcgggtcactccaggtcactcctggggccagcatgaggggcttcttggggaggtttgttctgatttgcgataaatggcagcgcaggagcgcgcggcctgtggtcagctgcctggcttttcatctccgtgatgaccgtatgaagcccctgcctgggtcctgagtgggggcgcggggagtctccgtgtggggcctgagggtcaagaccctctgtctactcctgtccccagggtggaggcttccccggccggtgcctctgctgctgttgaagtagaaactgccagccaggcctcagacgaggagggcgcacctgccagccaggcctcggacgaggaggacgcgcccgccaccgacatctactttgtaagtgccccgggctcctcctgccgccggctcgtcaaccggactctctctcacacacgctccaccgtgtgcacaccgcatacacacacctgcacacaggcacgtgagtgtgccctgtcgacccacccacatgctctctcaccagccagcactctcacgacacgcccacacgcacccaccagccacgttcacacccaccttctcttcctggtctaaccccatggggtgggaagctcctccaaaccaggcctttctgaggccccagagccacccctgtccccttccccggccttgtgcccacggcaccttctgtgccacccgtctccctggaagtcgtccggagtcctcagactcttggcccctcgggaggccctggcacaggctgaggtcctgtgtccttgacagcctagacgtccagacagggctgtggcggcaggaccttctccctgttgccgtgggcgtggccaggtgggcttatccttgaggagggccgggggaccgggcagtggcaggagggcttcacgctcccacgccgtgggctggggactcgtggctgctactgggcagggcagggtctgcccggccctggggacctgggatccctgctctcccttgccagggtctgggtgaggtggctgccgggcggccagcgaggcctggaatgtccaggcagcgtctccactccccagtggtcccactcagatcaggcagccccaggtcacagggagggccggaggctgcagcccacttcccagatggtttgttctcaccctgcaccccctgggaaggagggctgggcacgggcaccaggccttagggcctgttgtgggggcacctcctcgctgcttcataactaactcccctgctctgtctccagtggcgcctctggggtccccatgcacccacctggccctggagaagggagggacgggccgcgtgcctgtgcccctacccaccgcacgtcgtcaccccttttcctgggactggtttgtgcgcgtcctggtctccggatggtacggggggcctgggggccatgtcgtgctgtgtgtctgtgtcctgatgccctgccaggtgggcagcagagaagggagaagggtcctcggtcctgcccctgccccggcaccccccaccttctgcttggcagtcagctgtccccacctgctccccgccacctccctccgcctctcccacccgaccacgggggtggccgcctcatccgctgtcctctgttttccttcctcctccggcccacccggcccgccccgtccagttcacggatgggaggtactggatttactctccccgccatcgccgactgcgggccgtgacgctgagcgcctcggggactgtaagtgaccgcagccggccaccctggggagaaggggcagtgcccctcgggcagcagggagccgcaggtccccggccggaagctcagtgtctgacgtcagttgttttccagaagggctttgggtaaatcacggctgcaattgaggtcagccacgctggccccggaccaggcgctgggctgcatgcgtcactgggaatgtcattcggtcccacgtcgaaccgggcgctccatagggcagcaccatcaccaggtgcacagctgaggcccagggtctgcttcggaccccggccagaccccagcgagcccctctctgcccctggacccagccctctcgtgtcagggtgtcttgggtggacgcttctcactcgtgcagacctggctgcccgtggccccgctggctgcacaggggaggttgcacaggtcagcagagtggctgcagggccgggctctgaaccgcagggccatggagacggggaggagatggtctctccacacccacctcacagatggaggcgctgaggcctcggctcccctgggagcctgggagaccacacggtttagtcaaaatccagatccccaagctctcaaggaggtccccctgggacgccacatgggccccacgtagctgtgagatcctcagggcctgctgttgtcattatgaccaataagcaaggggcccagagagcctaagagacctgcccagcaccgcacagccagaacggggcgcagacccaaagcaggagtgtcccctcgagacaaagcctccgccgaggccgccgtgactccccgcccatcagcaaacctctccgagcacctctgtgtgccaggcactgtggagtgaccccaagaggtggagaccacttccccggctgctctaggcagctccgtcccacggagccagcgggaagccagccaccgcgaagccgtgccccggagatcgtccaggagctgcccagaggggcctgctgggaggaggagcactggagagacccagcggccctgctggccaccccaccataggcagggagcagttcgcagaggccgcctacggaggggggtgcttggactttgaaaaacacctgacttgaaggggcagacgtggggagggtggtctcggcagcaggcacagcagaagcggaagtgtgggggccagaagggaggcagggcagccattgaaagcaccccaaggcctgagtgctgaagaggctgtgcccttggttctggtcttcctggggtcacccggttctgggtcccagctgctactgccccccacttcccctgtctgcccagctgctggctgagggtgtccctctctgtccccccaactcctgcaggacaaggaagccacctgtcctgccctttcttttttttcattttttgagacggagtcttgctctgtcgcccaggctggagtgcaatggcatgatctcagctcactgcaacctccaccccccaggtacaagcaattatcctgcctcagcctcctgagtagctgagattacaggcgcctgccaccatgcctggctaattttgagttttttgtttgtttgttttttgagacagagtctcgttctgtcgcccaggctggagtgcagtggcacaatctcggctcgctgcaagttccgcctcccgggttcacgccattctcctgcctcagcctcccgagtagctgggactacaggcgcccgccatcatgcctggctaatttttttgtatttttagtagagacgaggtttcaccgtgttcaccaggatggtctcaatctcctgacctcgtgatctgcccgcctcagcctcccaaagtgctgggattacaggcgtaagccaccgcgcccagccttgtttgttttttttgagatggagtctcactctgtcacccaggctggaatgcagtggctcaatttcagctcactgcaacctctggcctgggttcaagcgattcttctgcctcagcctcccgagttgctgggattacaggctcctgccaccatgccccaataattttttgtatttttagtaagagatggggttttaccatgttggccaggctggtctcgaactcctgacctcaggtatctgcccacctcggcctcccaaagttctgggattacaggcgtgagccaccacgcccggccttaatctttgtatttttagtagagatagggtttcgccatattggccaggctggtcttgaactcctgacctcaagtgatccacctgccttggcctcccaaagtgctgggatgacaggcgtgagctcctgcacctggcctgtatccccgtttctaatgctgtagcagaaggatactgtcatccctgcccacgtgctgtgtgtgcccgggatgcccctcccagagagcggctctgaggtggctgctgccaccctcctccctgcgggccagttctttcagggctcaggtggggaccctgttttggccccacattttcaagtccccatgggatccatcagtgcagccaccaaatcagtactgagcacccacataggctccccatgccgggctctcaagggacgttgggtggacctgacctgccattcccacgtcagggattccaggctgcatttgctaccctggaggaacaggcaaggcctgcgctggggtcctggcccctcagtgcaggagtcagtcctccgcgatgcggcctcgcagggcaggagtgcgctgccctcggtgcccagggcccgggaacaggggtcttgtggaagctgtaggatcgggcagggtggagtgagcacagaggtgggccctttagagggagcatggaggcagagcccgaggcagggagaggcagtgctcctgcaggtgaggtctgggctcacctggagcacaagggaggcccctgctggcccaggctgggcaactgggagctggcagaggcatgggttggcctgggcagcaggtgggcagcgtcatcctgactggaaggacgagcagtgggtcttggggtgatggactgggttgtgactgtggcgagtttaggggccgagggccgccaggtggacgtggccaggcaggtgtgtattcaggcctggcacttcaggccgaggccaggcctggtggaaattcgcaggtcatctgtgccgggaggggcgttgaaggctgggttggtgacagaggcccgagagagaggaggacacaacaaggaagacagggcggccaggctggagccctgagaaagcagagcagcctaggggcaggagaagcagggggagcttgagggggtgggggctcctcaggaggcgggacggaggtgttggaggaacgcaccctccctccctccccagatcccacccagacctgggacccctcacgcaggcacagctgggaagagctgtccgtgtccctgcacacggccctgcctgtgcctagccctgaacttggccctcactctgccctgctgctcaggaaggcgtctcctggctcttgcagggtgggtggtccgagcctcagtctctcctagcacgtctgtgctggcagaggggactggccctgcccgcaggcagccatatattcaggtcccaaaaggcttctgggttgggaagtaggtccggcaccccgacctcccaggacccccatagagagcttccaggagcctgtgcgctggtgcccgtggcacaggcaggattgggggctgtggtggggccgggctgtggaggaggaggaggaggaggaacactcggtgctccaggtcgcgacccccacccgcttccgccggctctgtcacctgctatctcaggccctgcctcgactgaactaactgctttctgccgcccgccgtgccccgccccgccaagctgagctgaggccccaggcccgtccaggttgggagcaagtccaccgggtcagagagggcagctgggctgagccacccctcgtcttccatgggggattcgcctcttttatgttctcctgtctcttccttcctccctctgcctctcttgcacctcctcgcaccctgctcttccgcgccctcctgcacgcgcgcccacctgccagcccaccgatgagaggagctgggtgtactccccgctccactatagcgcccaggcccccccggcctccgacggcgagagcgacacagtaagtgcagcccaggtgcacccgccggtcccgtgggctccaaggttctactgagcgtggtccccagctactgggataggcagggactgaggcccggggcgggagggcacaggtggcccagagctccaccctgggctctctggctctgaggtggccgtgggctaagtgtctcagggcctgtgttggcccaaggaagccagtccctggcagggggcctggggtgggccctcgccccgcccaccttcacctgtcctcttgctcttgcagtaatttctatgcagcccccgacccagagccgagctccacttctgctccggctgcccccgaaggcgctgcccaccccgctgaggcccagagctcgggagatgcccgcctcgccgccccaccggacctcgtcctccccctgcacggatgccgacggccgggcccctccccgacaagcctcccagggccccggcaccccggtcggcagcctgcccctgtgagacccaccctcccgagcggccaatcgcatttgagtccttatttggcacagagacggaagcacgtgtgtgccgttttaggaaaagaacaaaaaagacacaaacaaaccaaccagagggagaagagcccctgcccactgcactctttggttctctgctgtgcctgcctgtgtcctgaggaagaagccaggctgttcgcggtggcctctggggacctgagccccgggggccccatcggcctgcagaggggacggctggggtcccgagcaactctgcctccatccacgtgggaagcggaccctcctgccctcagcttgggtttgggggcctcagtgcaggacatctggcctgaacatcgactgtggggacagccctcgccctgccaagcactgcggccactcagcagctatgttcccgccgcagtggggccctgacgcccacctcccaggtgcccctcgagcaaaaacctctggcgcctccaatccagacccaccacagctggagggccaggcctcctcttccccaggctgccacccacgctggcggagctcagggctggggacttgtccttctcttccaacgtaggccactcagcaactggcatggagggcccaggcaacggagacgttttctccatggcaggacagagcgggaggccgggccttgggccacaggagaccagctcagggcggaaggtcaggctccccgccccctccacgtggagacatggcctagggggccaggcccggctccacaggagtctccttcaggactggtgtggatgtccgccgcctctttcttgtttaagtgatgtgatgtctccgaggaggggagagaagactttgtttccgactcatcaccctccaagagggcagcgctcccagtggtgggactcagcccagactgccctggggcagcttcctgggcccgctgcgctcagagggtgctggttggaggccagagctcggcagagtcacccaccctgcccttccccaggacccctgagaggggcttattggtgatggctgtgggaatcccccacttccaagatgtgcccaggatgtgaggagctggagtggaagctgcacctttgggaagaattcctctccagacctggcagagcctggtgtggggtctgagacggccggagaacctcccaggcagggctctgtgttttgtctgttacaacctccgtatgacgccacgccacccgctgttcacgtcccgtcggcctcctgcacagcccacacgctgcgcccggaaggcccctgctgtggagaagccggacccatccccgaggtccccagcgaggacacacactccacgagagcagcccctccactctgcccaggagaggggccgaccctcctcgggaaccggccagccgcgtggctcccagcatccatcaggacaagcccacgtggggtcctccctgcgtgctcagagggtctgtccagccctgggaagcgaccttggcctcagttcacagcctggtgctcatctgctggcaccgggcatccacccatcagcccccgccctgtccctccgaaggacacccagcaggcaccccccggggaggcaggggcagaggtcagaaggggtgtctgggacctggatggccagcagggacaggggcattgtcatctcaaaggcccaacccccagaggccacaccagtcctcccagggagtcctcgagtcgccctgcccagagccctggcaccagagacgccaagagcctgtggggtgactcggagcagcaggtgtggccccgggcgggcggcaccgcgtccagggcagcctccctccgctgagtgacacgggacaccagtgcccggccgacgcgcctttgcaggagaaatgtgcaaacctctgtggataccatttcatttccattcttgtgttgtctccaaggcccttttggagatatacttggtgttggttgtgttttttggttccttttcagagaactgtaaaccgaggctgacgtgctccactgactgtgccgaggggcgggggcaggaggacggcaagacctatttataatatttagcgaactcggtctccctcagatcccccgcgagggaggctgctggacccaccccgctgtcccccatgatagaagtctgtaaataccttggtgaccaatgcccacttcccctcctgggtcacctctgatggctgctgtccactgagaacgtgggcagtgtccaaattcctgtactgtaaagactaaaaggcgtttgctctgagactgacaaggcggaaacttccatgtgtctcctgccaggctctgtccccctacgccatcccgacacgtccccgttcccccgaaacctggctcagtgcaatactcccattgccatggggtccttcaccatggtactgtctccacagccctcagtccccaccccaggagaggcgcctgccacctcctcctcatctccggtggttcaatcgctccgcctgtccccaacccagtcccatttttatggccaaactgattctgaaacaaaatgaaactgcaaacctcgtgtgtcttaactccccccagggatgccactccattcctccgccccgtggtctggtgcgtgacaatccaaagcgccgagacgagggtgctgtgtccctcaaacccagagtggtgggcgcctctgaaaccatacagccactcctggccccaaacactggtttgcatcccaggttcctcgcccacctacccccgccacaccccgtctttttagagatctctctaataaatcgggtaataagcatccgcctgtttgcctttctgtgggttccggaggtctggttgggagtctgaggagtgactttgttctgtgttttttgttttctgtttttgtttgtttgtttgttttctttttaagagatggagtctcgctctccacccaggctggagtgcagtggcgcaatctcagctcactgcaagctccgtctcctgggttcacaccattctcctgcctcagcctcctgagtagctgggactacaggcgcccgccaccacgcccagctaattttttatttttagtagaggcagggtttcaccatgttagccaggatggtctcgatctcctgacctcgtgatccgcccacctcggcctcccaaagtgctgggattacaggtgtgagccaccgcacccagcctgtgttttgttttttttttttttgagatggagtctcgttctgttgcccaggctggagcgcagtggagtgatctcagctcactgcaacctctgcctcccgggttcaagccattctcctgcctcagcctcccgagtagctgggaccacaggcgcccgccaccacacctggctaatttttttgtatttttagtagagacggggtttcaccacattggccaggctggtctcaaactcctgacctcaaaggacccacccgcctcatcccaaagtgctgagattacaggcgtaagccaccgtgcctggcctgaggactgactttgaatcttagagaagagagaaacctttgtgagattgatgctgataccagtaataggacccaaacaccttaccagctgtgaaccttcttcaggtcccagttcagctcagaaaacattttattgtttccaacatctttgcagccccccaaagtttgtatttgttctgctagagcggttccaattcagtcacgtttggaccccttgaagggaacacatttatcttggactcccaggttgagaaactacattgaaaacaagatcctggccaggcgtgatggctcacacctgtaatcccagctactcgggaggctgaggccagagaattgctccaacctgggaggcagagtttgcagtgagctgagatcatgcccctgcactccagcctgggcgacagagcaagaaaatgtctcaaaaaaaaaaaaaaaaaaaagtaagatcctgtctgtaagggagccgttggaacgtttcagcacagctgttttataaactgaacatggaggtgatctcgttgttttaagtttgttttttgtttttttgttttttttttttgagatggagtctcgctctgtcacccaggctggaatgcaatggtacgatctcagctcactgcaacctccgcctcccaggttcaagcaattcttcctcggcctcctgagtagctgggactacaggtgcctggcactacacccggctaaattttgtatttttagtagaggtggggtttcaccatgttgacaaggctggtctcgaactcctgaactcaggtgatccacccaccttggcctctcaaagtgctgggattacaggactgagccaccgcgcccggcccatgcaagtgatctcttaatgtgctgcaaggatgcatctgaattttgggaagcacagggtcaggccttcgctttgttttgggccatcccatcagcatgacaacccacatctcaggaccggcaaggtcatcatctagagcggcaggagatggtctcttcttcctctgtaaggttccatccttgccttaacaccaagcaaagcatacaaagccagcgtttacggggatgttatgaagttgtattccaagataaacgttttatttatttatttatttatttatttatttatttgagacggggacttgctctgtcgcccaggttggagtgcaatgatgcgatctcaactcacaggaacctctgcctcctgggttcaagcgattcttctgcctcagcctcccgagtagctggaattacaagcatgccaccatgcccagctaatttttgtatttttagtagagacggggtttcgccatgttggacaggctggtctcgaactcctgacctcaagatccacctgccacggcctcccaaagtgttgggattacaggcatgagccactgcaccccactcaagataaacattttaattttctttttttttttgagacggagtcttgctctatcgccgaggccatagcgcagtggcacgatctcggctcactgcgacctccgcctcccaggttcaagcaattctccctgcctcaacctcccaagtagctgggatcacaggtgcatgccaccacacccggctaatttttgtattatttagtagagatagggtttcaccatattggccaggctggtcttgaactcccgacctcaggtgatccgcccgcctcggcctctcaaagtgctggggttacaggcgtgagccaccgtgcccgggcaagataaatattttaaaagttagcttaaattactatcatcctccataaacaggccttcccagccccgagtggttagaactgcacggggtggtggtagcagccaccatgggctaggggagctcaggatgggacatcagcgtcttctaggtctctggcctccagccttgcccctgaagtccgtcctcccacgccaaacttgtttcaacagcaagtcccccaaaccctgctcacaaccctcccacgggtccccagcacccacaccacaaagctgggcagcctgggttgagaaggcaagtgttaagagtgactttccctctctgagcctcagtttccccgtctctaaaatgggttgatgggggaatacagggagttatcaaagtttttgtttttttttaaagcttaactcccaaaatacataggtgttcattggcaggtggtggagcataacgatgactctcataagaaggcttttcagtttctgtccccgcgcccgccctctgccctctggagctgcctggcacctaacaccttcccggttcctcgcctttcggggacctcgctccccggacacgcctctcctcggccacgcccctggccacgccaatgaagcgctacttccgacctagacccgcttcttattggtctcgcctcggcaggcccctccctgcacaaggttcctagtttgcccttgccccgcccacagtttctcaggccccctgaggcgtggggacccgcctagggctgcctccagcactgcctgaaaggagactccgccaccctggaggcaacaatcccactggagtcaatcacgcggtccacatttgcagacgtagtggaaagtctggggtgtcggagtccttgcgggctggggcgacgggatgggttgctctttcccggctcaggcgcaaacggggcagcctggagagcgccgtgggcgaggaaggcccccagcgcaggcttcggctattggtgttggtgccgcggccactggcccagccgatgggtcgggacacacgctcgcgctcgcggtccgcgggtcgccggggccgaaggcggcagagtcagagcgggagccgaagtcggagcaggagccatgggcggcgaaaccgacggcgccgggaggacgagggacggcgcagacggaggcggcggagccgggagcgcaggtggggtcgctgcgggagcagcgctggggatccggctcctacctcaggagcgcccgaccgagggttggagatcccggggaaccgggaaacccccgacttactcggggagggcttcctagagaaggggacaattgaccaccggttggaattaacctggcagcggaaggaaggcgagaggcgttccaggcaggggaccgggcggttggagggacagcccggagccgggtgagcgaggcggcggggaggtaacgagagatcagatcatatcatatcgagccctgtgtgctcagcacattagatcttggctattagtcggagggaaatggagagtcttgagaggagtttgggtaggggagtgacgtggactgacttaactctgcatactttctggctttgaggtggagaagggatggagcggggtaggcaggagcggcatcagagtaggacggcacaattgtccagacagtagatgatggcagtctcgatgggagggaggctgtagtcaaccacagcgggcaaagtgcgtagatttcagagggattctggaagtagaggagacaacatttgctaatggaggtgggctgtgggagggaaaaagactcggtgtcagctggcaggactcacagctgattcctagtgcctgaatctcagcttccccatggtccttttcttctggagatggggcacttggtcggatttgccttgagccggctccagtacagagaaaccaaaatggggacagggactgattcccagaccggggccccagtgctggctcagccccttcgtggctgacactcaggccagtcttgccccgctctgggccaagttcactcatcggttgttggtttttttgtttgtttgtttttgagacggagtcttgctctgtcgcccaggctggggtgcagtggcacgatctcggctgttacctctgcctcctgggttcaagcgattcttcagcctcagcctccccggtagctggggttacaggtgcttgttgccacacccagctaatttttgaattttttcgtagagctgggatttctccatattggccaggcaggtcttgaactcctggcctcaagtgatctgcccgcctcggcctcccaaagtgctgggattacaggcgtgagccaccgcgcctgcccataagtcttgttaatgtcatctttgtgttttttcgcctaccattttctggtattggaattattcacaataatttgccactctagatatgtaattagaattaatgttcacgaaaattcagttgaacttgtggccaatatttaagggctctgcaatgattggtttcaacatagtttagatttttttgacatgagcttaatgggtagagcatttaacaaaatatttggcagttctctgtgtacaaagacccctaaacgtgactgagcgcagtggctcacatctgtaatcccaacactttgggaggctgagacaggaggcttgcctgagcccaggagttcaagaccagcctgggcaacatagcaagacccctctgtacaaaaaaatgtaaagagttacctgggcgtggtggtgtgtgcctgtagtccccgctactcaggaggctgaggcgagaggatggcttgagcccaggaggtcaaggctgcagtgagctctgatcatgcactccagcctgtgtgacagagggagactctgtctctaataaataaaaatatagaccttgtctctagtagactctgtgtctagtagaccttgtctctaataaataaaattaaaggcccctgaaccacccctgaggttgtgcatcttccattccctgcgctctactctgttaactcctgtccatcctgtgggactagttcaaataccacttccatctaggaagccctcccttgacagcctaaatgtgttcgggtcccctggttcgtacccttataattcctgcgccaccagccccagccacctccctgcccgcgcctcctccctctcccccacactctgtctcagccatacagcctccttgttgttcttagaatgtggcaggtcagtgcctgcctctaggccctcgctcttgctctgcctcgagcactctccctccgaatccacccatcgctgcctccccactccctccagaccttggctcagtgtcagctcctgagagagcccctctctgacctcggccctgcagccccagcccctgtgctcggcattgctactctttgtggcttctgcctctgcctagtgttgcgtggtgtgtttatttgttgatgtcttccttgttggggcccaccagagggtgagcccaggaaggcagaagccatcggtatttgggtcactgctgtgtccccagaacctagaacagtgcctgctcccccacgggcacccagtaagcatctgtggagcagatgacagctgcaggcactgagcaggcatccatggtcctctccgcaggtcagattcagaggaagagcggtggcagcgctcagggatgcgaagccggagccccccgcggcccaagtggcactcaagagatgggtcctctcagtcggactcaggagaggagcagtcacggggccagtgggctcgccggcgacggcgcgcacgctcgtggtctcctagctcctcagcatccagctccgcgtctccagggcgatcccagagcccccgggcggccgcggctgccctgagccagcagcagagcctgcaggagcggctgcggctgcgggaggagcggaagcagcaggaggagctgatgaaggccttcgagacgcccgaggagaagcgcgcacggcggctggccaagaaggaggccaaggagcgcaagaagcgggagaagatgggctggggtgaggagtacatgggctacaccaacaccgacaaccccttcggagacaacaacctgctgggcaccttcatctggaataaggtgggccccgccgggtggtggcctctgtccctgtagcatttccactgtttctggagaccccaacacttgagacactcccagcctgcccttgatcgtgcaagagttggttttacacacacacgcataagcaagcttctgccgctatcagctttcttttttgacacagggtctcgctctgtcgcccaggctggagtgaagtggtgtgatctcggctcactgcaagctccacctcccgggttcatgccattctcctgcctcagcctcctgagtagctggggctacaggcgcccgctaccacgcccggctaattttttgtatttttagtagagacagggtttcaccatgttagccaggatggtctcgatctcctgaccttgtgatccacccgccttggcctcccaaagtgctgggattacaggcgtgagccaccacgcccggccagctttcttttttgactcagggtctcgctctgtcacccaggctggagtgcagtggcgtgatcgtggctaactgcagccttgacctcctggcctcaagcgatcctcctacctcagcgttttgacttgctgggactacaggcaccaccaccatgcccggctaattttttatttttttgtaaagatggagtctcactatgttggccaggctggtctcgaactcctaagctcaagtgattttcccacctcggcctcccagagttctgggattacaggcatgagccactgcgcccagcccaccgtcattttcttgccattaactgtgtctcttgcggtgtaagcttcagccattctttgccccgaacaccagcccaacctgaaacctatctagagagccagctcttggcatcatgtacccaggacagggttccacagttccaggcgctctgtcgtctgagctggttctttcgttctgcgcctgccatttagccaccagtcacaccagtggcataagacaacagaacttatcatctcttcgttctggagtccagaagtccaaaatcaaggcgtgggcaggtgtgggcaggaccccactccctctgggggccgaggggaggcccctcctgcctctcccagctccagtcatggccggtgattcctgggccctccctggcttgcagccgcagaacccggcctgttcctgtgttgtgtggcggtctgccttcccgtctctgtctccatacggccttctgctctgtgtgtctgtgtgtaaatgttcctcttcccatgaggacaccaggcattggatgagggcccgccacctccaggatgacctcatcttacctacgtctgcaagacctcatcactttttttttttttttttttttgagatggagtctcactctgttgcccagactagaatgcaaaggcgcaatctcggctcactgcaacctccgcttcctgggttcaagtgattcccctgccccagcctcccaagtagctggaattacaggcgggtgccaccacactcagctaatttttgtatttttagtagacagagtttaaccatgttggtcaggctggtctcgaactcctgacctcaagtgatctgcccgccttggcctcccaatatgctgggattacaggtgtcagccaccatacctggccaagacctcatttcacatggggtcatgattacagctgcaggggttcagacggggatgtgcctgtgggggacacagctcatctgaagcagcatccacttgtggagggggtggagcaggcaacgtgtgggctgggccgactgcacctgctcgccggttgcgcagttgggagctgtggggtctccaggtggcttctgcccgatgtcgtctgagaacacaacgagctccttccgcctcggggccctcacactgccgcgcccctgcctggacatgctctgccccttccccggctgttctcttccgtcaggcctcaactgacacatcccctcttgagagaccccttcctggccccttgctccccagaccccccagagttctttattgaggcacacactgctgcctggcacttcatcgccaccatgtgctgtgcacctgcggtgtgctgggcaccaccgtgagctctgggcgggcagccatggaggaggaagatgtggtcatcgttgacgcctgtggaagcggccccaggctgggttggatagaccacagagtggcccgggtgtctgggggtggtccccagccaggcagcctgtgtccctggaggcaagttctgggcggcaggggttcctggaaccccctcatggcgacggggcaccgggagcctgaggaaggtggtcgggaagtgggggctccgcgccaggctctcagacagctgctggaagaagccagctttgagggtctccaggctgggacaagcccatcagtggccacccctgtgccccgctgtgtgggcggggccccatgaccccacaggtttgctttcagagctgctgctgcccccactcactgttcctgccctgtcccacgtgcagtgggggaccctgacttgctgagggcgtggccttcacgtccgaagcactcagactcccgggtaaagcgagtcagcaggccccgagcaaggctcttctgttgggggctggggtggccccgagcaaggccctcctgttgggagttggggcggccccgagtgaggccctcctgttgagagttggggtagccccttcttaccctttgcatacatctcactcccagtgggggctccatgtctgcactgaattggatgcactgggtttcaggagtgttaaggagggggtggaagacgtgcagtgctggcaggtcacctctctctgcaaaacaagggccctggtcaatctcttggacgaaggagctgaggaggggggcgagggggcgggtctgtgctcagggcaggtgtgcctggtgcttccaggccctggagaagaaggggatcagccacctggaggagaaggagctgaaggagcggaacaagaggatccaggaggacaaccggctggagctgcagaaggtaggcaccctgccagcccactgggcagggccctccctttccagggcctggaggcccgccccctttggcaggacttgaggggcttaagtgggaagtcctgggggctggcttcaggtaaggctggatccaggggctcagaccatggccccaggaaactgtttccctccacctctcggctctgctggcctcgggccttcactcccacatgctcccttcagggtggccgagagggccccagctgatctgagctgctgagtctcgggcaggagggccctctcccttcccaaggtctgtccaccagcccaggcatctccggaccaatccctgtgcccagggcagctgggtgaaggctgggcccccatcatcacagcccctccccccgcagccctgcagaccgcacggtccccgctgccctcagcctcctgtgcctgcaggtgaagcagctgcggctggagcgggagcgggagaaggccatgcgcgagcaggagctggagatgctgcagcgcgagaaggaggcagagcacttc

SEQ ID NO: 1278 - DNA, 5101 bp, Homo sapiens
cgccccgtccgccccgcgccggcccggcgcgccctcccttggccggcggcgcttgttgttcggcggcggcggtcgcagctcgggtccccctcgggcgcccccgccgccgtccgcgcgcggccatggagctggaggtaccggacgaggcggagagcgctgaggcgggggccgtgccctcggaggcggcgtgggcggcagagagcggggcggcggcaggtttggctcagaagaaggcggccccaacagaggttctgtccatgacggcacagccgggccctggccatgggaagaagttgggccatcgaggtgtggacgcatccggcgaaaccacctacaagaagaccacctcctccaccctgaagggtgccatccagctgggcatcggctacaccgtgggccacctgagctccaagcccgaacgcgacgtgctcatgcaggacttctacgtggtggagagcatcttcttccccagcgaaggcagcaacctcacccccgcccaccacttccaggacttccgcttcaagacctatgcacctgtcgccttccgctacttccgggagctctttgggatccggccagatgattacttgtactccctgtgcaatgagccgctgatcgagctgtccaacccgggcgccagtggctccctcttctacgtcaccagcgacgacgagttcatcatcaagaccgtcatgcacaaggaggccgagttcctgcagaagctgctccctggctactacatgaacctcaaccagaacccgcggacgctgctgcccaagttctatgggctgtactgcgtgcagtcggggggcaagaacatccgcgtcgtggtcatgaacaacatcctgccccgcgtggtcaagatgcacctcaagttcgacctcaagggctccacctacaagcggcgcgccagcaagaaggagaaggagaagagcttccccacctacaaggacctggacttcatgcaggacatgcccgaggggctcctgctggacgccgacaccttcagcgccctggtcaagacgctgcagcgggactgcctggtcctggaaagtttcaagatcatggactacagcctgctgctgggcgtgcacaacatcgaccagcacgagcgcgagcggcaggcgcagggcgcccagagcacctcagatgagaagcggcctgtgggccagaaggcgctctactccacggccatggagtccatccagggtggcgccgcgcgcggggaggccatcgaatcggatgacacgatgggcgggatccccgctgtgaacggccgcggggagcggctgctgctgcacattggcatcatcgacatcctgcagtcctacaggttcatcaagaaactggagcacacctggaaggccctcgtccacgatggggacacggtgtccgtccaccgccccagcttctatgccgagcgctttttcaagttcatgagcaacacggtctttcggaagaactcctccctgaagtcctcgccctccaagaaggggcgcggcggagccttgctagctgtgaaaccgctggggcccaccgctgccttctcggccagccagatccctagcgagcgggaggaggcccagtacgacctgcggggggcccgcagctaccccacgctggaggacgaaggccggcccgacctcctgccctgcacgccaccttctttcgaagaagccactacagcctccattgccacgactctgtcatccacatccctctccattcctgagcggtccccctcggagacgtcggagcagccgcggtacaggcggcgcacacagtcgtctggacaggatggcaggccgcaggaggagccacccgcggaagaggatctgcagcagattacagtgcaggtggagcctgcgtgcagcgtggagattgtggtccccaaagaggaggacgcaggggtggaggcttccccggccggtgcctctgctgctgttgaagtagaaactgccagccaggcctcagacgaggagggcgcacctgccagccaggcctcggacgaggaggacgcgcccgccaccgacatctactttcccaccgatgagaggagctgggtgtactccccgctccactatagcgcccaggcccccccggcctccgacggcgagagcgacacacccccgacccagagccgagctccacttctgctccggctgcccccgaaggcgctgcccaccccgctgaggcccagagctcgggagatgcccgcctcgccgccccaccggacctcgtcctccccctgcacggatgccgacggccgggcccctccccgacaagcctcccagggccccggcaccccggtcggcagcctgcccctgtgagacccaccctcccgagcggccaatcgcatttgagtccttatttggcacagagacggaagcacgtgtgtgccgttttaggaaaagaacaaaaaagacacaaacaaaccaaccagagggagaagagcccctgcccactgcactctttggttctctgctgtgcctgcctgtgtcctgaggaagaagccaggctgttcgcggtggcctctggggacctgagccccgggggccccatcggcctgcagaggggacggctggggtcccgagcaactctgcctccatccacgtgggaagcggaccctcctgccctcagcttgggtttgggggcctcagtgcaggacatctggcctgaacatcgactgtggggacagccctcgccctgccaagcactgcggccactcagcagctatgttcccgccgcagtggggccctgacgcccacctcccaggtgcccctcgagcaaaaacctctggcgcctccaatccagacccaccacagctggagggccaggcctcctcttccccaggctgccacccacgctggcggagctcagggctggggacttgtccttctcttccaacgtaggccactcagcaactggcatggagggcccaggcaacggagacgttttctccatggcaggacagagcgggaggccgggccttgggccacaggagaccagctcagggcggaaggtcaggctccccgccccctccacgtggagacatggcctagggggccaggcccggctccacaggagtctccttcaggactggtgtggatgtccgccgcctctttcttgtttaagtgatgtgatgtctccgaggaggggagagaagactttgtttccgactcatcaccctccaagagggcagcgctcccagtggtgggactcagcccagactgccctggggcagcttcctgggcccgctgcgctcagagggtgctggttggaggccagagctcggcagagtcacccaccctgcccttccccaggacccctgagaggggcttattggtgatggctgtgggaatcccccacttccaagatgtgcccaggatgtgaggagctggagtggaagctgcacctttgggaagaattcctctccagacctggcagagcctggtgtggggtctgagacggccggagaacctcccaggcagggctctgtgttttgtctgttacaacctccgtatgacgccacgccacccgctgttcacgtcccgtcggcctcctgcacagcccacacgctgcgcccggaaggcccctgctgtggagaagccggacccatccccgaggtccccagcgaggacacacactccacgagagcagcccctccactctgcccaggagaggggccgaccctcctcgggaaccggccagccgcgtggctcccagcatccatcaggacaagcccacgtggggtcctccctgcgtgctcagagggtctgtccagccctgggaagcgaccttggcctcagttcacagcctggtgctcatctgctggcaccgggcatccacccatcagcccccgccctgtccctccgaaggacacccagcaggcaccccccggggaggcaggggcagaggtcagaaggggtgtctgggacctggatggccagcagggacaggggcattgtcatctcaaaggcccaacccccagaggccacaccagtcctcccagggagtcctcgagtcgccctgcccagagccctggcaccagagacgccaagagcctgtggggtgactcggagcagcaggtgtggccccgggcgggcggcaccgcgtccagggcagcctccctccgctgagtgacacgggacaccagtgcccggccgacgcgcctttgcaggagaaatgtgcaaacctctgtggataccatttcatttccattcttgtgttgtctccaaggcccttttggagatatacttggtgttggttgtgttttttggttccttttcagagaactgtaaaccgaggctgacgtgctccactgactgtgccgaggggcgggggcaggaggacggcaagacctatttataatatttagcgaactcggtctccctcagatcccccgcgagggaggctgctggacccaccccgctgtcccccatgatagaagtctgtaaataccttggtgaccaatgcccacttcccctcctgggtcacctctgatggctgctgtccactgagaacgtgggcagtgtccaaattcctgtactgtaaagactaaaaggcgtttgctctgagactgacaaggcggaaacttccatgtgtctcctgccaggctctgtccccctacgccatcccgacacgtccccgttcccccgaaacctggctcagtgcaatactcccattgccatggggtccttcaccatggtactgtctccacagccctcagtccccaccccaggagaggcgcctgccacctcctcctcatctccggtggttcaatcgctccgcctgtccccaacccagtcccatttttatggccaaactgattctgaaacaaaatgaaactgcaaacctcgtgtgtcttaactccccccagggatgccactccattcctccgccccgtggtctggtgcgtgacaatccaaagcgccgagacgagggtgctgtgtccctcaaacccagagtggtgggcgcctctgaaaccatacagccactcctggccccaaacactggtttgcatcccaggttcctcgcccacctacccccgccacaccccgtctttttagagatctctctaataaatcgggtaataagcatc

SEQ ID NO: 1279 - protein, 721 aa, Homo sapiens
MELEVPDEAESAEAGAVPSEAAWAAESGAAAGLAQKKAAPTEVLSMTAQPGPGHGKKLGHRGVDASGETTYKKTTSSTLKGAIQLGIGYTVGHLSSKPERDVLMQDFYVVESIFFPSEGSNLTPAHHFQDFRFKTYAPVAFRYFRELFGIRPDDYKLCNEPLIELSNPGASGSLFYVTSDDEFIIKTVMHKEAEFLQKLLPGYYMNLNQNPRTLLPKFYGCVQSGGKNIRVVVMNNILPRVVKMHLKFDLKGSTYKRRASKKEKEKSFPTYKDLDFMQDMPEGLLLDADTFSALVKTLQRDCLVLESFKIMDYSLLLGVHNIDQHERERQAQGAQSTSDEKRPVGQKAKTAMESIQGGAREAIESDDTMGGIPAVNGRGERLLLHIGIIDILQSYRFIKKLEHTWKALVHDGDTVSVHRPSFYAERFFKFMSNTVFRKNSSLKSSPSKKGRGGALLAVKPLGPTAAFSASQIPSEEAQYDLRGARSYPTLEDEGRPDLLPCTPPSFEEATTASIATTLSSTSLSIPERSPSETSEQPRYRRRTQSSGQDGRPQEEPPAEEDLQQITVQVEPACSVEIVVPKEEDAGVEDAGASAAVEVETASQASDEEGAPASQASDEEDAPATDIYFPTDERSWVYSPLHYSAQAPPASDGESDTPPTQSRAPLLLRLPPKALPTPLRPRAREMPDPHRTSSSPCTDADGRAPPRQASQGPGTPVGSLPL

SEQ ID NO: 1280 - DNA, 48437 bp, Mus musculus
  misc_feature (1)...(48437): n = A,T,C or G
tcatttctagtaacctcatctctactgaatggtcccaacagccagcaaatatacttttatttcttccaactcaaaaatccttctcttggctcactcttttctatagctatgaccccctcctatgcccttttttcctgatctccttcgtaacgttcttcaacacacacaaatctgtttatgttgcttcccagttttccccaaccttctttagttaggttttcatggcctgacactattgtaaggcaacttcagtaacttccacgttgctaacccttatcttattgagtgagcagcagcattccacgcagctgatagctcttttctagaagtgttctctccctttctcctctgagacgcgtattccattgcctgtctgtctatataaggagctattgtccccaagtctccgtggctatcttttctctcttatgccatccccttggtgagctccccaaatcacatttagcccaccccctgctttcccttgggactccatacagtctgtgtcaaataactccactgaaataagaaaatagtttattctcagccagtctgagtgcccgttctctagaacacaaaccccagttacgcatgacctttcttccacgaaagaagctgtggaagctgtcgtcacaaaagccagtgggtgaaatcattacatagggtgactgcatgaggcaggggaccatcttctgtaggattcagaggtctttagcagactatgggattccttcctgcttgtttccttttgtgtttgtgtgtttgtttatttaatatgtctgtgtcccacttgaacaccaggtgcccccagaggccagaagagcctaggatcccctagaactggacttatagatgctttgtgagctgccgtgtgggtgctggggatcaaacctgggtcctctggaagagccagtgctcttaactgctgagccatctctccagtcccacttacagattctcgagacagacgttttctcaccgcgtgtccatcaatttgcaatcttcttgtctctgcttccccaaaagtggtgttgacactcatgcatcatcaagcctagcaaacattaaaaaaaaatcttccttggactcagatgttttccaagcccgaggttcagcaatcttcgtatacattgtgagaacttttatctggtagtcaccaagatgctacgtcaggcatagagtttgacagtaagcagtcgctgaaaggggctaaagaaaggtcaagataacagggctacttgattcgatacattccatctcacttcagtcattatgctccaatcagtgaagagtcatctgtgagctgaacagagcatagctgctgcagaggacctcagttctcacacgtcccacgacctcagcatctcccctcagatgaggaactgatacctcaaatttaccatgtgaaagatggagccatgctcacgcccacttttcatacagcaccccgtaccccatcttggctgatcaaattttagtctcctgatgtcttgcaccaacagcctcgactccctccctttcccttcttgtccttctcgaatctgaccagaaatcctatcaactctgccttcagaacctacgctggattcgactgcactttttcaatgttactcggaactgtggtccgagctacagtggtttcccacctcagacctcttccctctactcttgtttttctgtgatcatcagttaaatgctacaaaatggaaataagagacatgtttttcaaaagagagagagagagagagagagagagagagagagagaaacaaacaaggagagaaaggaagaaagaaaaagagaaaggacagaagaaaaaaagaaagaatggaaggaaggaaggaaggaaggaaggaaggaaggaaggaaggaaggaaggaaggaagacgagaacaataggaaggaggacttgaagttccatgttctatttttcttttttcttgcttgtatctctcagtgcataaccccctcattctgatgttctgccagagaaaagcattttaaaaaacataatagaagacaaaaattctgagtggtcctaaatttaatagcgaaggctgatggtaaggggtgtgtggagagacctgtaggacaatcagttaacacagttcctgaaagaagaaaggactgggccatattcctgagtgtatgttagagcagtggctcaaatatctgtcccttgtttctggggaaacttctcaaaacattaagtgaggccagaccagaagattaagcccttcaacttgttgataacaatgataaaagctgttatccctcagatcttacccaagcattctcataacacactgtctacctctctgggctacagctgataaaagttcagcatgagctcacactttccttattaaaatgctctcgtctcttgtgtccacttgtgtccagtcgctttccacccttgctgcttgaagctgtgaagttgtctcaggacctggcccatttctcgctagcagccactgatcactcacccctttcatttcagcgatgcctcggtgtgtctggatttaacaacaggagctattccccatgcatgtcccttagcatcatctcaacagccttctcatagtgtctggggctccctagggctcctgcactttctcttcagttcacctcccaggctggtctgccttacagagtcttgtatcattaactacccagagttgctagccaggggatttccaggagggatttggagatgggaaagaggagaaaatgttcttggaaagataaagcatgaagagaaatatatttgtgctctaggctggcatgaagcaaagagcaagtaggtacaaccagaggacagagtgctttggaggtaaaggagaaggataaaatcggaaaggaaaagagaaactggatccaaaggcctctctggctggtgtttctgtcagtcaacaatcagaaacatttctactaaaaacctagtagaatcattaggttgcgtatcaacctgtctggcaatctctgtcatagagtatgcaactgagtgacatgctgtggtggtttaaatatgtttggcccatggagtggcaactcttaggaggtgtggccttgtaggagtgggtgtggccttcttagaggaagtgtgccactgagagggatgggctttgagaccctcctcctagctatgtaggagacagtcttattctgttggcctttggaacaagatgtggagcactctcagctccttctccagcaacgcgtctgcctggacactgccatgcttcctgccatgatgttagtggactgaacctcagaacctggaagccagccccaattaaatgttatccttataagagttgccttggtcatgatgtctccttacagcaaaggagacgctaactaagacacatgggataaagcagggtgcgcatttctccaagaaagaggcaggaggcaactcagtgagatttcatcagaggatgaccaggctatataaggcagagggccactgtccagatgctgacccaatcttgaagaatgtccaactgagaaatttattggtaaattttttccatgtcaaatctaagcaaaccagagttctcaactctgagaaaaatcaaatgcaaacccagcaacctgtaccactacataacaatggccttaaaatgaaacaagactcaccttttattcctttaatataattttcatttaaaaatcatgaaagcacacaatatattagctctctattgtactctgtgagtgataggtcatttttttaatgccaaagctttctttaaaaatgaatatgactttcatctgctaaatcttttggatgatgttatgatctgaatacgaagtgtctctgcaaggctcctgtgttggaagcttgttctccagctgatggtaccctgtgggggagccctggaaatcttagaaggtgggacatagggaggaattaggtcactgttggcgggtacttggaggatcttgtcctttcttatctttctctctctctcctgctggccaggagatatatagccccttccttaacacagagtttgctgtctccatgttctgtgtcaggtcacagggtcacgtacccagggaccgaaccctccaaaaccatgagccaaaataaatctctccttcttgaagttggtctcagattttagtcgtggcaataaagagaaactaagatacatcattgcatgcccaaacattacagcatgtctacactggtgagaccctgtaaagcttattattattattatcgttgtcattgctgttgtttgcatgttatttcgatcaaatctcttccccagtacacctccaactcctccaaagtctctccttcctccttccctcccaattatatttttcatataaaacctactaagtccaactggtgtctcctgtttgcaaatgggaacagagctatttcccacagcactggggcaagcttgaagaaaactagctttctctccctgagagcttgaaagagttaagcgaggaagtgagatggttgaatctcagagaatgcttgggcagatgacacaaggaagacgaagcaagactagcttgataaacaacagttttcagactgtcccactagaccccgatataatgacagcaaatgctcagatactgactggcaactacaaaattgtttttctccaatacagtctcacagggtatatgaaccacacttctggagacgccccatccccaggagtagttttggtcaacatgagacaaactcagtggtaattttgtagactttttgtttcctttggcttttttgttgttgttgttgtttgtttctttgttgttgttttatgagagaaaaagagttagggacacacacacacagagagggaaagagggagagagagagaaagagagagagagagagagagagagagagagagagagagagagagagagagaagaacagggagttgggtcagtaaagaggtgggcagaatgttggaggaaatgggagaggggagaacataatcaaaatcaagtgtatgaaaaatattattcaattaaaaaatttcagtgtaccccaatcccaaacaatggcaaactgacagacatgggcaaatcctgggagtgatggacttttgactgggaccaactcttacctaagaccagcatcccctccatgacagactatcccgaaacaactctgtcttaaacaaatgcatttatttctctctcaaaagaaatctgaggcagtacacagaggggttccatggtcctgatgactcggggcatttctgcttcgtggcttctctgatttcgcttctctatctttcttagcacatagctctaatgctcctcgtgctataatatgcagttagagctttagaccgtatgtctatgtttgaaaggacagaatagggtttttggtttgtttgtttgcttatttttgttttgtgtgtgtgtgtgtgtgtgtgtgtgaggatacttcatagaaacctcacttgacaatctgctgacattctactggtcagaatctaatttcaaggtctaaatgcaaagaagcaacaggtaagactttctttctgggcagtcatgtgcccagctaaatgcctactactaaggatgaaaagagacatattttagaggcaactcatatttacatcaaaccaaacacagcccacagaggaaagaaagttataccaccaccaccaccactaccaccaccaccaccaccaccaccaccaccaccatgcagttgtggcgcatgttcttaatcccaacactggggaggcagaggaaggcagatctctgagttgaggccagcctggtctacagagaacattgcagcacaaacagacaggactacacaaagaaactttaatgtgtggttaaaggatttccgttaaacagttgggttttgaatacctagaattgttctccccgcatccccagccccgctgtttcagccaatgcctccgttttcagttcctgctgtttccttggtttctctgctctcctcatggctttcaaagcccacctcagatgttttgctctctatgctgttactcctgacccttcccaaagaggccatacttgcccctccagaacttcatgtatcatgctccctgggccctgtcttgcagccaagcaccatgatggattaggtcatcacgggagcatctggcagcggagtgaacattaatcactagtttgaatacagatccctcgtccccacagccctttcctaggcggctagtgtggcagagtgcacttagtatctgaaaattacactaaannnnnnnnnnnnnnnnnnnnnnnnnnnnnnnnnnnnnnnnnnnnnnnnnnnnnnnnnnnnnnnnnngatgagaaagtctttgcaagcggtagaaaaggtgttatcctgtctttcaaaacatacaatgtctgcaatgttacaagcccttttcaggaacttaatctggtgtgatctgttttgctgaataacacgggctgtttctcatttctcaggtctccttaaaagttgtttagaattaaattgccaagcatctttcaacattcctttgattttcacagtagacttgccgctgttctattattgccactgtggtcagtgcacatgtcataattcgcttctcagatgttaatgttttatttcggttttggtacttatagctgggaatatacgagagaaatagaaaaaatggcaggcaatattaccaacataaatttatagctccatcaaaaaacgatcattgtgcctccccgtcggggaatcgaaccccggtctcccgcgtgacaggcggggatactcaccactatactaacgaggaattgcacagtggtggcctttctgatagggctcttgaatagatattcaagaccgcaccgccctcaacaaacttacgccaatagtttttgcttttcgtgctgccatcatggctcctatcgcaacggaaaagaactaaaatgaaagcgttccattagctgtgtccccactccactcagcgttttcccctaacccaccctacccctgccccagacacccctcggttcctccccgcacctccccccaatcccatgctgtctagcgctagcctgatcgcgctgcatcatgggattggtagttccattctgccctccactaagcccctcggaggctcggtgcctccctttcccggggtgcaccgcgccatctaccctctgagcttccctccgctctcgggctcgcggtgaaagtctggcggtagagtgtctgggtgctggctgacgtgcggcggatctcccacaaccatgcccgaggtcgcggatacttgctccttggcttctccagcctcggtctgccgaacccagcacctccatcttcgctgcagcgtcgacttcgctcgccggacgctgaccgggacggccgcgctcacggtccagtcacaggaggagaatctgcgcagcctggtacggggcgtctgtgcagcgccgcttctccggggccgctctcctcccgctcttcgcccctgctccccgcgagccctgagatcgctggccttccctcttgtacctctttctcagccccacttttacatcagcactctctccttcgccttccacgtatgacggtctcctcccgctccctccccttttcctggacacttcctagcgcccgctccacgcctcgcccctcaacccactcttgggatatttcgtcctaccccccatcgcagtcccctcgcttactactcccaaccttgtggcccccttcttccttggcccacttcccagaatccccctccccaggccccagactttgccagcccccacagtgcaccgtccttactccgcaggccaccccaactctcagatccaacatcctgtgtttcaagccccttaggattccctgccctttccaccccgttttaggtttccagtgtctgctctctaagagcaggtgcaacccttgctcttcagagactcttcctgcctttgcttcttattgcgattatcttctgatagtttaaggacaggtggtatatagtccagctttctaaggatgacccaatgcaatttttaatgaggtgttccaaggagcaagtcattactgcacttattataaaatatgtacttctttaaactctaaccatttgaataaagatgtatttagaatcatgaaacacaatggtttgatctgtttcgtatagtcaacagtcagtggtcttacgttgtctgatggtattaggatggaaccttttccttgaggagaaaagtcagaggaccgttttagaaataagaggaacatgaaaagactggctgtatccagcctgctaactagccagtgttgcagcgttgtatggttatctctgctgaagtatgtcagctaagcaaccagggctggaatttaggagtgaaattaacggggtcaatatttgattgaattagaagtgtagataagaacggtaattttgcctcttaaaaatcttttgttgttgtttgacttacaaatactgtaagaaagaaaaaacgaagccttatcggtgacaaaagaggctatttccttataagtcaactgcactttggtcttgaagtacggtacttgctatcttttattgcaggggcagctttgccccaacaggacagaagtttagcctttggactcagtttccttttaataaggaaaattttgcttgcttatcagtgcttcctatgactgtccgatgccctttatctgtagatagaaagctctatcactttctgctcatcgaggaggcaggagttaggaggcttaagtttttaactgtgtcccaatctttaaagttatgttatcttcacaatcccctaaactacagaaaagtaagacttggaaattctgatttctggttggcatatctgtttagtaatgcgattggaattatgatgtcccgttctcttcaaaagaggttattatagtacaaagtaacatctgtttgtaattgttttgcttgtttatggcaacagccagagaccaaatgcttggtactacttatatttatttgaagttggcttgtttctctctcttagtagattagggatccctttcagagacagggtctctctatagcttatattggccttaaacccaataagtagctcagactggcctcaaactagtgattcgcctatctcaagttcctgagttctgggattatagacatgaaccacaactcctgacatagatttacagtagaaagaaactgtcttttctctctataattcagattcctcgtgtagcgcttggcatgcagaggacaccgagggactgatttaatggaacaaatccaattagaaagcagtacttaaacctaatataggcttcatggccaatagtgctgtccgcatcccaaaggtggcatgacatcatgcccttccacccctggctctgtaccagcaccaagtgacgagagagcaggtcttcttttccatgcctttcttggagtctgtgatggtggggccgatggtccctctaagaggactaagtcccacctttctagaagcctttctagttttaggttgcttgcactgaaccttggtactcagaatttgtaacttccaagcatttgtttaccttgaaatttccagttctgtttaggtgttcttctgttagtggcctagagggttttgtgtcacgggtcagccactagggaatggagggagacaggtattgagtcttcccgctgttcaggttctgggtgccgttaaatacagtggctgagctgaagatcacatccagatggtttggagttttagttttgatttcattccatatgcccttgtttgttggtttgtttgtttgtttgttttctcaaagcagtctgtggataagtttaaaaagtaggaatatggtatagaggcataagcctctctctatccaaacctgcttttatttagaaagaacttggttcaggtaatggtggtgcatacctttaaccccagcactccggagtcagagacagtcaaatctctgagttcgaggccagctctggtctacagggctggttctaggacagccaaggctacacaaagaaaccctgtcttgaaacacaacatgtgcaaaaactggccatgtagttttgtgatttagggtttgcctcgcatgcatgaccccttgggtctcatccttaggacctggaaaagtaaaattaaaacagcatatatggtataatatttttaaaaggagtctagaagaggagagtaaatgcaaggcagttgtgtgctataaagttggcatggaacttcccaacagcctatgcaaaaggcataatgacgtgacttacgtgtgttgcatgtcatctgttcagacgtacagagcttttttgtgtgttgtctaaagagggacactgtgacagtttcttatgatgatgtaggtagcttggcactgtgctagtcggccggcactcagttaagtgtctgccagaaggtctaatgcggacgcttcagttatccagtatcctttattttgctactacagttttttagtgacaatgatggttagtaacatgagcaaaatttgaaggggaccttcttgtaatatttggaaataaaggttgaggtttgggatgggctctgtagcttaaaatttcactttctgtcttgttttggtgtagagcttgctttgtgggtaagttgttatattttcagatactgagctacaaccatggggatgcaaatcaaggtaacagtctctttaagcatccccagccatagtataatagtgcagtagatatcgtttgagagcgcaaggccaactattagaacaatcaggagattggaaaggagcttcgcacaaagtagtcattacaatagccagctcttctgatcctgagcagattcgaaagatttaggcgatacagaaaataggatgtgttccattgggaaatgacgcagctaatccatctttattttcttatatttttggttgtgagcctaggctttaatggctgagccatctctccagccccatctttattttcttaaagtctgatattaacagagatattcgaattatattcttaaaatcaattccatgttcagacaaaaaggaattagaccatgaagggacaagattaattaatgttagtaataatatagaattattaatgaaatcatatattgtgaatatgcaagtgtgaaaagatgagccagttctggttgaagtaatagttggggtaccacaaaaagtaatttgaaagaaacaattgtcctcagaacagaagtggatagtactcagggtaaatttgaaactaactactctttcccaaataaaagttgttggtgtcagagaaatggaaatcaaatctagagatctctccgggtcctattttcctttgacagtgtcttatgtatccccggttggcctcattcagtaggaagctaagttgaccttgaactcctcatccttctgcctctacttgctgagtactgggattacaggcaaccaccactcctggtatgtgttggtgctggggatggaccccaggattttcatcatgataggaaagcactcatctaactgagctacaccctcagcctccctgtgactttctgggcttgtcacccattagtctaagggaggtactggagagtctctaagagtctctaagcagtctaacttccgatccttttccaggctcatcagggacaggaataaagctttggaaggtagggagatgagacatagtagaattctaactgcagggttaggaccaatgatggtggtggtgaatggaaagagaagagagtgtaaaaacaatataaagaaatgactctgggacttaggaaggatttgagaccagtttgtggatcgtcccagacaaacatttggtaccttcaggagttctaataaaagatgccagaggagggagctgacttgttttgggggggggaacgacgacacagtgatggtgtcagttttagaagcctattaagtgtgaggtggtattgcctggggtattaggcagttgcagatgtccagttaacatcacaggaaaggatacagctggcagagcagggtgtggtgacatatctctataatctcagtgcacatagtaggaatgctaagacaagaagattgcaagtccaaggcctagtccagccttcatgacgggaccctatgttgtaaagcaaacaaaacgaaagagtctggctgaatatgtgtgtgggcatgagctagagccagagggccaaggctcatattgggatgtacctgtatttagagattaaagagaagaaaggcaggactgtaaaagtagttagagaaccattttcacggagagtcagaatccactgtggggccgagtggccaaacccacaagagtgaggctagacagtggttaagttaccagaaaagatcttgtaggccaaggagacttgtgggccaaggtgctagaagccagcaaagagggggaggaaatgatgggataatggaagcagccatctttgattgccctcagtttaaaaaagaaaaaaacaaagaaaaatagacgagttagtaagtggatggacagagcagagtcttcacagtactgtgagaggctccgttaggctgttgggagacagcttggtggtgtaggaaggttgaaaattctgaaagaagagcttagttggacatagtgaaagtatcctaaggtttctaaggagattaccaggatgggaactcagatttgctgctgcccaaggctgctgccccgaattggccaaagtaagtaggcacggttgttcagctttctgcagactcagccgggcagcgttgccttccaaggctgacctttgtttagctgtataacaatagtgcctagtgagtgccagcatttgtttcaatttgggggtttacaaaagtacatggtaggagttgggctctgtgttttcttccaaagaatatgtagcgagatgttaatatgtcaaactgagtcacaggtgaagatttttataacagagaattaaagaattagtccaaagtatatgtgagcatcccagaattcattatataggcaagtctcaaaactccaaatttttcaagttgcttagaatgttgaaaagtgagagtccttcactactgttgactacttatttcagtttcgcttctattagtttgataaaataccttgacaaaagcatctgtgagggaaaaggggttcctttgacttctagtttgaggttgtaatccatcattactgggaagaaaaggcaggaatttgaagcagccgttacatccgcagcaaaaagcagagaatgactgaatgcctgcttacttgtgctcagccccatctctacatttattcagttctgcatccaaacctagggaatgagccacccatggtggggggcgggggctcttcccaccacaatgaatacaaacaagacaatgcctcacagacatgcccataggcccaagtaatccagacaatctcttattgagattctcttcctgattctagattgtgtcaaattgacagttaaaaccgtcatacatctgcctttagttcttagtttcaatctgttttactttctagaagtagctagttttatcctcactgtaataaacctctaggtagtatttgttctgatccgtaaaactatcttcttatttaatttgattttagactttggacacaaaagacctcacaatagaaaaagtggtgatcaatggacaagaagtcaaatacacccttggagaaagtcaaggttacaaagggtcaccgatggaaatctctcttcccatcgccctgagcaagtatggatgctcccctccttttatgacttaagtaatggcaagatatatcttaaaagaagtcagacgtctttaccgtgtttctgatatttgtttgtatgtagtgattggcgatcacttctgtaatccatgcacattggtgctggcagtgaaaaacggtaagttcttcagatcctgaagacatggagtgcatgaggcactggtgggaaggacactgggtagcgttgccggagccgcccatcacttcactggtgtctggtggcggggagcatgccatttctagaggacctggggaatacgtgaagccacgcactctctgcctctgccccagaggctggccactgtcactggagtgatcattcggaatgtagggaggctgacttcctgccactcccagtgtcggtgcttaaagggctcctttagttctctaagccaccctctgcctaggagctgcacttccagacgaggaaagcgactcatggagaaagtcgctcatttaagaaaaaagtagccaggatcatcacacggggagtgtacctcactccttgatacctggggggaaggagaaagagtagaaaccattatcctgaaacaaaggtgatctgctgccatcttccgatatctttatgccttctcccctttaagaatgagaaaagaaacccaagcatagcatgggtgacagaatcatttattctacaggtgaagaaactggtaggttgaggtcaagtcgttgacctagtgtacagtggtagagtcagggtttcggtccaggttgggctgcctggctccaaagctcttgctcctccctcatcatcaaagtttctgaaactctaggatgaagaatcagtttttgtctcctgtagtctatcacagatggatacttagaaaatcactatgtatgaattacttagaggaagaggtttttttttaaaattagattctacagctacaaaaatcactacaagcttctttcccttggtgtgacttatcatgtcacccagcatcactgggctgggtcacatgctgccacccaccactgaggtagggtgatgacattggtcctcccacatccccactgtcacagaaaacacgatcacagatgcaaagtacgtgacacactgtgggccacttggctgattatcaccccatcatgtgttcattagtatgagggtgaaaagaaacctcaggctggcatccaagcagcaaagagtcagatttatgtgagctgcggtttctcgaactcactctgaaccgatgagacctcggagagcgctcgtgctgttgttccctgtgcgtgttctgaatacaaatcctgcgaggtgtgatttatactccattaatatctgtatttgtctcgtgcagaaatcaagagatcgttatagaaatttcctttgagacatctcccaaatcctctgcgcttcagtggctcactcctgaacagacgtcagggaagcagcacccgtatctcttcagtcagtgccaggtaaaagaatgctcagagacgctgggaagttcccagcatgcgcaggccctgtggacaaacacgctctattgtttcgtattacatagagcgacatatattctcatttatatgctgctattaatacagcttcttttaaaagtcagatttctttaatttggaaacagcccatctaaatggaagtatatagggcttattcatatttaacttcccaaacacctagagtacaacctgcccttgaatggggactcagtgaatggccctgaaatgcaaggagaattcagtaagcaaaggccgccatgtgtgttggttgcagaaaggctgccggtgagaaagagaaccctgaaagactgagttcctgattgtgaaatatattaagtatactttttaaatgacatgatttcaaacacttccatgctccattttaaagctagagataaaatacactgtagttagaggtagtctgttacaaggataaataaaaaaagttctagttgtgttaataatcaaatcacctatgactaaagaaagcccctcattaaacatttcctctatttctagacatcaggtcagacactctgcctgtttagttatcttaacacccctgtgtgctaactgtacgttaaactcaagtgcagctttaaatacgtaaagtatcaaagcatgccttaaacatacttactttgtaggacactgcttgaaataatctttttaatctaagaaaattacttggaagagggctggggctatagctaacctgaagccttgggtggggtccccagcaccccatgaacaggctgtggcggtgaatgcttgtgttcccagcatctggtaagtgtgtaaaagcagagggatcagaaatacaaggttgccaggcagtgctggcacatgggaggcagaaatgggctgatctctgtgagctccaagcctgcctggtctatagagtcacttccaagacagccaaggttacctagagaaaccctgtttcaaccactattctcccccacccccaaggttacaaggtatccttggttacatagctaactggaggccagcactggctacatgagaccctgtctcaaaaaaaaaaagcaaactcccgacaccccaaaacaacaacaaaacccacagaaaatgacttgaaaatggcaaaaagttttagacaagaatattacgagtcatgtacgccgtattacttcataatagttgaatctgaaatcggcatttctcatagaattgtctataaggtaaagctaacaagaaatgtaatgcgtgtaaatcccaagaatgtcaaatttaaatatatccttcccggtttttactggcagtggtgtttaaagtacaggaaatggattaagaacccattgcagttgctgggagccctgcagatgtgactttgatgggtgctttcagctgttgtccacatatttctgtacccaagttgatttgcccagtgaaagtcatctagaaatgctgtagtgttgccaggacacctgtccacagcctggtgagaaaactcaggcggtgtgctctgggaacctacctcaggagaaggaactagttagttctttgggcagtactttatcccaatattaaatatatatattaaaatatgtatccatttttattgtatgtttatggctgttttgcctgcatatatgtctgtgcaccacatatatgtagtgcccaagaaagccagaagagagtgtctatagttacagacagctgttagagggcatgtaggtgttgacagctgaaccccagtcctctgcaagagtaacaggtgtggtatttttggtgggggtggggtgtggctaggtaaggagtgttaatagtggtagtgggagtttcaaaaccgggtttctcggtgtatccctccctggctgtccttgaactcagctcctccagcctcttcttcgggaatgtggaactaagggcacgtgccaccacacctagagagctatgacatttccagtgtgttttagtaatctgaggagtttggcaagtttttattttattgttaaaatcagcacacaacgtattatgtcacatctcattatggcattgttttaaacgaaatatatctaggagagccgagggattttaaggaatcccaggatttttagcccttcagagagggatgttagtatgaattctccctcaagcacagcacactgtcctgatgaaacctggagtctttgcttggcaagagccgatcagacacaggcagcttaaagaatcgcagagtctatcgtgtcctttctttgttggagtgctgtttcccacagacggctgcaagacagtgtgataagcatgcaagtttgtttcataatagcgcatcttcccctcagggctcctgtgagttcctctacagatgtaactgtcaacagtgatgaacagtctatgtaacgattcatagggaattgggagggttcacgggagttaaggaagtttgcacgcgtgagtgcgtgcatgggtgtgtgcgtgtgcatatgcgtgtgtgtacacatgtggggtgttgtttgcatgtgcacgggagccagaggttgacatcaggtgacttctccagtctctttccttctaatgtttggatacaaaatatctcattgaacctggatctcatcaacttggctagactgacaagctagtgaggtccagtgatccccctgcctccacctccccagcaccaggattacaggagtgtgtcttaggactaagctttataaaaacaaaacagtgttaaccaaaccaaaccaaaccaaaccaaaaaaaaaccaaaaaaaaaaaaaaccaaaaggaaccgtgagtgcatccagactcaggtcctctgcctctcccgactgatttattcagtgaaccggcttctcagccccgaaatcggattaccttaagcccacggatctatccttgctgctctaaaagatcccgagagattcgtagactctattattctttaggcagaagctatgtaaaatccgtgctgtggctttaatgatttctgtgtttcttcctctttttcccttttaggccatccactgcagggccatcctcccttgccaagacactccttccgtgaaattaacatacaccgcagaggtaagcattacagagtgtagccgaattaaataagtaaatgtggagtgataaggggagacaagtcaaatttcagaggtggaaatactgtacttaatacgtttccactgagcctgcagatctcattttggatctctaataaaaaggtagttttaaacattctaattatgaaaaagggaaaccatcttgttctcatttcgaaaaagatattaaaattcaagatctaaagatttaagaatttaggaccattttttttttctaagagtaccttctgcagccatgacgcctgtgtacggatgtcccgggcagcagctgttggacttgtctgtgtgtgtctgtgtgtccagttcctctgtcactggtgctgctcggccctttggtgaaggttggattataattacagagtacccttccaaaggctgggcctccttagaccaagcaaatgaaaggaagaccaatgtttattcatgggatttgctttcttccccagtttctctgtagcccagacagactttactagtgctgtagaaaattatgcttgcaggcacgggacctccgagttcaagactcttctctaccacagaattgtgtgaccgtagcaagtctgaatgttctcggggggggggggggtatgaaccatccctaaccctgcttttagcgcctgagggccaaggttgtcccgtgaacatcttattacctaaccgatgagagaggatgaagctgactcctgctggctgaccctggctccagagctctgttctgtgcttgtctccattatagctgggaggcctgatccgtgcaaggacagaaggtcaaacctgagtgtccttgctacattacgaacactcatgggtctcaggatgccagagcgaagggacacacatctgtgaccctctgttttatgatttccaggaaaaaaaaatgatttcatggtttccagccaaagttgtagttactcccccttagaaaatattgtttgtacctctgagttctaaatgtaagatggccaaagctgtattctctggcctgctgcaagtatatcatctattgagtttgtttgggggcatggaggggacagttggtggctgccagtctaacttgtggtgctgctggtctcttcatttttattcttccttgcagaaaacctgtgacatttgacccatacttggtggggagactactaagatagtgttctgctgtagtttctctccaaatcctgctcttagtatttctggatgagtagaaggatctgtcacgttcatgatctaggcagctttccacgttgctggccctgtttacagaactcacatgcatgtgcattttaagtccagagtcggtttattgtgtagatcgtcaagaagtggtgaaaaaagcatttacatttttattttaagctgcacagaccctgccttataattagaagaaggggttttgtctttcttctgactaggtgtctgtcccgaaagaactggtggctctcatgagtgccatccgtgatggagaagcccctgacccagaagaccccagcaggaagatttacagattcaaccagagggtaaggtcagatcagcgcctacattttgtctcagtggtgaacttcaaaggaaacgcacctatccagagagtcctggaacaccgtaggttttaaaacatagcctttctcgcctcctctctcctgattgttacattacaggaagaggttgctgagaaggcacggctagggatgcctgaccccatttctggatccagtcctagtcggcttcctggtctctctctctctctctctctctctctctctctctctctctctgttgttttgaaacttggtttctctgtgtagtcctggctgtcctggaactcactctgtagaccaggttggcctcgacctccaagatccgcctgcctctgcctcccaagtgcagggattagaggagtgcccagtacccagcctggcttcctgttttctttaagtgctcattctctcgtgggccttgcacatcagtgtgcactgtggctggccagaaaatgggagggttatcagaaaaggacagtgtgaccgcccagtgtgttaaaaacctgacacagctgggacttaaccgaacttgtgtctttgaccttcagcgggcagaatggacctgtctgtgtatacccacctgtgagatgtgttttcttaattgtcttcagagtggacagtgttgcttccttttgggacctatgatatcatagctttggcatctacttactgctggtttaaaatataaaggaatttagggggaaatgttttaaaagttggaagggggaagaaaaatccagaaatacaagggaaaagcacctgtgtagttagctgttgcttttgagagatgcttaaagtaccgtttagatttgttcatccctgggttttgcctgtcagtagccttcccttttgtagaatgaaaggggaatgaatgttttgaagtgtttctgtgtcatatgtttgaactatttgagaagggctgagggatagttcatagcaatgcttggagatttaaagaagaatcgtgtaattttaaatctgaactgtccggctcaacccgttcctatacactgatgcagcacgcactgtgtgtttttgtctcctccaggttcccataccatgctacctgattgctttggttgttggagctttagaaagcaggtgagttttgcccaaattttgatgtttataaaaaggcaagaccataggcaagttgaactgcagacagggttgtgcattgcctaagatgtcaggccgacagcttgaaagaaattcaaatagttatgaattgcagacagcaaattaattttggttacaaagtctttaccactgtgccttaagttttccagatgtaaagggagcatgcacttaagcttaggctgagagcaagactctgatgtgagcttcaacaagtcatgtcgtacattctccatttccttctcctggaaactataacctgccactccagcctcataggtagcctcaggagataagatagataaagcccttggaggcctagaaatagtacagaaatagggtattttgattaaagttttaccaatagctaaagtgttctttcgtttggttggttattgtgttttgtagccagagtctcattatatatagctctggctggcccagtacgtagaccaggctggccttgaatgcacagagatgtacctgcctctgcctcccacgtgctgtgaggaaaggtgtgcaccaccacacccagtttcttacttagaatttttatccgcgtgtgtacgtatcggtggcaggtgcgcttaatgtgtgttgggcatttggttcctgtgcactctggggagccactgttctgctcacacgcctacagtctgcgttggctaattcatagggatagaaaaatgcagcatgtgcctcttgctggccactgtatttcattgagcatggtatacatgagccttagctgtattacattgtgtgacaagacttcttgcttcttccactgacttattacatgcatgtccggtgtgtgtctgtccctattctgggattatcttgtacaatctctgcctgagtcttttcactggtaggtagagagaggagcctgtattcccagaggtctcagcacacagccaggagctaacccttcgggggcacttcatgcctctgttttcctttccctttccctttccctttccccttccccttcccctttccnnnnnnnnnnnnnnnnnnnnnnnnnnnnnnnnnnnnnnnnnnnnnnnnnnnnnnnnnnnnnnnnnnnnnnnnnnnnnnnnnnnnnnnnnnnnnnnnnnnnnnnnnnnnnnnnnnnnnnnnnnnnnnnnnnnnnnnnnnnnnnnnnnnnnnnnnnnnnnnnnnnnnnnnnnnnnnnnnnnnnnnnnnnnnnnnnnnnnnnnnnnnnnnnnnnnnnnnnnnnnnnnnnnnnnnnnnnnnnnnnnnnnnnnnnnnnnnnnnnnnnnnnnnnnnnnnnnnnnnnnnnnnnnnnnnnnnnnnnnnnnnnnnnnnnnnnnnnnnnnnnnnnnnnnnnnnnnnnnnnnnnnnnnnnnnnnnnnnnnnnnnnnnnnnnnnnnnnnnnnnnnnnnnnnnnnnnnnnnnnnnnnnnnnnnnnnnnnnnnnnnnnnnnnnnnnnnnnnnnnnnnnnnnnnnnnnnnnnnnnnnnnnnnnnnnnnnnnnnnnnnnnnnnnnnnnnnnnnnnnnnnnnnnnnnnnnnnnnnnnnnnnnnnnnnnnnnnnnnnnnnnnnnnnnnnnnnnnnnnnnnnnnnnnnnnnnnnnnnnnnnnnnnnnnnnnnnnnnnnnnnnnnnnnnnnnnnnnnnnnnnnnnnnnnnnnnnnnnnnnnnnnnnnnnnnnnnnnnnnnnnnnnnnnnnnnnnnnnnnnnnnnnnnnnnnnnnnnnnnnnnnnnnnnnnnnnnnnnnnnnnnnnnnnnnnnnnnnnnnnnnnnnnnnnnnnnnnnnnnnnnnnnnnnnnnnnnnnnnnnnnnnnnnnnnnnnnnnnnnnnnnnnnnnnnnnnnnnnnnnnnnnnnnnnnnnnnnnnnnnnnnnnnnnnnnnnnnnnnnnnnnnnnnnnnnnnnnnnnnnnnnnnnnnnnnnnnnnnnnnnnnnnnnnnnnnnnnnnnnnnnnnnnnnnnnnnnnnnnnnnnnnnnnnnnnnnnnnnnnnnnnnnnnnnnnnnnnnnnnnnnnnnnnnnnnnnnnnnnnnnnnnnnnnnnnnnnnnnnnnnnnnnnnnnnnnnnnnnnnnnnnnnnnnnnnnnnnnnnnnnnnnnnnnnnnnnnnnnnnnnnnnnnnnnnnnnnnnnnnnnnnnnnnnnnnnnnnnnnnnnnnnnnnnnnnnnnnnnnnnnnnnnnnnnnnnnnnnnnnnnnnnnnnnnnnnnnnnnnnnnnnnnnnnnnnnnctagtaatatttttaatatatttttgtttgtatagcctttatttctaattttattgctagttgtggttatcgcaattttcactttttcaaaggagacttatttggccatcgggaaagggaacgttctacagtattttgaaatgttgagagtagccctgccatgcaacgcactttggacaaattatgtatctagacaaaggatccacatcattcatacttggcagtcaggtatgaggcacagaaacttagtgcccagcatctaagggaagactggcctaccgcacattgctgctttatggacctagtgagccacttggagttctaggaatccagcaaggacttaactaggacctaagtagattggaattcaccatagaacacattggacagtgtaaactttcctttaatctattgtcaattaaaagaaaggagggagtgggaggttgtgcttaccaaagccctcgtgtagcctagagctaggacctgctggaacccacctcagtgctgcctgcctgtaattccagcctcagaaagcagagatgagattcccagagcaggctacctatcaagactcgccatagcacagagctctgggtttgattgagagaccctgcctcagtagaaaaggcagacatgcgtgcacctacacacgcacacacacacatacatatacacacacatacatatacacacacgcgcacacacacgtacacacacacacacatacatatacacacacgtgcgcacacacgtacacacatacacatacacatgcacacacacatacacacacatacatatacatatacatatacatacacatgcacacacacctatacatacacacacacctatacataaacacacacgcacacacatacatatacacacacacactcacacacacatgcacacacacagctacatacacacacatacatacacatacacacacacacagtaagaaggaaagaggggtagatacatgaaatggaagtaaagagctctctctggggttaggcctattagtcctattgatgttaaagaggtttctgtgattagggaaggaaagaaggcagtgtttgcttcctaatgcctgtgtgttgaacctgttgacatacagagtagacatacagtgacccttcaggccaggtctgagatgtcgtcagctgcagcctgtcgatcgatctgatgatggaaattctaagatgttttcttttttgtaggcaggtgacaagtcactctccaacgtaagtaaaaatttcttcttacaatcttaacactcaagaagttgttaaaatacccactgtgttgtttagaagttattattgtaaaagaaaactggggttatcctcttgctacttcagcaattaggtttagtagagtaaagaaaaatttagccaaatatatatgatacataatcacagaaacaagtattgttatttcctgtgtatgaaacattttaattggcttacatgctcattgaatttaatactttccatgtctttttttttttttttctttgtggtagttgtttctaatccattagcatgttctatacctttttggtcttggttaaattgcattttcctcccgaagtaagtaattttttaatacgtttttaaaaacatcgagtcatgtgacattaaagtatttaaataaggacttgcttcaggatgaggtatccggtgtgaccactaatcccttaacactgtcctctcaggttattgcacatgaaatatctcatagctggacaggaaacctagtgactaacaagacgtgggatcacttttggtatgatgggttgttttgttttcttttgttttgttttgttttattggttgctcttgttgatccttctgcttcccacccaccgccaccgctgtctcctctgtacttcttgtttctctcccctacggtctctatgatccacggagtttcaaaagaccctgccgcacctgtcacagaggtccatacagtctaggtgtgcagtttattcctgccgctaactctctgacattgccgcattttaacacagacttggcaatagcaagattgccgcttccttttctctgctgccacctgctggtctgggcttgctatcgtcttagttgactgcctgggcctctctaggcagcacgggctgggatgtagaggccatgctatctataagggctctcctcccgggggaagacacaaaagaaaagatcctcttggctaagatgctgtgttctatctgctgggacagtacccattttgttgttgttttttttgttttgttccctttcaggttaaacgaaggacatactgtctacttagagcgccacatttgtggacggttgtttggggaaaagttcagacatttccatgctttgggaggatggggagagctacagaatacggtaagtagggcgggcttctacaagagtcacccagccttgcatagtcattacaaactgggttaataaactatctttttaacaacagggtagccataggtgtagaggatgtagcaggtgtcatgcatagccctgttctaaactgggagccaagaaacacatatgttctttactgctaacatagatgactattgcatagaaatttatgtgaatacttgtgatttgtttgtttgtttgtttgtttgagacagagttatctgtgtaacagccctagctatcttggaactcactctgtagaccaggcaggccttgaactcactgagatctctgcctgcttgcctctgcctcccgagtgctacagttgtaggtgtgcaccaccactgcctggccctaatacttgtgatttttttttttcaaaaatgtatttatttattttgtttttttggagacagggtttctctgcaccaccactgccaggcagatttatttattacttatatctaagtacactgtagctgtcttcatacgcatctgaaaagggtgtcagatctcaatacagatggttgtgagtcaccatgtggttgctgagatttgaactcaggacctttggaagagcagtcagtgctcttaaccgccgagccatctctccaacccctacttgtgaatttttaaacacactctccccaactctaaatgtgtcgctcagacattaaatcatctttctagttcttttgtcaaagtaaagcctgttattagcaaggaatatccgagacatacatgtagttagactccaggagtgatagcagcatactgtttccagtctgtacgttgaaggtttagaagcctgagtgaaacagagcctccccaacagcttgctggcgcagtaacagtcctcttcctatgagggcactcatctcactttattgggttgcagataaaaacatttggggagtcccaccccttcaccaagctcgtggttgatctgaaggacgtagaccccgatgtagcctattcctccatcccctatgagaagggctttgcgctactcttctaccttgaacagcttcttgggggaccaggtaagtagctgccattgtccgccagttggctttcgtttgtttttatctctgggagggtgatatgaagagtagagatgacttgtaaactctttctagtctttttacatttctggttcattctgctagagacgtctattgctgtcagatgttgccttcatccacaaaactctacacaaccccttaatctagataatgggggcttgacttttttttaaatcccattatagttaaagagttagggtaatagcgtatatccatagacaaacttcctgcaatccagaagtttatgagtgacaaatgagcggcctcccagccctcgccagccccagagtcacctcattagcactttgatgtcactggctccagatcttattctaggggtagatgactgtcagtcacacacacacatatacatggaatgactttaataaaatcagggatcctgtagactcttattggtgggtccacttcctccattgaagttcccagaagtcgctgtaattctctcttctttcttcaagttttcatggatgtgacgtcacctacatcagcttcctccttcctgtgggtcttagccacctcagcatagggttttccccctcacctttgcacctcgtggcttcactttggaatatctagattgccagtgtcgttgttgggttgcaccctgtgcccttcagtaaataaaacaagcactcctggaacataaaccatgtgtgactcagcggggcccctgagaaccggagcggcttagcagaggatttggggagagaccagtcgagttgcttctatcacacagtgtcctgatgattctgcttcattactagttactgatgttaacctcttcccgtgccacaagcatgaattcgagtttcccacaggtctgtccgcatggaggtccgtacagtagggtgtggtgctgtacaggcaagagagagcgactgtcttatgtattggttctgcatctgtcttttttaaatttctaagctcagtgttttgcatcctcgtactcagggcacgtgactctctctctctcacacagatgtgctgggattatgtgacattatattgatggcctgggcggggtggtacccgtttccatcggctttgaaggcgcctgcccttccattccatttgtgggcttactccccctttgtctcatcgatgagggctattgctttagaacttgggttattcttgctctgtgacttcattatgtcatcctggctggaaggagacttttaggcccaactggagacctgcctcctgtcctgaacattctctcactgtccagagctctccttggtcctttgactgttctctgttgcccgtggttaccagaacaacgtcaactgcaaaaacgacgtcaaagaattgccttcctgtgaattgatttctttttctttcttttaattttgtttttcctcctagaggtgtttctaggattcttaaaggcttatgttaagaagttttcctaccaaagtgtaacgactgatgactggaagagcttcctatattcccactttaaagacaaggtcagctttaaattcttcctatttttcatgctccatgtagctctataaactacttgttaggctgtgtgtatttcttaaccataagtattggctcagaatttcccaagagactcctctgttgtattctgattccctttcagaacacttgtgatatctgtaagtttgtatgttaattggtcagatttaaccgtcccacatttagaaattatctcgacgtggcagcgtagagtagatggtgtctgatcactcccaggttttcagttgggcatctgtgagcttgttacaacctaggacaagtctctctatctgtcacgaactggctggtcttctgttcacaggtggatcttctcaatcaagttgattggaacgcctggctctacgctccgggcctgcctcctgtcaagcccaagtgcgtacccgcctgctaacctgcttcctttccttcttcctgtccattttgtttgtttagttattgttttcccagaacaggatttctgtgtgtagccctggctgtccagaactcactctgtagatcaggctggcctcagactcacagagatctgcctgcctctcaagcactgggattatggtgtgcattaccaccacacagcgagtatttaacctcttgttattgctttgcggcatactaacctacaaatgtgttggactgcatgtgtagctatctcaggacaggtggctgagggctgcaggttgaacacacctaaccggatcccttttggagtatctggacagactatgtgcttttcttgaactgttaccagtcagcaaagcgtgcagaggcttggatagatttcttagacttttttccctgaagcccaaagccatttccatggtttacaaacagatctgttgaactgattgcagttattactgagtgctttgtttctactgagatatggagagggactcaggaaagagtaagatattttctccttttaaaggttttgtgaaggctaggtatggtggctgtctctcaccccagcccttgggaagagataggaggatcatgagctcagggttcaagtagcaagacttgatctaaaatacacatacacattttcagtaaggaaaaaaatagcattttactgttaaataatatgtacagatattatatctacccttaagctattataagttatccctatttctagaagtagtgatttagagttagctgaccaaagtgttttgcccaaaattgcacaactcataaatagtaagccttaaatccctggagccttaaccccctgtcttttaaattaaacacctccctggcgtcagggagctagttgcacctttgagttcagctgtcgtgtaaggatgctgactctggcatactccagctcttggttgccctcccttccttcagatcatggaaagtccttaccagccactctcccaccaaatagcctgatttaatttaggtgcagggtgagcatcacaagttgaggtagaaataaagatgccatggtcctgtatgtttggcacgcctcttgagagcccaggctgagaaaggagtactcagaagagatgcagtaattcccacattcttacaacactctccacatttgtatgcattcaaatgtctcccaggcgtatcctcttttctccatttcctgcccctccactcatactcactgtgacattagcacacaggaagactgctgtggcctctgaactgtgcacctagatgttttctggcctcctcctgtaccagtctgtatagagagccgaagtaaacatttaaaaacacagtgtgactcaggatgcagaggcatacaggtatctgtgaattgaaggctgccttggtctatatgatgggttccaggacagacaaggctacataatgaagagatcctgtctcaaaaatagatgatggatagatggatagatgagagagagagaaagagagtgagagagagaagatggaagatagatagatagatatagatgatggatagatgattgataagatagatgatagatggatagatgattgatagatgatagatggatggatggatagatagatagatagatagatagatagatggttagataatagagacagacagacaagcaataacaaacacctacaactgtgtcaatctatagtcttgctagtcatcttctctagtgctcatctggtcttggacagaagccagtcctttctttcatggaaaccatgtagctcctgacgtcccaccccctttgcttcggtcaggctggcagtccagggtccctcagactctctgccctcattcaagcctgttcctcagacacacacttccttctacatggaaaattccaacctcagcttaggaacttccttcctcatggagcatctcttaacctctctgtcaggtcagaccttacgtgtaagagtctcttggtgctgtattgggcagcttttcattttctcatgtgactgagcacttctttgcgtcactgcacccaagggagagcaaggctcaagtctggtttgcacattacttctcatagggcttttttgtgagtagcaattacttcttctccctgagctaacccttgacttagccctcttagtctagtcacccatactgagaaggaagttccagaaccctaagaaaaacaccagccaaccctttctagtgtcttggtgtttaagaactcagtgtgagcagcccggctgctgtgtggagattaaagtggctgctccggcctagtgttactctgatgccttcgctggacaaaaatccccaacatgatttgaggaaacctagtttagttctgtttctgtctgtggtcatattacttcgagcctgtaatgaagtagaacacagagaaggtagcaggggcagacagacacacagacaaacacagacagagacccacttccaatcaggcctcccctccaaatggcctattaatttatgggtgaagttagtatccttatgatccagtcacctctaaataccacgccagctgaagacagagccccaactcgtgggtggggctttggaggacttttcaaattcaaacgcaacacttagggtatacttactgccagggtcccagtgcagcgagttattacttcctgctgatcctacctcgaagagaattgtgaactggctccctattcgttccctagaaaaagaatagaagaagaaaaaaaaaaaagtagatccctaccagcagtaggtgggcctcttgtcactgatgagtgtttcacagcaaataggtttggtgcttagataaagagggctgttttgcaggaattttgtttacacgacacattcacgttaggagcacacacatagagacacagatcatcttgcttaatggttaatcccacctcccgaaaaggaaaggaatgaggctatcacaccacgactttggactctccagtctgctatctggaacagtgtctgttacttagcctgcttgtagacttgctaggtgatgagaagattggagcaacccaaagtaaaatccctgagatgggggatgtctttgtgttgtctcgactgcctggagctgttgctgccaggcagagacacttgagtgcgcctcactggtcctgaccctgtcacgagtcctccatgggcgtgtgacatgtgctgggatgcctgtgttctcaatgaaggacggccaggagcttcattgatgtggcatctatgtggtgcccatttggatttggttcttagatgagtcaatagacttcctttttctaacactcaggagctctttatcttaaagaaatgtaaacttttaaggatgttttatagcgtaaaagtgcatttgcgcaaaaggatatgtttataaactttaaccttgactacctttcatttccacagttacgacgtgactctgacaaatgcttgcattgccttaagtcaaagatgggttactgtaagtagcgatggaagatttccggctcgcttctgaattgtacaaagacgtctcttgtttattgagggtagtttcaactgtgagcagttgtttttaattctttccctggggtgatactgtcttcaccccttcactcaagaggtgcttcaaatacctgtagatgaatctgaatgatgttgggtgaatgtttaaggccaactatggaacaggaggatcagacggtttgctggcttctggttctattcatttctataaactttcctaaaaaggagtttccacatacatgtgctcaaacgtacgcccagggaagccagactgagcatctgccctggatgagtctggaatagaaaccgagagagaacttaacagttgctttatctcgacaacagttgatgttgctctctgaaatttatctttaaagtttacgtggtcagcatttcttgacaatcatccacatattgagtgttgagattcccagtatgaaagaaacagaggtggacttgcctttggggtaatgaaagaaatttgaggtagtttaatgaaagaaattagatttagacacacattacttttatgttgggcaattcatttactggggtggggatactggcgaccaaacccagggcacgcagagcatttctcccatgtagggagacaacgcttaagagataaagaagaaagcaaagcaagaggataaggcaggaaatagaagtgagaaaccagtggacagttctctaactcagcccagcttcatgacacacatgtgacacctgcagacaggagggttgtgaattcagggccagctacatccagaaaccttgtcaagaaagaaaggaggggggaaggaggcaggaatggggtctcctttaaacactgtggactgtaagctttttggaggttcaagtcataaccaatcgactgaagtcttgtaagtctctgcccttcagagaattgttgtatacacaggatccttggctgtggatatttttacctggagtgtagaaagtgtagtttagtggacttcctgtaacatttccaaaggcttaattgtttgtatccaaggagagaaaccttgacatgtgagcctccatcttttagcccagtctttctgtgctcacagacgtgccagagagagaacaagagctgtctgtgggaggcagcacctgtaacgggagtctcctagaaccctcttattaaatttgagaaatgcacgcagctcgcctggtgctggagaagctgccgcgatctccactctgatagtcctttgggcccagcagtgaaaggcagatggttataaacatctcagctatcagaaggaacaggtggacttggtaacagtgaggacggttgccatgagcgctctccttagctgttgccttggttcttttccccatgtattgaaggtatatgtgtatatatgtatatgtatatacatatatatatacatgtgtgtgtatgtgcggaggcagggggacccccaggatgagctgattacctagactcctgaattgggaactgcaagttcagcaagaaaacacacttggaagagcggagagcgagcagaggatgatacccagggccaccccctggcctccacgtgctacgcacacaggttcatagtcagtgtatgtatgtatacacacacacacacacacacacacacactacatacacacacactacatacacacacacacatacaccacatacacacacaaacagaggaataaaaaggattatacatgtaggaaacagtggtaaggcataagaacagactgtaaagcagcagccatgtagcgccagtacgagaagcacagccatcttagggtctgtggaacaccactctcatttcgtgtataaaatgtctcttctgtattcagttagtttataagtgagttgaagtgctttatgtagcgtttctttgctttggaaatcactgtacttctaatggtccaaactgtcaagaaagcaaaggcaggcgactgtccctgcattctcactaggaatgatgtacacagattttaggaaccaccctcctcttaggttatagtaccttaacatctggttatgttagctcagctgcaaattcatttgtttttcttaatctttacctgtgtgtcagattaacaatattacgaaactgcgcctgaacagaaataacccggtgatgtttatttcaggccaaagaggaagatttaagctcattcagcatcgcagacctgaaggatctctcgtcccatcagctgaatgagttcctggcacaggtgcttcagaaggtgagccccagctcccagccccggagatgaaagtgggctcagaggcacagcgcgccctgaccccagtgcagggaaaaacactaatgaagaaagtgtgggaagagaaaggaattacgtagtccacttttttttgaaacagcactcattgaattatgatattagtactgttcaaatcaaaacctgtgtaagaaaggagaattcttgttctagaaagcacataatccactaggaggggaagacaggggcgttggcagttggcaggagccatttggaatggatcagtgaggaaagactccgccctcacaggcatcatcaacaaggaaggtcttgtggtggactgagccttggttcgctaccagcagaatggtagaagttaggttgagggaggctccacccatggagcatggcctgcgttgagcgaacagtagggctgggtgaggcaccagaggccctgtcctagcaagagagagtttggttttagtgcacgagtcatcagcctgatagctttctgtggtgcggcgggtgtgatctaggatggagaagaaacaggaaagcctgataggctgacgtggggggagggaagtggggcaaaacagggagagtcgggagatggaggaggctggcctagcagggtggacttggaattgcaatatgtccattgggagctaatgtactaacttggaacaggcctagcagttagtgagaatggaggcagctggctcacaggcagtcctgtcaggtaaggaggccacacagggtgggcaggaagggagcgcctccccagagacctcagactgtcctccagaggcaatttacgtcctgtgtgtccacactgaacctgtctcctttcctccttccaaactggtttccccttctagtgtgggttaacatgagtgcaggagggccaggtattgcctgaacttgtatcaggcgcctgtgtttatatggaaaatgcacctcacccccaccccaccaaggacagagtccatattcctcatcccaaaggggtctgtgatgtgaaaggttaagagcgaccattttaaaaggatatagagaatctaaaagtgatgtcagaagaaacagacacagataaagccaatcaggaaaatgtcaggaggtgtgagttatctacagagtgggctaagtctaggttatgtaggaggtggagaagaacctaacggattcaggaacggtctaggctgaggagagcataacacccctttatttctctcagttccccacaagatatagcgcattcctgctctcccagaacaaacacccttctcgggaactagttgctaggcattggcttcagctcgcatctgttccttttacccttgtccagcatatgtccgtattataagggatgtaggactgtaatctggctaagaatttctctccagctcctttcttccagggaatcctgttgaaatgatccctcatacgtcttcatttcgctcttaggcacctcttcccttggggcacataaagcgaatgcaagaggtgtacaacttcaatgccattaacaattctgaaatacgattcaggtacatcattttaacttgtctctgtggaagaaagctgagtggtagcttaaacagtggagaaaggggaagccgagtgcgggagcccacgagtcctcagaacccccgtcagatcatctacatagatggccacagtagtatcgaagggagagttgtgatgtctgtaacacgatgttaatctttctttgctaggttctcagtttccctcaaacttaaaaacaaaaacaaaaaaattagaatgaagactttaatggcaaacactctacctttcccaagttgtcaaatcaactctgagtgggtgcgggtagacacctttgattctgtgatacgttaaccgtccttaattcaaatgtgtggtgttaggtttaagtcaaagccacttgttttattgtgcacacaagcactcccacagtccagacctgacacttagggcctttcccaagacccagctcctcctatgtctcttctcccgttgttaactgtgcgtgtgtgcagatgtgaattggtgacgtgcaggtgcccagtgtggctggaatgggatggtcggtcatgattgtttaggagtaccgctcacttgtttccccggttctcaccttccctcctgcccacgcctgtataaatccttctttcagatggttacggctctgcattcaatcgaaatgggaggaagcaattcctttggccctaaagatggcaactgaacaaggaaggatgaaattcacacgtcctctattcaagtaaggccacatcaggctgtgcacacgggagggacaggaagcagaatctgaagatgtttcctgtgaatgtttctaaaggggccgtggctgtagcttcatagtggaacacttagcgtgcctgaggccagaggttcagtacccagtcagcctggtgggaaaaataacttcataaaatgacatctatagcataggtctaagagcattcaagttggttatcataaataaagagttaatacttatgaccatttaaattttaaaatagcatcattagctgctgcaggagcccagtatgtgattagctaccatagggcggaggcgaggtgaaaaggagacaaactcaagacagccgtagatacacagaaggggttggaaagcagaaagtctgacgagtgagtacggggccaaggaataatctaaaactaaatacaaagagacctttgcacatagttcaagctgagttgggtgttgcttgacatattaaagaggaatgcaggaacataagggagagtgtgttagcaacagggtggaagttaagaacagctccattaaggtatttgttccatgttcttaaaaagttgcagtcacagcatcagatttcatgattagtctggcagcctggcacacacttcctaaatatagtggaattgtgtcagtgcaaactattatcaggtttcttaaatatggccacaaaactaatttttattaaggtattttaaagcaaaattcactaccttaccagaattaaaacccatctacctgcaaatagagtgatgtatacctcaaatacaaatatatacccttggggtcagcaaatggcttggcagacaaggcgtctatggcaaaacctgatatcctgagttcaagtcctgggactcacatagtggaagagagaaacaccttgcacaggctggcctctgacctccaattttactatgaatctcagtctctctctctgtctgtctgtctgtctgtctgtctctctctctctgtgtctctctctgtgtttctgtctctctctgtctttctctctgtctatgtctctctctctctgtcactctcacacatacacacctaaagaaacaaacttaagaacataccttttatgggaaaaataaatgttctgtcttgtatcagaaactaatagccatacttaaagcgactaaccctacatttcatatagttacccagtttatttgccaaattgtttcactacacttggtattttttttctcactggatgaagatttcagaaattccttttgtaagttaaaatgtttatactcttgaatgattgattagcataaacttgaaaagattatttttttaaagacaaaataatagaggtcggccctctcatgcaaggtcagtatttagccagtcaccctccacactgctctgtaactgctgctgtcccctcactgtgcctcctctgtgtagctccctccaaattcctgtgacctgctctctctgggccagcatttgatgcagagatggtacaggaccatctggttttacatgggtggcgcttagctgttccgttgtgatctttaatttaaccttagctctgacgtgatatctctgctcctctctccatctcttcccgatgcctctcctttgccctttgctctgcagggatctcgctgccttcgacaaatcccatgatcaagctgtccacacctaccaagagcatagagccagcatgcatcccgtaactgcaatgctggtggggagagatctgaaagtggattaaggaactgattgttgctgatttcagaaaattcctttgtttaatttttatttattttcttttatttccttagtttcctttgttatgcctcccttttcatatctgctgttcttaattttagtactttgtgtcctttagttaatttggctaaggggttatctatcttgttgattttctcagaaaaccagctctaggcttctttgattctttgtatcttgctctttgtttctatttggttgacttcagccctgagtttgagtatttcctgccatttattcctcttcaatgtgtttgcttcttttcatcctagaggttttaggtgtgctcttaaggtgccattgacaacccttattaagatgactccaaattctgtttttttttttcctttcccctcaccaatttactcttttttctttaattggatattttatttatttgattttcaaattgtattccctttccaggtttactctcttcaaatacccgatgccatcccacttatcttgcttttatgagggtgttcccacaccagctacccactcctgcctcactaccattgtattcttctacattggggcatcaagcctccacagtatgaagggactcccctcccactgatgccaggtgaagacatttcagctttttcagttcatcccctaactcctccattgggatccctgtgctcagtctgatggttgattgtgagcatccacatctgtattgatcaggatctggcagagcatgtcaggagacagctgtatcactttatctcctgtcagcaagcagttcttggcatctacaatagtgtctggctttggggtcctcatggtggatggatgcccaagttgggtagtctctttatggcctctccttcagtctctgcttcattctttgtctctgtatttcctttagacaggagcaattctgggttacaattttagagatgggtggttagccctttctctcaaccggggaccatacctaacctctggatattgtctcaacaggtcctccctccagtttgtgtggtatttcagctaatgtcatcccagtggaggtactgggaggctcttgctttcttgtcatctggtactttctggttgctacccccagttccacaaggcacacagtcctgaggattttcctgataactctgcttttctgtgtgtcccaaatgatggattatgctccctctttgtttttattgaatcatagaaagtctttctttcctgaccaagttatcattgagtagatagtttttctctttccatgaatatgtgggctttgtgctgttcttgttgttattgaagaccagtcttagttcctggtgatatgatggaatgcatgttattctctcaatctcttgtatctgttaaggcttgtttggggtctgattctatagtcagctttatagactgttccgtggtgtgtttacaagaatctatcctttttaaaattgggagtgaaatgttatgaggatatctactaaattcatttggttcataacttcttttacttacaccgtgcctgtctttaattgttgtttggatgacatgtacactggtgagtgtagagagttgaaatatcccattattgtgtgtggttcaacctgtgcttggagatttagtaatgtcttttacgaatctcgctgccattgcacttgaggcatagattctcagtctctctctctctctctctctctctctctctctctctctctctctctctctctctctctctgtctctctctctctctgtgtctctctctctgtctctgtctctctctctctgtctatctcacacatacacacctaaagaaataaacttaagaacataccttatgggaaaataaatgttctgtcttgtatcagaaactaatagccatacttaaagcgactaaccctacatttcatatagttacccagtttatttgccaaattgtttcactacacttagtatttttattttcactggatgaagctttcagaaattcctttctaagttagagtatttatactcttgaatgattgattagcatatacttgaaaagattattttttttttaaagacaaaataatagaggtcggccctctcatgcaaggtcagtatttagccaatcaccctccacactgctctgtaaccgctgctgtcccctcactgtgcctcctctgtgtagcttcctccaaattcctgtgacctgctctctctgggccagcatttgatgcagagatggtacaggaccatctggttttacatgggtggcgcttagctgttccgttgtgatctttaatttaaccttagctctgacgtgatatctctgctcctctctccatctcttcccgatgcctctcctttgccctttgctctgcagggatctcgctgcctttgacaaatcccatgatcaagctgtccacacctaccaagagcataaagccagcatgcatcccgtgactgcgatgctggtggggagagatctgaaagtggattaaggaactgattgttgctgatttcagaaaattccttttttttaaaaaaaaaaaattgaacctattaagaaatacaaaattttagctgtcattgtattttaaagtgtcatttttggtattttgttgttgttgtttatttgtttgttttttaatcatttttcatgatttcactaatattctctgccccttacaaaccaatgtggagtattcttctgccatgagatgtggatatgagagtgatgtcctcccccaccctccctcacctcctgtggctgttgggataactgtccctggggtcatgagagcaaatgagctaaccctgtcccttgctggctgccgcactgcacctagcctgggcagtacagtggagctggccctgatggcagaggcataagtgagctagccccgagggtatgagagcagatgagctggccctgcccctcactcacctgggcagcagagtatggctggcatggttgaggggcgctcgtgagcaggccccaagggtgagagcacaggatagccggccccatcacttgtctggtatgaggtggcatgggttggaagatgatgcccttcccattgcctcctgcagcaaccaggagagctgaccctgggatcaggagaatgggagagctagtcctgtcctctcactgacacagtagagctggtcctggtggagtggacacaggtgagctgccccagcctcctgtagatggcagcactgagtggcctacctggagcagtgctgaagtgctcgccctggtgatgcagataagggagagctgtcaggctgaccagctcagcagccatccaggcccagatccagggctctctgagttgtcccattccaaaatctgtatcatttgctaatggttggggtgcgtgaaagggtgagtcctgctgttccaaagctgcaggatctccatggcacagggtaaccagcaagagtcctggtgagaatcccatgttgatgtcactgaagccaaagctcttgaagcaaaccaatgactcatcaaaatgaacatttgcaagtgaagatgtgtagccaatacatgggatacgttgggacatattacagcttccatgatgagatatttgtagtcttataaaggacatttaattggggctgccttacaggttcagaggttcagcccattatcatcaaggcgggaacatggcagctccaggcaggcatggtgcaggaggagctgagagttctctgtctttatctgaaggctgctagcagaagactggcttccaggcagctaggatgagggtcttaaagcccacacccacagtgacacacctactccaacagggccacatctaatagtgctactccctgggctgagcatatgcaaaccacagctccccagccctggatccatcctgctgccccagtggacttaccccagtctcctgttcttcacaggtcaggtgaccaccctgagcatcccagtgtcccctcactccattcagcctgcctcaccacctccccagagcacacggcatgtggagacccattgattgaatttgaaccaaataaaagacaggcctaagagagtaccctgcagcttggggcatttccacgtgcagtttgggaacctggggcgagggggcattggcagtcagagcagaaggatgttatttaagggtcacagagggtctgcaacatggagacatcggtgcttctgtctcgtgtgtttctcttacccttaatgtgcactctgaacccagctcaccctgggttacacatagaacgacagtcacagttccaagttctccactgagcccactcctggtcaaataaactctagctaaggggagtgttgttttagagtataagctttgggtgtgtgtcatcactgggtaccccctaaaaatgtaaagattaagaacaccccgaagatggttcctgtccaatccttgaatccagttgtgttcttcggtggacttatccacgctacagcataatcccgtttcccagcacatggctctcacttgcatttcttccctggaaaggttagagggcgccagagacacaccctgctactggttttcctaggaccaaggatgcattctcactggctcaagttcagctaattcacatgcactgagttgtctctgtgtcagatcaagtgcacaggatcacccgaggaactaaaagaacagaagtgtataaatgatgaaaaagatgggcatgctaacatagcctggcaaagaattccaccgaacccagattaagggtgacttacacaaaaggtgaacagagacaacagctctggagttatctgacatgcaaaggagaccagagagtgtgaagagaaaaaaaatgagaagtcagccacatgatatttgaggtttgtgtagaatcttcacatggctaggaggaactgattgcccggtactgatatcatggaatcactcaaaagctgggtctacctgggatgtcagcaagagcacccgatagtttgggtgacctttcaacctgaggggtagtgggacatctcagccttggcgcatctgttcatctccagacatcaacatctgaacaggtattcagacaggacttggtggtgaatgaatgaataaatgaaggtggttcacatctgagggccacagttttcccagagttgtaaaagatgaagcccgtatctgggaatgagctgcaagttgaggagagaggggagacttgaagcgtttcctctggggaggcatgagtcaaagggtggtgccatcatccccacggtcataggacttgttacatcagtctgctggggtaagcaggtgacagtccagcgtaaggactcggggtatgggtttcatcccaaattacacacataatagattctggcttcccaaggacctagaagctgtttaagcatagccacataagcaactaggatagcttcctaagcggtggggttcaggaggagaagaaagggttaaccggaggtcaggtccgtgggcagagatgagctaagtaaggtggaaggccatgtcctggaggtggaatactgaaccgaagctaacttctgtcttgatagcaaatcgagatgttgccaaattgcagggcacagtcggggtgtgggtgtctgaggaatacatttcgatagactgatggtaagacactggatgtggatctgggtgtctatctacagagcaactgttctaatgaagtaagtagaaggcaggtcagggtttctgattattcaatcaaatttctcagaactgacatactactaaagcgcacacaattctttgaatctcttgtgctatcagtgttccttaacacaggtggggcaaaattaggtgggggggggtggtgcaggggaagcggtttggggcagggaagaagcttagctgaactagggatatccagggggcaaagataaggaatattcacacacacacacctacacactcttgagggcatgtggagtgttaaagtccaagtcctggtgagagtaattgggagcctccccatccagcaggcacggacctcagggttgacacacactaattgactttgtccttccagctgcccgtggggatattcgtttcatagatgagtaaagctgaatcccaggggactcaaatgactgcgagtcacagagccaggatttatcccaggtagatgctgcgaatcacggcagtagagaatttgcctttggcttaggaaacgggaagatcactcactcaccccagggtagtgagctgagggcctccaagctacggtgattcatgtgtctagacacaactttttcagaactgctttctttgatggagcaatggcttcggtagcactgggcactggcagggaggcgttgctcaacgcgtgtttgtggaataaataaatgaatggggattgctacactctgggtgtcacaattgaccgagaggatgcgttttaccaattgagtaattccctaaagaggggaacatggtgtttataagcagctttcaaggcagactcagaaagggagagagcgaactgggaaccctggtcagaaggacttccagggtcagagaattacaaggctacattaaaagtgggctcagctacccatatccctgtctcctgaacctagttcagcatccagaaaggccaaaggaacaccagagaccgcaatcaatatttgttcaaagtgtgaatggctaaaggcaagggaaggggtgtgttctgaaagtccactctcagtctcactgccaaccacaccccagcagacactcccctccccggtaaaggataaaggctctccccagtcgaggactgtaggaaaggagccagcccttggttacagtggcctgctgctcagaagggctatgcctaggtacacagtgcacgtgcgtggggaatggctggcggtgccctgtcaggatgggaagctcactgttggctggctgggccgtgaggctgtgcgacgctacatgaagaacaaaccggacaatggtggcttcacttccgtggatgaagtgcaattccttgtgcatcggtgcaagggcctgggcctgctggacaatgaggacgagctggaggtggccttagaggacaatgagttcgtagaagtgggtgagtggccctcaggggaacagagccttggcatgtcctggaggaagtcacccccgtgtcagggaacacggcaagaaaaaaaagacttgattacttgccctgggggagcctcaagccttgctttatcatctacctccccctgcccccagcctgcaatagatggagagaggcaggccacagtgacagtctggacttgaacccaaggctgcaggttagagtcccttgcaatgacagaatccttctgtaagggactgccagagtagaaacagaagcaggctagaaccaatcttccacatacatccccctgctacctttctgctttttgctttcctgtgtaaagacgctaagaccgtgtgaaaatgtaggacgtcacggtccagcagccgttgctatgaaacacaagctcagtgcatggaggggtcattcctgggtctgacacctgccctgatgtgacaccctgtgacctgctaagcccctctctccccctcttgtttcagtgattgaaggtgatgtgatgtctcctgatttcattccgtcgcagccagaaggagttttcctgtatcctttgtgcatcccctttggtcagccctgcggtggctggtcctgacacggtggggctggggctgttccacattgctagtctgctcctttacctggctttagatacagcaaataccgggagcctgaaaaagtaagctattttcctttttgtggggaatataaaactctgtcatgtctgaaatatgcctcctttcacctaccactttaagaaggggaaggaggagggggagaagaggacgaggaagaggaggagaaggaagaggaggaggggggaggaggaggnnnnnnnnnnnnnnnnnnnnnnnnnnnnnnnnnnnnnnnnnnnnnnnnnnnnnnnnnnnnnnnnnnnnnnnnnnnnnnnnnnnnnnnnnnnnnnnnnnnnnnnnnnnnnnnnnnnnnnnnnnnnnnnnnnnnnnnnnnnnnnnnnnnnnnnnnnnnnnnnnnnnnnnnnnnnnnnnnnnnnnnnnnnnnnnnnnnnnnnnnnnnnnnnnnnnnnnnnnnnnnnnnnnnnnnnnnnnnnnnnnnnnnnnnnnnnnnnnnnnnnnnnnnnnnnnnnnnnnnnnnnnnnnnnnnnnnnnnnnnnnnnnnnnnnnnnnnnnnnnnnnnnnnnnnnnnnnnnnnnnnnnnnnnnnnnnnnnnnnnnnnnnnnnnnnnnnnnnnnnnnnnnnnnnnnnnnnnnnnnnnnnnnnnnnnnnnnnnnnnnnnnnnnnnnnnnnnnnnnnnnnnnnnnnnnnnnnnnnnnnnnnnnnnnnnnnnnnnnnnnnnnnnnnnnnnnnnnnnnnnnnnnnnnnnnnnnnnnnnnnnnnnnnnnnnnnnnnnnnnnnnnnnnnnnnnnnnnnnnnnnnnnnnnnnnnnnnnnnnnnnnnnnnnnnnnnnnnnnnnnnnnnnnnnnnnnnnnnnnnnnnnnnnnnnnnnnnnnnnnnnnnnnnnnnnnnnnnnnnnnnnnnnnnnnnnnnnnnnnnnnnnnnnnnnnnnnnnnnnnnnnactatactaaagacaggtttcatccagctcagagtatactatgggagcctggcccctgtttttctgatttttcttgcccagtgttcccgtaagccagccatgttcttaattagcacatcaatgcctcagaaccatagtaaactatctttggggtcaggcagaatccaaggctactccttcaaagcccctcccactcactgaacctcacccttcttgtgcagtacattgccctagatggggacagtctgagcacagaggatctggtcaacctgggcaagggacgttacaagataaaggtacgtgagggaggacgggaaggacagtgcccttccgtccccattggacatggaaggctttcgtatgctcactcctggccaatgctctcctagctcacttcgattgctgagaagaaagtgcagcagtcccgggaggtcatcgacagcatcatcaaagaaagaacaggtatccttttctctctcggggtgtcccaacattagtttacgggcaaatgtaggaagagaacccctgtggcatctaatcaaagtgtctgtttctttcttttttgtactccagttgtttacggcatcaccacaggttttggaaaatttgctagaactgtaatccctgccaataagctacagtaagtctcccatgaagacgccacaaccccacctgccccaacttggagattttgttcccatgaagatcattcacattttctttttaaagcacactgatatttgttgagagctcacttcagatcggtggttctcaaccttctcaatgcttcgaccctttaatacagttcctccaggatgttgtgatgactccccgctcccacccccaacattattttcattgccacttcgtaatggtaatttggctacagttacaaattgtagtaaatctctgatatgcaggatatcctgatatgtgagccccaaagggtttgggacccacaggttgagaatccctgcttttgatcaagccatggcagcaaattttcacacaactctggaagacagtcaagcgtctcatgttcctggatgggcagtgtaaggttcctgttgacttgtacccaactcatcatgagagaatgagacctactgtgtgtcctttccctgcatgcagcaactcatctaaagtcttccctgttgttccctttatactctcagctgagaaagcatgtccccctcatacacacacacacacacacacacacacacacacacacacacacacacacactggtgtctaagagggttctcatccttctcttccagggagcttcaagtcaacttagtccgttcccattcttcaggtaaattcttcctagtatcgggtgcctcccaaaccatgtagctcacgtgattgactagcatcgtgtaagtcccatgctacaagtcccatcagctggcgtgctcca

SEQ ID NO: 1281 - DNA, 1709 bp, Mus musculus
ctccgctctcgggctcgcggtgaaagtctggcggtagagtgtctgggtgctggctgacgtgcggcggatctcccacaaccatgcccgaggtcgcggatacttgctccttggcttctccagcctcggtctgccgaacccagcacctccatcttcgctgcagcgtcgacttcgctcgccggacgctgaccgggacggccgcgctcacggtccagtcacaggaggagaatctgcgcagcctgactttggacacaaaagacctcacaatagaaaaagtggtgatcaatggacaagaagtcaaatacacccttggagaaagtcaaggttacaaagggtcaccgatggaaatctctcttcccatcgccctgagcaaaaatcaagagatcgttatagaaatttcctttgagacatctcccaaatcctctgcgcttcagtggctcactcctgaacagacgtcagggaagcagcacccgtatctcttcagtcagtgccaggccatccactgcagggccatcctcccttgccaagacactccttccgtgaaattaacatacaccgcagaggtgtctgtcccgaaagaactggtggctctcatgagtgccatccgtgatggagaagcccctgacccagaagaccccagcaggaagatttacagattcaaccagagggttcccataccatgctacctgattgctttggttgttggagctttagaaagcaggttattgcacatgaaatatctcatagctggacaggaaacctagtgactaacaagacgtgggatcacttttggttaaacgaaggacatactgtctacttagagcgccacatttgtggacggttgtttggggaaaagttcagacatttccatgctttgggaggatggggagagctacagaatacgataaaaacatttggggagtcccaccccttcaccaagctcgtggttgatctgaaggacgtagaccccgatgtagcctattcctccatcccctatgagaagggctttgcgctactcttctaccttgaacagcttcttgggggaccagaggtgtttctaggattcttaaaggcttatgttaagaagttttcctaccaaagtgtaacgactgatgactggaagagcttcctatattcccactttaaagacaaggtggatcttctcaatcaagttgattggaacgcctggctctacgctccgggcctgcctcctgtcaagcccaattacgacgtgactctgacaaatgcttgcattgccttaagtcaaagatgggttactgccaaagaggaagatttaagctcattcagcatcgcagacctgaaggatctctcgtcccatcagctgaatgagttcctggcacaggtgcttcagaaggcacctcttcccttggggcacataaagcgaatgcaagaggtgtacaacttcaatgccattaacaattctgaaatacgattcagatggttacggctctgcattcaatcgaaatgggaggaagcaattcctttggccctaaagatggcaactgaacaaggaaggatgaaattcacacgtcctctattcaaggatctcgctgccttcgacaaatcccatgatcaagctgtccacacctaccaagagcatagagccagcatgcatcccgtaactgcaatgctggtggggagagatctgaaagtggattaaggaactgattgttgctgatttcagaaaattc

SEQ ID NO: 1282 - protein, 347 aa, Mus musculus
PRRPQQEDLQIQPEGSHTMLPDCFGCWSFRKQVIAHEISHSWTGNLVTNKTWDHFWLNEGHTVYLERHICGRLFGEKFRHFHALGGWGELQNTIKTFGESHPFTKLVVDLKDVDPDVAYSSIPYEKGFALLFYLEQLLGGPEVFLGFLKAYVKKFSYQSVTTDDWKSFKHFKDKVDLLNQVDWNAWLYAPGLPPVKPNYDVTLTNACIALSQRWVTAKEEDLSSFSIADLKDLSSHQLNEFLAQVLQKAPLPLGHIKRMQEVYNFNAINNSEIRFRWLRLCIQSKWEEAIPLALKMATEQGRMKFWLFKDLAAFDKSHDQAVHTYQEHRASMHPVTAMLVGRDLKVD

SEQ ID NO: 1283 - DNA, 54909 bp, Homo sapiens
tggggtggggtggggtgccagaaaggcatctgggaggagaccacttatgctattttacaaaattggcagaactttttctcgtgcttctttcattttggccttcccagctgcccaaaccttgggtttttgtttttttttttttttttttgagatggagccttgctctgtcaccaggctgtagtgcagcggtgcgatctcggctcactgcaatctctgcctcctgggttcaagtgattctcctgccttagcctcccaaatagctggaactacaggtgtgcgccaccacgcccggctaatttttatatttttagtagcgatgggttttcaccatgttggccaacatgctcctgatctcctgacctggtgatctgcccaccttggcctcccaaagtgctgggattacaggcatgagctgccgcacccagtcccaaaccttttcttgacacgcagaacagactggagatgtgactataaatatagaattcatgcgcatggctgcacaaggaagaagaaatttcacagaagatggagaaactggtcaggattgcctcaactatgttgtaaggtgaacattaaaaatgtggctaaaatcatttcttctatttgctcacacactgaagggaggaagagaagggtgtcacatgcaccttgttctcttagcaagggagattctactagactctagccagactggagggtggtggggggcagagtcctgaaggggaggaggagagccctgccaaggttgcgggaagagtgggagtgggaagggcatgcaggctcaaggaagggcaagagagtgcagagagcttgaacaccttggttcagcatggctgacgcagggtgtatcgagccactcaagtggaagctgcagagccccgtggggccagtggtagacactatgaagtccacaggaagtcagcaagggctgtttttgtttgtggtttgggattccagtgacctttattttttttcatatcaataaataaccttttgactgggaaatatattcacattaaaattcaaaaggcttacaagattattcagttgaaatatctacttttcacctctgttctttggccttccttctctgtccacacaggcaaacaataccatgagtttcttgagcatccctccagaagtattttatgtagatatgaacaaatttttagaataaattctcttccccctttttacacaaaacagtgagtcatccatagtcagaatttcatcaggctccctgaccacactgctcctttatttttccagatgtcacttgtcatccaagacacggacttccttggttttccttcttcatcgaggccattcctttccagtctccatagctagcgtctcttcttccccctgtgccatccacatgctgaactcccaaatgtgtatctccagcccagttccagcttttcttctggactcatactcatatgtccaactgcctactcagcacctccactcgaatcacagacacctcagattgaatatgtgaaagattgagttgggcacagtggctcacacctgtaatcccaccactttgagaggctgaggcaggaggatggtttgaggccaggagttcatgaccagcctgggcaacatagcaagaccgctgtctctaaataaataagtaaataaaattaaggggaaaaaaaggattggactcctgaatttaccctcgcccactccagtctgcttctcccacaatctctccttctcagctaatcctactacattttcctggtttatcaggtcaaaagtcttggcattatctttgactcctccctttccctcatactccatatctaaactgccaagaaatcctagtaggtctgccttcaaaatttatgctgaatttgatcacttcttactaattctactgctgattcctgggtccaagccaccatcatctctcacctgagaattgctgcagcgcctacttttattctctctccagtctgttttcctataataatcaccaataaaactctctaaatggaaaagaactacatgtttgtctttttttttttttttttttttttgagacggagtctcgctgtcgcccaggctggagtgtagtggctcgatctcagctcactgcagactccgccccccggggttcacgccattctcctgcctcagcctcccgagtagctgggactacaggcgcatgtttgtcttttaaagcaacaagggaagagggcaagaggatgcatgggcttgggagtttattttctctcctcctgtctacacctcctctaatctgtctcccatgctgccacagagaaatctttctaaaagacaagtaccgaccatgcatatcccagttaagactcgtcgacttcttgcagccttaaaggtaagttccaagctccttctcaaggcatgtgaggttctttcaagtcgagtccctgcctaccccttcaattcacctcccgggtctacccgacatgttctcactttgccaactactgcaggttgcgtcagggagttttctaggcagaatgtggagaaagcaaagaggagcaacatgtttctggagaaataacacaaaagcgaagaagtggagttgtgagataggctgatgtgaaggtgcagtccaaggacagagtgctttgggggaagaatgaagtatgagatgggaatggtaagcaggatcaagatcctgacagacctggtggccacagtaagactggtcatttatcaatcatgaacattgctgtggaccaatatatagaaataagtttgatttagctgagcatggtggctcacatctgtaatcccagtgttcttggaccaaagtgagggtcaggctgctgtttctcgtggcccaataatgagatgcaggtgaactggggaggaagcgagtttttatttctgtaaccggttacaggaatagggacctttatttttttctaaggagaaggcctggaaattatcaccagaccaactcaaaattacaaagttttccagagcttatataccttctaagctatatgtctatatgtaagtgtgcattcatctaaagacgtaggtgattaacttctttccgtctataactaaggtctgagtcttgaagaccttcctgtggagcgtcagtaaattaatctaaatgggtgcaggtgctggggtgattatccttatcttgtctcctgctaaatcatggaggtttggggagttccttcagactcccaataaacttgtttaatcatgctttaaggttcaggaaaggcctaggcaaaactcttggtgggcttttgttacattccagcctttgcataagggtactggattttaatatttaatttaaccactcagtcagtactgaaacagttgttatggaggcctgcgttagtggacctggcctgccataccagcactttctgggaggctgagatgggcacattgcttgagctcaggagctcgagaccagcctgggcaacatggcaaaaccctgtcactacaaacaaacaaacaaacaaactaaaaatacaaaaattagctcggcgtagtggcttgtgcctgtggtcccagctactcagaaggctcaggtggaggatcacttgcgcccaggaggcagaggtttcaatgatctgagatcgtgccactgcacttcagcctgggtaacaaagcaagaccctgtcaaaaaaaaaaaaaaagaaaaaaaaacaaaaagaaatgtttaatttaaaactaggggtttatggccaggcgcggtggctcacgcctgtaatcccagcactttgggaggctgaggcgggcggatcacgaggtcaggagattgagaccatcctggctaacacggtgaaaccccatctctattagaaatacaaaaaattagctgggcgtggtggcgggcgcctgcagtcccagctactcaggaggctgagacaggaaaatggcgtgaacccgggaggcggagcttgcagtgagccgagattgtgccactgcactccggcctgggcgacacagagagacttcgcctcaaaaacaacaacaactgggggtttatactactttgaagataataagctgagtgatttaacttggtgtaaagggggatacacatttctttttttgttttttttttaattgacataaaaagtgtatgtatttatggggtatagtgtgatgttttgatgcatgtagaggatacacatttctgtaaaaaagaggcaagaggcagagtttaatcaggagctagctagaccacatcagcaggcagagcaaagggaggaaaccattctgtttaaatggcaacatggtctcgaagagcacccaactgtggagtccagaggtactgctgcagtcttccatgtcatttctcagaaaattagggttctcaactcttacaaacatcaaatgccaaaataacaacaacaaaaaagtgaacttatacaagaaatgagactcatctttcattttaatataatttcagatttaaaaaatcataaaagcatacaaatataatattataatatactgtgaataactggttatttaaaaaaaatttgccaaagctttctttaaaaaaaaagcttacattcatcttttaatcccttggattgtatgccaaaaattctagtatttgaaaatgggccttaaatcaaaaaaggcagataatatcaactggcaatgttagtaagaccttgaaggattttaagcaggggagtgagatgattacattagaaagaatgctctagcagataacacaagcaagaaggaagaaagatctgtccacgataatgtggtggaaaaccaacagataagggcaagtatctggggcaaaactgataaactcacccaactgagaccaggagtcttagtaaagattgagttccctgtgaaggacagaaaacccaagataacactgtcttaaacaaagtagaaatttatttctttgagaaattcagagcagttcacatggggtttccatgatccccagagacctggctatttccagctcatggctccttctaccttgctgctccaccactctcagcacatggctccaacatcatgatacaacatggtagtcagagctctagccatcaatgtatcttatctacattccaggaaaagaatagagaaaaggttaaaaagaaaataaagttactgttaaggacacttcctgggagtcataattgacaattccacttacatgccattggacagaacttaatggtatggcctaactgcaaagaaggttgggaaatgtctacttccgggtggccatgtgtccagctaaacatggaaggttttactactaaggatgaaaagatatataggtattaggagacaactaatgatctctatcatgccagatgtataacctggagaggaaagaagaaaggcagattattgaggagtgtgtgagggcactgcattaacttgtaggactttgtaccttcagaattgttctttcccaaacacatctctacttctggccccacgccttgattcctgctaagtccacctgaaaaatctgcccacctcccactccccatgctcaatcctaccatttttcctattaatattcggctcatccttcaaatcccatctcaaatgctatgttaatcatgacgttattcttgactttctccaaagggatagaacttgtccctctagaatttcatgtatagtttttctagggccttagtctcctcttaacaccatgttgtcttaggtcattagtacagctgggtactagagtataaattatccaagaggtaagacagaaccttccccaattattttctaggtagcacagtgtagtagaatgcatctaataaatatctgcaaattacatcgactatttcaagaaaggaaaggtatatgtaaaggaaggggagaaaacaatgtaaagtctttttgcccttttaagggaagcatttgtgcaacaattgaaatttcccgtaaatgcatttcaaaacatatctttgctaatgttgccattcctttttagaggcctaatttggtgtgacttgttttgctgtacaaaccgtggttgcttctcacttcccaggttgtcctaaaagctcttgctaacacaacaaggaaaaataacattacagtggttaaaatagacaaaagccaacagcaataatcatattagctaacatgtaacaaatgcccaatctgtttcaatcacagtgccaagcagttcccatactttatctcatttcatcttttcaacaactgcacgggccacaggtgcctcaattatcctgaggggattgagggattaagtaacttttccaggtgaatagcagggctggaattcttcctgttcatatggctctataaatataggtattatttcttttcataatattttatatagatcatcttttcatctttaagtctcctttggtaactaaaccctgatattacccttcttttattattattattactattatttgtagagacagggattcaccacattgcccaggctgaactcaaactcctgggctcaagcaatctgcttgcctcagcttcccaaagtgctgggattaccggtgtgggccactgtgcccagccttacccttcttttatagatgcagtggaaagcctcattttttgaagcattctcaattccccattggatatcaataatactccaattgcttgtaaattgcaaattttgtacattctatatttggggtgagtggtatctcagaaaacaattcctactgtaatttattttttgatgaatatattaatggaggaatttatttgtggttgtgtgtggatatttttatttaaacacaagtggcataaactctgtgggttcctggtaatcaataatagaagatgatgataatgacgttcttattaaaacaaactatcctttctccatactagataaataagatgatttgactgtgtattatttgactaaatgaattctatgttatctattgtatttgtcaccctagatttggtgacctcaaaaaatgtttgcggctctgtgtggtggctcgtacctgtaatcccagcactttggaaggccaaggcaggtggatcccttgagctcagaagtttgagaccagcttgggcaacatgacaaaaccccatctctaaaaaaatataaaaattagccaggcgtggtggtgggcgcctgtagtcccagctacttggaggctgaggcacgagaatcgcttgagtccaggaggttgaatgtgcagttacccatgatcatgccactgtatccagcctgggcaacaggacatttgccaaaaaaatccgaaaatgcaaatgttgatgacaaattcttacaccctatgaattaggacctatgcatgtgtaaggtattagatttcatagtttgggattttttggttttattttgttttcctttggcttgcaggggccaacacaaggatatccagaaatatagcagttttttgttgttgttgctggagctaaatttcgtcacttttgatagagaattgaaccataccagcatgctaaacccatcaactatccctcacacctctgaaatctttactttcttcttctctacctttttgcctctgagtcgatccttctgcagaaactttcctcttctccagaagccctttcacctgtatatctaaacatgttaaagttttctcttgccttaaaaagcaaacattaaaaaaattctttctcggccgggcgcggtggctcacgcctgtaatcccagcactttgggaggccgaggtgggtggatcacgaggtcaggagatgcagaccatcctggctaacacggtgaaaccccgtctctgctaaaaatacacacacaaaaaattagtcggtcttggtgacgggcgcctgtagtccttggaggctcaggcaggagaacggtgtgaacccgggaggcggagcttgtgtgagccgagattgcgccactgcactccagcctaggcgacagagcgagactccgtctcaaaaaaaaaaaaaaaaaaagctttctcaatgctgcattcctctctagcttcccctttatcttcccttctcacattggccaagcaacttgacagtggtttatgcttcacctccctcttctcttcattgctcaatccactactctctggcttccatcttcaaccaaatcacgacagtcaacaaaatcaccaccttccccattctcaccccactgccaaatctagagaattttcacttcttacttcggtggtcctcgggactgcatctggcattgttggttggctctttctggtttatttcatgggtttctcttcctctagccctttttaaaacaataaattctggtgttctctcagcttccaacctgttttcattacccttctctttacacactcttcttgggttgagcttacccactgtcataatttcatccaccacgttatgtgacgtggtcatgtctacctggcacttccccagagctgtggacttaaatatccaagtgactcatggacatctccacttccactcccataggttctcaaatttcatatgtccaaaattgaatttagcatcttccccttaaatctgtctgatttagtttgaatatatgtccctaccaaatctcatgttgaattataatctccagtgttggaggtagggcctggtgggaggtgtttgggtcacgggggcagagccctcatggcctggtgctgtcctcgccacagtgtcttgtgggatctgattgtttaagtgtgtggcaccggcgccgcaatctcttgctcttgctcgggccatgtagaggcctgccccttcttcaccttctgccatgattgtaagcttcctgaggcctacctggaagcatactggagctatgcttcctgtacagcctgcgtaactgtaaaccaattaaaccccttttcttcccagtctcaggtatttatagcaatgcaagtacagcctaacatactgtcctcttcatatagactactacctctggttaatgactagccagccactgaagccgaaagcctgggccaccttcgtctcctctcaatctgtgaatccacttatctaagtattccttctattcattccttcctctctatcctaacttactacttacctatgtcaggcccccagcatcttctgattgagccattttaatagtttcctaaatctcctgctaatggttttgataccgcattttataacatgagtctgaccatgctttatcagtcgcctgctgaaaactcttcagtgggtcccccattaatgcacccaggattaaaaggccacctatttaaggtccttcgaaacctagcctcttccaatttttccagttttaattttgaggccccaccctaaaggcaaggcatccttcaatcctccttcacctgccacaaaggccccagagctgagctagatgtcccagctctgtactcccattgcgaccagtgcataacttttatagaaattcattagtttctaagatgggaatgttggctttctccgtttgagagatgcaggttctggggatatacataataaacactgaaactgacaaaacaactgtttaaaccttgaattacttacagctaaaaacaaaaaacaattactgtgcctccccgtcggggaatcgaaccccggtctcccgcgtgacaggcggggatactcaccactatactaacgaggaaccgcacgaaagaaagccttctgataggccttttctacgtttttgctccgccccgccctcgctatatgcaaacaccaatgaacctgattttcttacgtttgccaccacagcttccacgaaagttgaacagagccaaaatggtagtgttcagttttatctccccctccattctcatcatttcccttcggccacccttctaactgcccctactcccctcctcttcttcagctccaggagcacgcttggtccccctcaacatccctaacacacacgctcccaggtagccaagcgcccgcttgccgcgcggcaccatggaacttgtagttccttcacccatcccccaacgctcgtctgactttaagaaacttcctttcccggcgtgcaccgcgaatccctcctcctcttctttacctctctccctcctcctcaggttctctatcgacgagtctggtagctgagcgttgggctgtaggtcgctgtgctgtgtgatcccccagagccatgcccgagatagtggatacctgttcgttggcctctccggcttccgtctgccggaccaagcacctgcacctgcgctgcagcgtcgactttactcgccggacgctgaccgggactgctgctctcacggtccagtctcaggaggacaatctgcgcagcctggtacagtggggcgcctgcccagtgcccgcctctcccgggctccctgcccctcgaccctagtccttgcgggctcccggatctccggctcaccccgccgcggcccctgcctagccccacgtccccgtctgctcttctgtagcctccatccaactcatgttgtgcacttcagcccccagatctctcacagcaccccttctcaaccccgcttacgcctctgcatcccttccctcagcccccacttatacgtatgtctcctccgcccctcgcctggatcctctctccgaggtccctgggcacatccagcgcctcgtccactcctctcaactcacccagcccttaggtgtcatctttgcagtagcccccataattttagttcctggctctaattactccatggcctccccattgcttcggcctgcggcccagaacccccttcttcaggccccagacttttcccagccccctgggcaccttcctcagtcaacaatctcacccaagtctcagatcccatgtcctgtcgatccctgatcccacggttgcctcccgggaacacttatttcaatccacaggtctgcagggcaccacccatccgtctccctcctagttccctggatctccctgctagtcgttctcaagcctcttaggatttccagccccggccgggcaggcctcttctttccgccctactttgaaactaacagtccctgcttgctaactctaggcgcagctctctctcttcagggtcctttctactttttaatcttatcaactttcttctaataatttaagaacggatgggacgttcaaattttctaaggatgattcaatacgcttttttaatagttggttccaaggagccaagtagttatttcacttagaaaacacatacttctacaaactctataaccattggaatgaagaaaggttgtagattcatggaatattattcaatgattttatctgtatcataacctatatttaatgttcttgctcaaattgcccaatagtatttggtttatacctttcatctgaaggtacctttcacctgaagaatttcatagaagatcattttaaaaataagagggtcatgaaaagacagccaaattcggcttcttcaccagggcaggatgctacatgtgtattttacacagtgtagcatggtgaaatctactaaagcacatcaataagcaatcagatcagatcgggcagataagaattggtggctttcaggcctctttttcctacttgtgtaggaaggatctgaattttgatttcattaatatgaactaataagtacttactttcttactcttcatccctcaacattttgctaaactgattgatttgaaaaataggtcgattcctctatgtactgataggtaatcaacaaaagtaccataagaaagaaaattaagatattataagcaggaaggcatctatttccttgcagatcgcactttggtcttcttgaagtaccatgctatctttaattgcagtagcaactttgcctgggcagggctgaagtcctatttcaatgcagtttcaaaactaaacaccgcatgttctcactcataagtgagagttgaacaatgagaacacatggacacagggaggggaacatcacacaccagggcctgttgggggtaggggcctaggggagggatagcattaggagaaatacctaatgtagctgacgggttgatgggtgcagcaaaccaccatggcatgtgtatacttatgtaacaaacctgcacgttctgcacatgtaccccagaacttaaagtataataataaaaaaagaaaaaccacactgtgagactgccatatttgaacatgagtttatacgtcctacattcaaaagtactagagatttaaaaattaagcaattcaggacacttgtgttcagatgtgaataattgcaaaccaaaaccgaggtcgctagtggaagaaatttaaagaggtttttctaatatatgaacagcaaattcttccttgaatctttagctgcaacatatatttcagaagaaatattccaattggtttaagatataataaaaccttgactaagccccaaacccactcaaagctcttagttaactggaaagttcttgttcttcacctttatttaaaaaaattaaattataaactatgctgataaaagtaaaagaatgaaaatttttatagctttttgctgcttaatgtgacctcacacttacctttgttttgtaaaataaaaacttaaaaaatttattatttgaagttcaggtgtacttcaaatgtgcaggtttgttacataggtaaacttgtgtcatgagggtttgttgtacagattattttgtcacccaggtattaagcctagtacccattagttacttttcctgatcctttcccttctcctaccctccaccctccagtaagccccagtgtgtgttccccactgtgtatccatgtgttctcatcacttttgtagaataaaaactttatctctgttctataagtaagcaagagtcaggatgtttaaattttgaaaagaatgtcccaatctaaaaatctgctcattgtttttacattccccaaatctagagaaaagtaagattttaaaatagtgatttctggttggcatgtctgtttagcaaattagagcctggaattataataatgttacatgttatacaaggaaggcaatttatggtacaaaataacatgtttataattgtttgcttatttatgacaaaagccttagaccaggagcttatccttattaattagttaattagtatttatttaaagttaacttgtttctttcctccactagattgtggactcttgaatgtagagactgtgtttcataactctttgtatctcagcttcctagtatagtctatgtctggcatgtagaggacattcaaaagtttgattaatggatgatttcaattagaaaacagtgcctaagcttaacatgggctacattgataatagtgccagctgtatttcagaggtgagatgggaagacccagtgccagtgcggaatcaggagagacgtcatgtcttcttttcctctccgttcttagagtttgtgatgttgaggaatgctgaaggagacttaatcggacaaattctaagctttctaaaattcttttcaagttttgggttatttacactgaagtttgatcctccaaatttatgataactttcatacatttgtttcttttcactgaaaccttcagaaatgtttaggtgttcttttggttagtggctcaagaggttttagtgccatggccaaggcagaagccagcagttaacaataggtaattctgactgcaaaccatcttgttttcactaagtaaatgtctcaactgggaatcaaatcaaggtggttttttagttttagctttgtgtttcacacataaacctattttttttcatcatatccctgcacatagcaagtagaaaatgtaaatttagacatcataatgaggcataaagctttttttaaaaaaactctgctttgttctagaaaggactgagactgcttgaagcaacatatatagtataagattaaaaataattaaataatttgcaggaagagagaatagggataggagaaacaaaacccatggcataaagccctctatactttaaaagaagtgggccacagggttgacatggagcttcctaccagcctgtgcaaaaaaggaatcagatacctattccatgtcaactgaccagctactgagaagtacaactgctttttagggggatggagggtattgttcaaagaggatactgtgaaacatataaattatatcctataattagtagagctgttgatgcttaacacgtttcttaaaaagtactaaatccaacttgtcaacaatccagttttctttatttttctttcttattacagtttttgactattttttaaaaataacatcgctgaaatttgaaggggaattttaaaaagtagtttgcaaatgatagttgagacttaggacttgagataatacagcttaaacattgcattttttgttttctcttggtctaggacctgcttcatgcattaattgacacctagtgtttttgaggcagagtgctaaaccctgggaatacagacctaagtaacattctctgttttagaacccttagtctaatggaaaaagaaatcattataatgcagtacagtaagtattataggaaagggtagggccaagagctataacagacacaggggatatcaaaacgtttcacaaaaaatagttgtcactatgacacttctgattctgaacagatttggaaagtttagccaatatagaaaacagaatatgttccactgggaaatgacccagttaattcatctatataagcatgtgttataaacacaagatactcaaatcaagtttttaaaacaagttagctattctgaatagctattcagaactaggtactagactatgaagagactagagaggtactagaatatgaaggagtaaccctattattttaaataagatataaaccgtatcttctactaatttagagtaaggataacaaatgaggtacccccaaaagaaagtacccaggggcagctgggaaatggctggttcttggcctcacatgtagccaggtcagatttcagaaaaggaaaaaaataatgccagaggtagggagatctggtagaaagcagttctgccagtccagggcctgacctgggttagtagtggaaagaaaggaaaagtatgaagacattgtgaaagaacaacttttaagtggctgtgtggggttgggaaatgggatcaaaccttaggtaactggaagagttcttttaacagaatcaagaaatctggggagaaatctgattcagggagtataaaaatcatttttggaatttttagaagcctattcaatgtgtggtgctatgtcccatggaaatgttgagcaggcgattcgactgaggtcctggggagggaatacaactgtagaactagaatggcaggcatcttcacagagatactaattgaagatgtgggcatgagtaagagctagggagtgaaggatatggcaagaaaatcaaaggaccggggctggaacattgggacatatccatatttttgaattggaataaaggaggggaaaggaaaaaaacattagacaaatagagaaccatttatgatgtatgcgtacaggcaaagaagtgaaggaaggggttttaaccagatgacatagtccataagggctgtgagtagacagaggtcaaggttattggacagaaaagactttgttgatcggggtgggggctgccctttcaatagcaagaagccagatggaagaaggggaaagggaggatgattaatgaagaagtagaagtagtagtcatagcagtcaaaaactcccttggagtttaaggaaggaaggaggaaaactagaatatttagtgggtagatccatcaagtagaattttgtttatgttgttaggaaacagtcttgtggcataggaaggttcaagattctaggacaagagattagttgagagataattaaagagtatgatttgtagggctcaggattttggggatagaaaatactctgacacttgatgtcactccttcatgcccaaagcagttgtccttaattggccatggcaagtagatatggcctcccaatcctctgcagaatcatttggtctgagttaccataccaggttgggctttttctagatatacaaccacagtgatatacagtttgctgatttgcttaacgaacatgaagtttgaaagtacatgagttctaggaggaaatatattgtgtaatgtattgaggagccagagtgaaagaaacttaagttatagataaagtttttcataatagagaaaattttaggagtcagaagcaaacatattttgatttagatttgacttttacttaaagcccaaaatttgtgtgactgtcctagggttatttaacaatatatatgcaaatcttagaacccaaaaattttcaagatgcttagagtcccaaaaaatgagacctagactagcttttgactcttcaattcttctaatttcactctgtattttactctccataagcaactagttgttgtagcctatatctaatatgagttttttctggtaaatgaaactattttcttactatttaaaaatattaattttaggttttggatacaaaggaccttacaatagaaaaagtagtgatcaatggacaagaagtcaaatatgctcttggagaaagacaaagttacaagggatcgccaatggaaatctctcttcctatcgctttgagcaagtatgaatgttatgatctttctcttttacagctaaataatggggaaacatattcttaactaatttaaatattttttctttttaaattttagtttgtaaatatgtaatgattggtacactacttatcctgatcttctgttcagattaaagttgatacagcagttaaaattatatatacttaagatactaaaaatgttgtttgtatataatacaacaaggactttgggaactgttagtttctaaacgattcatccttttactaatatctagagtgatggtgggggcatgccatcataagaaggcatttcaagataacctgggcagctttacaagttgcaccctccttgcccttgccccagaggccagctgcatttattaatgggacaatgataatgccaaagatagaactgttacagtgcagcaatcttgggataagtgctttaaatgcattcttgtgtctaatccttacagtaaccctgctggtataatctacacttaaagatgaggaaagggaaccttagagaaataacttattcaagaaagtggcaaccagaattgtcacactgggagtatatgccacctcttgaggggaaagagggtgaaaactattggcctagaacaagggtgatctaccccagttgttcagaggccagtgttttcatgccttctctttccctttaagagaagggaaacacttaagtctagcttgtgaggtagatggtattcaccccattctacaaggaaactgtggcatagggaggtcaaataatttccccaagtttacagtaccagtaagtgatagagtcaggattcgaacaccagcagggctgctggtctctaaacctctgctgtttccttattatcagtgcttctcaaactctctggggtaaaggaccaatttctatcctcttcaatctgtcatagactgatacttttgtacaatgcaataaaaatgaaatatgaggaagaagagatgaaatacaagcacacattttttattattagattcaacagacaaaaatgactctaaaagttttgcaatgctgactctcaacttctggtcttgtcttgtcctgggccggtaacagtttgcagactagcactgctctgtgtcatgctgtggcacctgctgctgtggtagttgaagccccaaaaatgatttcttttactttttcactctaataaaatattaaatgatatcacagatgcaaagtacgtgacacacaacggggtagtcaaccactgttagttgccattaagccttcgctagcagttagcatgggagaggtaaaaggacccacaggctggcaattaggtaggaaaactgagaggagacttacccactgaggatgtggcatacctagagcttactgccaatcagtgatgagaatgcatactatgttatttatattattcagtgtatgtattatgagtttaaattttcactagatggaatcatactctactaatatatttatgtgtttcatacagaaatcaagaaattgttatagaaatttcttttgagacctctccaaaatcttctgctctccagtggctcactcctgaacagacttctgggaaggaacacccatatctctttagtcagtgccaggtaaaaaggattccagaatgatttctgatgcagaaaatttcagcacctatggttgaatgaagcaaaatgaacagtggttttatggattatgtaggttttacctaataaaatgtattaattgatcttatagaaacatataagatgaattatatattttcattttatctttcactattaatacactcatgccttactttaaataagaagcttctttcagtttggaaatatgtccacctagattggactctctaggcctgacttagaacttagcagagagtaggtactcagtaaatagtcataaaatgaaaggaaaaattaataaataatatgtactggttatgaaaaatgctaatagtaaagaaatggaaagtgaaagatttaatttccaaaccttttccagacaccattgcccagaggtaaccaccattgagtttggaatgtagcttttccatatttttcttacacatttacaaaagtatgtattatatcaatatattaactgtacctttaaaattgcatgacttaaactacttttgttttctgttttaaaactaagggtaaagagccatacaattagagataacctgtcacaaggataatacatttcaaactgtcttctgaaagaaaaaatacctacttttcatagtaatcaaataatttacaattaagggaactgacttcattaaacgtttgctctatttccaggcattgtgctagattctttacatgtttcatccctcccaatattcctgtgtgttaggttcaaatttcaatacaagtccatttaaaaaaggaattagcatatgaatcagacctgtttactttctatggccacttgaaacatctttttaatctaagaaaccctcagtttaataatctagaagagatgaaatgttctacgcaagagtgtacaaattgcacaatctgtatctcataaatatctgattttcaggcagtatgtcttaatagaatgtctattaaccaaagttggcaagaaatgcaagatttatgagtcatgaaaatgttaattttgaatatattattccatttcttattggcagcaatggtgggaatatgggaaacagatttcagctaaattaataaatgattgaggtgataggaatcatgtagacatgattttgtttgatgaatttgcttacggttgttctgtatgcatatttgcctgggtttggccttatccaatgaaatacatttaaaaacccctttggtgttgccatgtcacctaactagaaaccattaaggaactatagaggcatggtcttggaaatctattttgggagagagaaccaggtggctctgctagtcctacttaatccatctagaggtcatttgggagcctatatctttggagaattttctagaactgaaatgaaaagacctggagtttgggggttttaagaaagcttgtggtggaatgaagtatgtttaggatttgtaatagcttcagagaagggtgttaatatcagaattcctttgagtttagtagactgtctcaatgaggctgggttttcatttcattgttcaccagcagtagacagacttatttgtaaacagaccgggtataagattgtaggtgctcttttttttttttttttggagacagggtcttgctgtgttgcccaggctgtagtgcaatggtgcgaacttgggtcactgcagcctagaactcctgggctcaagcgatccttttacctcagcctcctgagtagctgggactacaggtgtgcaccaccatgcccagctaattttttttgtgtagaggtaaggtctcactatgttgcccaggctggtctcaaattctagagctcaagcaatcctctcatctgagcctcccaaagtgctgggattgcaggagtgagccacggcacctggcctgtggtcatactggatggaaccaatgttaataacgattggtgtggcagtacagaaacactttgcatatgatatgaatgaatatgtctagatggtattgaaagagactgttctttctcccttctttgcttctttgttttacttacaaggtttgctgcaagattgaagtgtcaggattacagcaacatttctcaggctgtgttcattagaatactgacatcccattaggtgttaaaccagagagaaatgggttttgtgttaacataaatgtaagaaatcaaacaggtttctttattgtaggtctgttcagagccttcaggcggctaatattctagtggctctgcaagacagtggtgcagtatgccatacttctcaggtctgttttgctacagagcccttttttctcaggtttctaaaagcttctcactgggcactactgtcacccagaccatagagtaggaaacactgcttaagagtttctccatgcttcaactgaaatgtgagggttaaccatagattaaaatggaaaatctgatttttaaaagtccaagaatctatttttggactttaaaagatcccaaaaggccaggcgtggtggctcacgcctgtaatccctgcactttgggaggccgaggtgggcagatcacctgaagttgggagttcgagaccagcctgatcaacatggagaaaccccatctctactcaaaatacaaaattagctgggcgtggtggtacatgcctgtaatcccagctactcgggaggttgaggcaggagaattgcttgaacccgggaggtggaggttgcagtgagccaagatcatgccattgaactccagcctgggcaacaagagtgaaactccgtctcaaaaaaaaaaaaaaaatcccaagaaatgaggactgtttttattttaatgtctaagaacaatgctgcaatttttaatgatttcttaatgacttatgcgaaagataaatagctatttcttcttgtttctccctttttcaggccatccactgcagagcaatccttccttgtcaggacactccttctgtgaaattaacctatactgcagaggtaaatattacgaattattaactcaattaaatgatgcatatcagtaaatatggtataaatgataagcagagatgataattgaattcctagagctagaattatttttcttaatgaaattctacctgaaatatgtaaacaaagaggctgtggcactcattctgaatctctactttaaaggcagttttaaacattttaactgtgaaaaaaaggaaatggaaaccaatctgacttttaaaaaggaattcagggctaggtgtggtggctcacacctgtaatcccagcactttgggaggccgagatgggtggatcacgaggtcaggagatcgagaccatcctggctaacatggtgaaaccccatctgtactaaaaaaaacacaaaaaattagccgggcatggtggcgggcacctgtagtcccagctactcggcaggctgaggcaggagaatggcatgaacccaggaggcagagcttggagtgagctgagatggcaccactgcactccagcctgggcgacagagccagactccgtctcaaaaaaaaaacccaaaaaacaaaaaaacaaacaaacaaaaagaagaaattcagaatcctggatctagaaataagaacttaggaacaatttttacttaacttttaaaaattgacatttgcatgatttaagtttctataaatgcattctgtagccatataagcctagtgggcatatattccagacttgtctgtatgcaattccaacttattcccttggtaggtactgctaatcctttttggaaaaggcggactgtaattactaaataatcactatcccggaggctagacctacttagaccaagcaaatagaatgaggaccaacccatatttatggggccttcttgcttcccaaatcatcccacaaccaaattacatctaggatagtgcagtgatatattatacttggaggcaaagaatcccagggctctggctcttctccaccacttaataactgcgtgaagtcccaactacttgggaggctgaggtgggaagatcacttgaactcagaagttcaaggccagcctgggcgacatagcgagaccccatttctaaaaaaataaataaataatgatgtgacacttgaacaagttttatgacctcgcaacctcagctggcacatatatataacgtatcaccacctaaatgaagggaggtggctgaaccgaattatttcctgaatagttttgtgctttagaatctacaattgttgtagcactggttcaggaacttctaattctgtgcctgcctcagtcacagctttgggtcctgagccatgcaagaagaacatgaaagtctagcccctactggaatatattcttgtttgatcattaatacttgggggagtcctttattctggcattcatcagaaatcaaactttcagaatcatggagctaggatacacagttaaatgactatatggtttgccgcataagggtcttttccgtatggatttccagagaaaattatttgacagtttttagcaataaattttagtttttcacagttactacttttaaaatgttcctctatttgtaactccaagtgtgtgttttcaaaacaaaattgttcaaaaccattctgtcctacagtgagtatataacgtccttttgaatctgttttgtgagtgtagcgggagcagggatggtggctgccattgccagggatggtgctgggctcttcacttatattatttattccttgcagcaagcctttgaagttttacacttacttgatggggaaactgaggctcgggggttatatttatttgcccaagtttgtgcagttagttattaggtggcagagctgggattttaatccagtttctaccaaaactctgctcttaatgtgcatgggtgaatggatagaaatttcacattcacttttaaagaagccagtttcccatattgctaattttatttacaaaactgatatgtatatgtgtatatatatactttttgtatatgtgttttatatatatacacatatatatgtgtgcatatatatacacatctatacacgttgtgttcatatatatgtgtgtgtatatatatactttttgtatatgtatatactttttgtgttcatagtctgtttattagatagtcaagaatgggaagaaaaggttattttacatatatggtttaagacacatagaagcttttatttatgactagaaatgatttttctccttgattaggtgtctgtccctaaagaactggtggcacttatgagtgctattcgtgatggagaaacacctgacccagaagacccaagcaggaaaatatacaaattcatccaaaaagtaagatcctagggtctagatttttgttttcattggcggtaaactacagttagcttgtacacatccagagggcaaaattacttttgaaatatttcagaattttgagaacagcttttggtttttgttttcttcatttttttttcttttgtgcttttaaagggttttgttctacttacagagtgttgtattgaagagagggtttgctgtagagacagaatagggagcatacctgttttcattttccctcactccagttcaggggctggcttcctgttcttttgagttcttacgcattcacctgccctggtactacagtgtgggcaagtggctgttgagagtgtttacaaatggaggagtcaagaccaaaaaagcactcagttacagtcctggtcattagacatgtatctttgaccttcagtgaacagaatgtgtatgcatgcgtgagtgtgtgtgtgtgtgtgtgtgtgtgtgtgtgtgtgttttcttaattgacctcacaatggataatttgacttccactgcagcttctgtggttccaagctcccataactttggcatctacttattgccgggtaactctgtgtgcctctacaacatgccaatagtgctttgaaacataaaggaataaaaaaagaaaaccaaaaccttttaaaagtcaggaggaaaaaggcaaacatatgggaaatgcgcttcctgtaggttactttttgagaaatgctcaaaatgcaccttttaatagtatgtgtgatcttgtttttcatgtgtgagaagcttttgttcctagcagaataaaaggcaaatagatgttttgaacaatgttttatatcacaattttaagctatatgttaaagatgagaactatttgagaagtataaaagcaaagttatccctactaatattaggagatttgaaagggaatttacttacttttaaatatgaattgtcttactgtgtaacatttgtgaacactaatgcaagcacgtggtgtgcgtttgtttgccctctttaggttccaataccctgctacctgattgctttagttgttggagctttagaaagcaggtgagcttttggaaaaattttcaggtttgtggaaagatcaaaacttaggcatcttgaacttctctcaaggttaattggtcaatcatttgcatatttctcaagatatcaagctgacagctctagaaaaattcaaatctaaaatgtaggcaacaaattaattttacatttaaaaatcttgaccagttaccccttattttttcaagtattgtaaaatgagcatgctcttacctttagagatctggattctcatgtaagcttgaacaagtcactctcaatctctgtttccttatccttgaaattataatgtctgactttctacctcatagggtggttatgtgaaacaaatgagataaaatatattaaagaacttggaagcctacaaatattacagaaatgtaagatattttatcaatattttacaaataaagtgcccttccttcttaattttttgttcattcttagttttaagcacacttaactgtttttaagtgtgcggttcagtagtgttaagtatatccacattgttgtgaaacagatcttcagaaatttttcattttgcagaactgaaactctgcaccaattaaacaatagctcctctttcccccaccgcccagtccttggtaacacccattctattttctgttcctatgaatttgattactttagatacctcacataagtagaatcatacagtatgattttatctctttgtgtctggcttatttcattcaaggtgtcataatgcccttaaggtttatccacgttatagcatctgacaggatttccttcattttctatttgtttcttcttatataagagtattcaacctttaagtgcatgacaaagtttatacccattcctgttctagaatagtcttacaggctgggctctgtggctcatgcctgtaatcccgtcactttgggaggccaaagtgggaggatcgcttgagcccaggagttcaagaccaggccgggcaacataagtgagatcatgtctctacaaaaaaataaaaaattaatcgggcatggtagtgtatgcctgtagtcccagctactcagaaggctgaggtgggagtattgcttgagcccaggaggtggaggctgcagtgagctgtgatggcccctctgtactcagcctgggcaacagaatgagaccctgtatatttaaaaaaaaaaaaaaaaaaaacgctgggcgtggtggctcacgcctgtaatcccagcaatttgggtggccgaggcaggcggatcatgaggtcagggaattgagaccatcctggctaacacagtgaaaccctgtctctactaaaaatacaaaaaaaagaaaaaattagctgggcgtggtggcgggcacctgtagtcccagctactagggaggctgaggcaggagaatggtgtgaacctgggaggtggagcttgcagtgagccaagatcgtgccactgcactccagcctgggtgacagagcgagactccgtctcaaaaaaaaaaaaaaaaaaaaaaaatagtttcttatgagttgtgactgggtttctatagttgtgaaattgagggatgaaatgagaccctcaagaggtcttacaagaggcaataaactaattggggacaccttatgtcttggtttttttcctttggcccagcctgtacctccttagagagctgcatatctattgctgcatatacaacagcaggtttgcagctcacgccatgtaacctcatccctttcccataggcacatggtaaatgcactctcactgtaaaggtttgtctacaagacattaactactttttagaaccagatgaatcatttgccatgaatttcttttttattaagctttttaatcttgcaggcaaattggcccaagaactttggtgtggtctgagaaagagcaggtggaaaagtctgcttatgagttttctgaggttggtcatttagttatcctttgtaatcattgtgatagacagtagattgaagattttgagtgtgaaatgtgatggttttaagtgatacggggaaagaaccagattgtcttttatgtagatgtgtagttgctacattctttttatcattttcatttaacataaaaatcattaacttgtaaccttcatagaaagcaatatacaattttaagaaatgtacaatggtgataattaaggcatacagacatatatatgttgatttttcagactgaatctatgcttaaaatagcagaagatctgggaggaccgtatgtatggggacagtatgacctattggtcctgccaccatccttcccttatggtggcatggagaatccttgccttacttttgtaactcctactctactggtaagtgtaaatgtttcttcatttgaaattgacgtttcaaaaataaacttaagaaccttaggagtcctaataatatgtatatatatgtaaagaaccttagagtcctaataatgtatatatgtataaaaatcttttctcttgttcgtgtaacctttgtttctaattttattgtttattgtggttatcacaatctcattttttttttgttgttttttgagacacaggcttgctctgttgcccaggttggagtgcagtggcacaatctcagctcactgcaacctctgcccccgggttcaagcgattctcctgcctcagcctcttgagtagctgggactataggtgcacaccaccatgcccagctaatttttgtaattttagtagagatggggtttcactatattggccagggtagtctcgatcctctgacctcgtgatccacctgccttggcctcccaaagtgctgggattacaggcatgaaccaccccaccaggcctccatcttgtttttgaaaggaaaataatcaggccatttggagaaggagaatattatgttcacggtatttggggagttgggcatgggggtgctgtgtaacaacaattcattgataaattatgtatccagacaatcagactataccaattacacttggtgtgtaggtacaattaaaaaaaaaatcagtacaccatgtacaggaaaggattagggccatagaacgctgctatgtttaatatgcctgtgagctactttaaattcttcttagaaccaaaatgagtgatggattagcaataaaataaataaaatacagcacaggacacataggacactctaaagttttattaaatatattttgggtaataggagagaaagaaagtgatgggtaaataagagcagatataaaaatggaagtagaagaaatgtttcatggaagttagacacaaatagactggctttcattgtattgcaaaaattccctagaattagggcaagaaagaatgatgctaatttttagttctgtattttttttgttttttcaattaaggtctcttttaccttctttgaagtgctgtagtagaaatacagtggatcaccagtgccagtatgctaagtatttaggtaggcagtcttttagatagtctgtaattcgattactaaaatactaaggtaattttctttttttgtaggcaggcgacaagtcactctccaatgtaagttaaactttttcattatggccttaccttcaagaagtattacgtcaactgattttaaaatatcccttgtatttttatgttaaagatatggttataatggacaatttggggactcttctcacattattaacaattagatgtaatagatttaaggaaattttatggtttgatctcttcatatatttatgaaatatttttaatgcagtgatatatctatttaatattttctaagtaatttttgttttctaattactttatgccatatttgtgtgtgtgtgtatgtctttggttaaattaaagattttgctgaactgagtaactccctgaatatctcagctaatattttttaaaaattgaataacatggagtgtttacagtagaatgggttattttaggttaagataatcagtcttactattaatcacactgttttctttaggtcattgcacatgaaatatctcatagctggacagggaatctagtgaccaacaaaacttgggatcacttttggtaagatttttgttattatttctttattggttcatgttgctgatttttttttccctgcctcctaccactctgaattgttttgtgtgtatctcttgtttttctttgttatcatctcttaggtaggcaaggattttttttttttttgacatggagtctcactctgtcactcaggctagagtgcagtggtgcgatctagctcactgcaagctctgcctcccaggttcaagtgattcttctgtctcagcctcccgagtagctgggattacaggcatgcgccaccacgcccagctaattttttgtattttagtagagatggggtttcaccgtgttgcccaggctggtctcgaactcctgagctcaggcaatccacccaccttggcctcccaaagtgctaggattacaggtgtgagccaccatgcccagctattttttttttttaattggagacaaggtctcactctgtggcccaggctgtagtgcagtggtgcaatctctgctaactgcaactccagggttgcaatcctccctcctcagcctccaaagtggctgagactaaaggcgcatgccactatgcctggctaatttttgtattttttatagagatgggatttcaccatgtcgcccagactggtctcaaactcctgagctcaagtgatccgcccacctcggcctcccaaagtgctgagattataggcataagccgccacgcccagccaacaaggattttttttttttttttttttttgagatggagtctcactctgtcgcccaggctggtgtgcagtagtgtgatctctctgcctctcagttcaagcaattcttgtgccttagcctcccgagtatctgggactacaggtgcacgccaccatgctcagctcatttttgtatttttagtagagacggggtttcaccatgttggccaggctggtcttgaactcctgacctcagataattctcccgcctcggcctcccaaagtgctaggattacaggcgtgggccaccatgcccggccaacaaggatagttcttaaaaattctgtaacacttattacagcgttaggagtgttaggttcagtctaggtgttaagtttaattcctgatatactcccacttttaacatagggacatgcaagagcagaagcagggcttaactttccctgctgccatctgctgggctgggcttcccattgctctggattgactgcctgggagccagagtcggcttagactgtagtggtcatgccttacaactgctttcctctgtagaaaagccaaaaagaaaatatcttgattgaaatgtcttttcttctcagctgtgtccgtgtttttattaaaatatttttttttcaggttaaatgagggacatactgtgtacttggaacgccacatttgcggacgattgtttggtgaaaagttcagacattttaatgctctgggaggatggggagaactacagaattcggtaaaggagtcaaagttttaaaaaccttcatccaaagttgtataggtgttaaaaactgagtttttataaaagcgtctttactgtgtagcaaccaaaaagtcatttttacaagtgtggaaagtgaagtcaatgctggtataacactgtgttgatccacaccgttcactgttctatgtaaggtagttttgatgacctggtctaaatagggagctgtgggacctcactgggtctttgctattaatatagctgtttactatgtttgcatcttatttggtatgtcatttttaagtgttgtctcctgaaagccaaatttgctgaccaggcattaaatcatttttctagtctttttataagaataaagcctgtattattgagcaagaaacaacagagaatattacttaagtaagcattctattaatagacttccagaagtttatgccaacatatcctagtgttccagtctccaagttttagattcccctaaagttacaccactgagtgaagtaatacctccttattagcttatttgcgtggtgatagcagtctttctatatgtttctccatgttatttcatgtcttgcaggtaaagacatttggggagacacatcctttcaccaaacttgtggttgatctgacagatatagaccctgatgtagcttattcttcagttccctatgagaagggctttgctttacttttttaccttgaacaactgcttggaggaccaggtaagtagttggtattttatgattttttttttctttttgagggtaatgtgagaattaggaagaattgtaaactattgttttgttccatttaatacttccaattcattctggatgtagctgctgaagaaatctgtattgttttctgagttacctctcaacttaaaaccattaataacccctaaggtttaaattatgctgcttcattttttaaaaaatctcatcagtttttgaaattaggataatagtgtgtattccctgaaaacatttctatggtacagaagtttataagagtaacaagtgagagtccatcaacccctttccactccccaggggtaaccactgttagcagtttggtgtaaatggctccagatcattttctaggtgtaaattaacaagcagacaaataaatacatgtaattattttaattacaaaaaatgggtcatgctatatattggctctgcatttgtgttttgttttgctcgatatttcacatacacccttctgtgtcagtacatataaatctgtttcatactttttaatgccatcatactagttcatgataaagctatgctgagttatgtacccatcccccactgatggacattgaggtgttctccttggttgattgacttggaaggctgtctgtcacctggatccattctgcctgtccagtcttatttttctcctttctagtcatgtgaaggttattgcttttagaacttgggttatgcattccttttctgtgtcttcatgtgttatccccttacctataattagaatttctcttctcccttccactgaattacatatattcttcaaggcccaacttaagtcccacctccttttttgaacattctttcactctgaaagtcctcgtagatttccctattctctgaatgttctctgttctctgtggttaatagtacaatgccaaacacgcacacaaaatgtcaaataattacctttctatgaattgatttcttttcttttttactcttagagattttcctaggattcttaaaagcttatgttgagaagttttcctataagagcataactactgatgactggaaggatttcctgtattcctattttaaagataaggttggatttaaaaaccttttctatttttcatgctcgatatatctctatttattgactgattaggttaacttgtattatctaatagtagtattggttcagaactttaggactcaacctctcattgcatattttttctattttaaatgtgatcttaaccacatgaactacctgtagaattttcctatttcagagaagtcatcaatagtatggtgatgaatataaattttagaagatagagttagatgaggtaatggatatattagcttgacttagtccacattgagtacatatatcaaaacatcgcattgtgtcacataagtatacacaattatgatctatcaatttaaaatattaatttttaaaaaagatttagaaattatcttgatatagcagattagacaaaattatatatctaaggacttacaagtttaaatttttttttgacaggaaagggcattctattgtaaactgtgaattcttactattcataggttgatgttctcaatcaagttgattggaatgcctggctctactctcctggactgcctcccataaagcccaagtaagtacttgcctgctaatgctttccttctcattctcctaactcctagagagcctcaaaatatctgaaagaatagtatgccttcctgaaactgttactagtaaatgatgaaagcagagttcttaggtgttttggccttaaccctgaggccaaaagaataatttctgcagtttacaaatatggtttttcacttcaagtaattgagtgcctcctttctgcacaaggatggtgagggatttagacaataagctattgtatcttccttcaaacttctgcaataaaaatattttataagtattatgttaattacaacactgttataagttattatccccatttcccaaggaggtaagttaggtttagctaggtaaagtgtcttgccctaggttgcacagctagtgagtagtaaaagttgagattcaaaccctggcagtcttattgcctccaatatactgctttcttccttctttttttttagaaacagggtctcactctgtggctcagcctggcgtgcagtgatgtgatcttagctcactgcaccctctgccttccaggctcaagtgatcctcctacctcagccttacaagtagctgggaccacagatgcgcactaccacacccggctgtttttgtacttttgctagaggcagggtttcaccatattgcccaggctggtctcgaactcctgagctcaaacaatccacctgcctttgtctcccagagtgttgggattacaggcgtgagccaccgtgcccggcctcaatatactgctttttatactgaaccccctccttcaatcggacctgaaccctggtctttcacgagttgtgtgaggacactgaccatggcatgttccatggcatgttctcttgttgcctttcttttggatcaccaaaattgcctaccagcttctcttacactaaacaggccagtttaattgatgttcagggagcagcaggagagaagctaagaaacaagatgaggcctggtcatgtttgtttgtaaagcactttaaacagccaggccgagaagtgtttggttgagaagttactgggagttctgagtatggaacaaatgtggtcagagcgccccactaactgggcagtcctggttatcataggctgtggtgggaaacaggagctcaggtagggaggggtgattacgatagaatgtttcgaattttgtgttggaaacaggtggcacaaatcatcagtaaacccttttaacgtctaaaaaaggtatcagcaaaaataatactttagatttttttcctagcacttcattaagaagtgccatacattatctcgttaatttttacaacagccttgctagagattatgaggacctgaagtcatacaaaggcagtggaaaagaaaggagtaactgagagaagagacgtttgggggctagaatctattggcaactgattggctgtggtgagaaaagaagaaattaaaaatgactgagcagagatgtaataaagattcagctcaatccagcacacatttattgtcaggcactaatatgatgaataaggaactcacagagcaaatatgtatgtatcaagtaattataatacaatgaaaagtattttttttaaaatattaagtgttgtgggtgaggaaactattaattttaatggtgatggatttggacatcgtcttggagatgacttacaaaggagaatacaagaagtaaactgtagaaccttagaggatcttcattttagagctaggacagaggaaaggtagcaaaataaatggaaaactaaaaagatttcaaaggttcattgttaagaaagctgtgggaagaaataatttaaaagtggtacggagagtggtcagcagtctggtgtgctgtagaattatgaggagcctgagaataaaagcatagaatttggagtttggagtctttcaaagactctaacttcaggggcctgatatagccaaaagacagttccaggaagtttaggagtggagaaggctttgcccattgcttttaaaattggggaaatctgggtggaaaattagttcttcaaaagtgtttctttgatatcaccgctgctaagggatcctttttgggcgttggttcattctagatcccttaagattgctttcaagtaataccaaagtgctggaggaaccctggaatcattcgtgtgcccgggaattctgtaaagagagagtatcttagaaaatctcaaaccacagaaaatactttgatccattgcagcacagaatcttggcttccacgatcctctttttataatgctctcatcatttgtatatgtatttaaatatctgagtctatccacatctctccatttctactaccactgtccaagttcagtatcacatcttcacatcctggaagactgttctggcacccaaactgtgcacttgtatctgttctgacttctcccagccactctccacactaaagctagagtaaacctttaaaagcacaaatgtgtcatgttgtcctcctgcttagcagtctccactggtatctctttgctcttgggctaagacaaaatcctttagtggggattataagctcctaacactctagctccctttgcttcagtcacactggcagttttggagtttctcgaactccccatatgtcctccaacatagtacctgagcatgctgttttctctacccggagccctttgcccagttaattccaatctcagctcaagaaccacttcctcttggaagcatttcttgacatccctggccaggtcaaatctcccattctagggctttttagtgctatatcctctcttcgtagcagttgcacagttctaactttacatttatttattcgtatgattaaagtatttcctcttcgctatactgtcagcaccatgagaacaaggcacatatctggttttgctctttacttttctgaagactttgccataagtagggtcctttcccaggctaattcttaacttagtacttttaattacactaataaggaagtttcaggacacgaagaaacagaccagctaaaggttttctactttgctattattttttaagaaatcaatgctaataatgttttggttgaaagcagtgtattctgatcagtcaaggacctctgatcccacctgttcttgaagacaaaatggcatgcctgcagtccacagcctgacacttcatgtaataaactggcagctgcttcgaggtgggagctgtgttgacctttttattgtctcccctagggaacaaacggagtcccagtcacaactctctttaagggagattcagtggtaacttctaatcaaaacttacttcatttaggctctaaggggcaggtgcctctctgttccctaatacaagcatttcagtacaagcaagcatgatttacggagaaagagggatgttttgcaagaattttgcacacactacatgttctttcccattgttgcaaaatatgatttctaagttgagaacacacaaatattggtataatttgcttaacaattaccatgtgttaatttcattttcttctaaaaaggaatgaaatcatcaggcaatggtatcgggctctctcaagggtctagcatctagaacggtgccaattatgtagcaggtgcttgcaggtttgttagatgattagatgtttggaacaaccaagtaaaatccatgacagcaaggacttgatgttgttcatcttgttgtcttgagtgcctagaactgttcctgccatgtactaaatatgctcaactgattccaactactttagcatatactactcgagcacatgacagtcttttgctgaggtgctttggcattctttctaaaagatagatgggtgtttcattaatgtggtatccatttgggtttgtgagttcttggatgatgccagtagtatgtaagttaggtaaaatatttcctattttcctcactttggagtttgttttccttatttaaaagggactttgaaatttaagtatgtactgtagctttaaaactgcatttctgcaaaagcacgtgcatttttaaacaatgtaatctttatctttgcagttatgatatgactctgacaaatgcttgtattgccttaagtcaaagatggattactgtaagtaataatgtgtgatttttgattcctttttgaattgtgcaaatatgtctttactcatgaagcagggagggtactttaaatcacaaacagttatatttggaaaggctatttgaaagtcaggtttatctaaggtgatattatatctactctcaatatagaaaattaagggtttgagacagggtcttgctctgttgcccaggctggactacagtggcgtgatcatggctcattgcagcctcaacctcctgggctcagtcagttgtcccacctcagcctcccgagtaactgggactacaggcatgtgcctccatgcctggctaatttaaaactttttatacaaacagggtctgtgttgtacaggctggtctcaaactcctggtctccagtgatcctcccaccttagcctcccaaagtgctggaattacaggcatcaggcatgagccactgtgcccagcctagaaaattaagttttatggggggaaaaattgatgttgaaggcattaatcctgatttttcttgcttcttaactcttaaaaaaaaaaagtatgcaaaaatatttgcatcttacctttcttcttttccttttaaatcatttataagatactgcttccaatatggcaatttcacataccaggtaaatctaaaatgatcttgggtgaccagctgctgactattagtggtgcaaagaatcgaagcacttttgctctttgttcactttctatgaagcttcttaaagaggagcttcttcatatatgtactaaaatagaaccctttactgaagccaaagtaaggatgagcccttgataattctttaatgaaaaataacagaagatttaggaatacttttattcctattaatttgcaacagatttatcatttttttacgtaatttcaacttttaagttcaggggacacatgtgcaggtttgttacacgtgcatattgtgtgatgctaaggtttggggtatgattgatcccatcacccaggtactgagcacagtacccagtagtttttcaacccttgccccactcctagtagtgcccagtatctattgttgccacttttatgtccatgaatatacagtcgtttagctctcacttgtgagaacatgctgtatttggttttctgttcctgtgttaattcacttaggataatggcctccagctgtgcaatcagttcagctattgccttttaaaacctgttttgtgtagttgacaaacttgtcatgaagaaaagtataagagatttctatgggaaacaggattttttaacagtgtgagtgtattaaaattctctgttttagtttgaaaaatgtattccagcttatttggtgctagttaaaactgctactaatttctgctcaaatattcctttgggcccagcagttaaggtggataatgatcaactcttcaatattagtagaaacaggcattgttaggaacagattcaggacactgtattcactaatgcactcttttccttatgtattttatttctcaatgatttgtcttaaatagtaaataaatgcaaaagaatatttataacatattcatatggtgtataaaacaattgtgtgacccaccactagcataagaagtaaaatcttagcggtacctctgtagcatccctccccatcttatgcccctctccaccctccttgctgacccatccaggttaccattgtcctgaattttggtttatcattctcttgctttttatgtttttaccacataaatatatccttaattaatatatagtttagatttgcaggtttttgcacagaaaatgagctggagctgtaagttctcatattaaggataagttgtaaagggaaaagaagtattgctattaaagagagttctgaagagggggaagatgcaaaatatttatttaaaagggtatatacctatgcattaaatttagtggaaggatatacagaaactactaatattagttactgaggagtagtacttggagacagggagcagatccaaaagaatttttccttctgtcctatttgattttttagtatttgcatatatttcttttaaagtaacaaaagccctagtttaaaagattataaaagtagttctaaaagatttaaaaatccttatttttataagctttatttaatattgcttaatcatcttctcaaagatttttgagagtaaatccaaatttgaaaagtgcagactcatttttatttttcttagatggtttctaagattaagtggggaaaacagaatatgtggggatggaggaaaacattagtttatggccttaccaatttattaatgtaatatttaaaaatatacgatttcattctttacctttttgaattggtctatagattagttgacatgcatacattttgaaatgtttctttgctttggaaatttctatacctcgaatggtacaatgaatgtcaacagtttcttccactcttcctacccataatctactttttcttaagtaatatagattctaggagtcatatcagctatttaaattacagtaactcaatctcaggattatttaagtaactcaggcttaaatttattttgaataatcttgttcattcatatggttctttttctcaatttttacttttatgtcagataaaccaataagtattattaaattgtacttgaacaaaaataactaggtaacatttatttcaggccaaagaagatgatttaaattcattcaatgccacagacctgaaggatctctcttctcatcaattgaatgagtttttagcacagacgctccagagggtaagtactagctcaaaatcttagaaattaaaatggacagaaaggcacagcatttatgttctacccaacttggcaaaagattattaatgtggaaactaatggggaaaaaatcatttataaaatttattcatttctttaaaaaagcattgaatgcttactgtgttttatattgtgctaaatatgaaaatatgtaagaaaggatataccttatcttcaaatagcgtataatctagtaggaaggggaacacatgcaaaatttagcaataagccaggcacggtggctcacatctgtaatcccagcactttgggaggccgaggcaagcagatcacttgaagtcaggagttcgagaccagcctggccaacatgatgaaatctcgtctctactaaaaatataaaaattagccgggcatggtggcaggtgcctgtaatcccagctactcaggaggctgaggcaggagaatcacttggactgggaggcggaggttgcagtgagccgagatcacacccctgtactccagcctgagcaacagagtgaaactccatctcataaaaaaatttttttaaaaacattagcaataaaaggaggcatactttaggtatcatttggaaaaacttaattagtgaaagactcttccaactgggggcatcagagagggaattttggaggagacttgctttgcacccccagggctagcagggaggtagaaattgaaggtggagggagcagcaagggctggaattcgtctgcagcattgctggagtaaacagtagcactgggtaaggaagtcagtgaaggtaacactagaaaagctggtaggaccagatgtgatgactctcaatgctaagctaagaaattttagatcttacactgatcagtaggaaaagattttaaaaatccagcagaagagtcgggatgaaatgctgggttgtagaaaactaatctggggccatgaaggttgcatggtggtgaagttactagttgggagactggcaggagtaccggacttgagggagtaagttgcggggagaggagagaacaggacgtgagaaagagtttacacagggtgaaagcacagagctctgtgactgactggctataggggttgacagtaaagaatccaagcagattttaaggtttcgaatctaggcaattgaaagaatagatgaaaccgaaaggagttgctgcattttgagataaaccaatgactggattttaaagacttccatgaaagggaagtcttcagtctaaggaccttgagaaggaagaagatttggagcggaattttctgtggaattgatgcaaaaattaggaataggattttgacgcaacaaaggacccatcaaagagagaatctatttttagtgcatcgggtcatcatggtttcataaattgctctaccactggtgggtggtctagggccacagagagagagaacatggtagggtgattctggaatgggtatagcaaaacttagggcaagtcagggagccttggagatgaccttaaccagttggtctaccagggtagacttggagttgcatgtgtccataaggggctaatggactaaattattagcgacaggattagtagttcatgaaagcagagattggttagtgagtgtggagtcctgtaaggtaaggaggtcgtggttggaggggagagttatcatctacctagaggcacctctgcctctcacaggcactacaaactctctgcttgtccaaactgaactcatcttttttctttccttcacccaaacttgtcctcccttttagggtgagttaaggtagggataggatgcttataaaccccctgaaattgtatacagaagtttgtattcatgtagtaagtgtattttccccctagggaaagagtccacattattcatcagattcccaaagagatctataatacaaacatttaagaactgctattatgtaggtatgcagataatttaacagggatttcagaggaaatatacaaagataaagctagggggaatcaggcaaaaattaaggaactatgatttcatctggagaatggaattgcatttaagatatataagttatagagaataactagaaaaactctaggaaaagtctgaaagataatatttatacatgctaaaaagtctaagaagagcaattctcatttaatgctgaatacttcacaaagtaaattatccctgtgctcccagtagaatatcctcatctggaataagtttgcacagaatttacttagtgtgcaatttgtttcttttatttttatctgacttatttctatattataaaatatttaggattttaatctggctatgcatttctctccagctcctttcttccaaggaatcctgttgaaatgatacggtatacttctttattttgctcttaggcacctcttccattggggcacataaagcgaatgcaagaggtgtacaacttcaatgccattaacaattctgaaatacgattcaggtacatcattttaacttgtctctgtggaagaaagcagaaaactaaactcctttgaaagatggagaaagggaatgcagagtatgagacatacttgagtcttgagaattccttgtcaaactgactgcttctatataaatacttatagtggtatttaaggaatagttgcaatatgtaatctggtagtattaatctttttgttagactttgctctaaacctctcttgccttaaaagaaaaaaaaaaaattagaatgaaggattccgtggtaaataggctttctccacaaccaactaaatctactttgaaatgggaatagttagaaatattttattctattatatgttaatctttcttaattcaaatttgtaatgtgaggcttaaaccaaagtttaattccttcagaaattgcatgtataaggtatgtgagcacctacctgatctttcttaattcaaatttgtaatgtgaggcttaaaccaaagtttaattccttcagaaattggatttataaggtatgtgagcacctacctgatccagacctttaaaaatatatgatctttttcaagaaccagctcctcttctttctcttcaccaattattaaattgtatatataaggatttgagagtctcagaatcaagacataccataaagtggtgtacagtataactatagtggggttattcatatcactacagaagtaatattaagatatacctgtcatatcctgccccttcctcattttctactccatgctccccccaaatcctccttttagatggctgcggctctgcattcaatccaagtgggaggacgcaattcctttggcgctaaagatggcaactgaacaaggaagaatgaagtttacccggcccttattcaagtaagaacccactcagaccgtactttgaattcatctaagaaacaggaagaaaactgtcaaatatttaaacgtaatctatatgacaatattttttaatttgttaaagtttatcagtataattttggaatagggattcacacttataaatatttaaaatgtgaaataatttcattcctctttttagaagcattatatatggattactattttggatcaaatagagttagatactgataaaatagaaataaatcaaagatagccttatatacacaaagatttttaaaggtaactagaagataattggtgggtaggtatagacaagaaagagagtctgaagttaaatgtaaggagaaataagcagataaagctaactcttttgtgttcaaatgttgcatagaggtcaagggtaggttgcttgacataataaaggaatgcttagtgagagggggataagttgtatcttgacagcaagatacaagaatatctcagtcaaggtctttatgaattttgtccaaattctggaaaaaaaaatcatgccataaatatccatgattacttttgtttgcttttcatttacttcacaagtatttaggtgggtgcaaaagtaattgcagttttggccatcaaaagtgatggccatataatatcataaaacttggcaaaataagtcattatctcttttttgatgtgaccacaaaattaagttttaagtatattttatatgctttccctaattaaaacccatctagctttgaattgagtaaagtatactttaaataggtttttaaataagagtatacttgggccgggcgcggtggctcacgcctgtaatcccagcactttgggaggccaaggcaggcagatcacgaggtcaggagtttgagaccagcctggctaacatagtgaaaccctgtctgtactaaaaatacaaaaaattagccaggtgtggtggtaggcacctgtaatcctagctacttgggaggctgaggcaggagaatcgcttgaacccgggaggcagaggttgcagtgagctgagattgcgccattgctctccagctcctccagcccgggtgacagtgcgagactctgtctcaaaaaaaaaaaatgaataaaataaataagagtataccttttgtgggaaaaataagtatttctgttttatgatgtttatagtagttacattaaaaatgactaatcctaccttttgtatggtaggtcctttttatttagtgtatttattatttatttcgtgtattatttattatgtatttattatttcactgtggtcaggacttttattctcaattatttgaagttttcagaaattctatataaattttagtgttttcatactcttaaaatcttgattaaaaaattttttttaaaagcagtttttaaaaagaaaggctttgaggctcactctcacatacagggctgatatttagccaggagatgagaggactctgttcaaataataaaatccttccatgctgcttggtaaatagccacgggtcccagccactctagcccttccctgtaacttgctgcaaaatgtctgatctgccagtataaaggccagtctctggtacagaaggaggtctctgggaccctgtggcaggaccatacccatctgattggctgggactggtgccttatttgggtgatgctggctgtcacccctgctgacatcctttaatttaatcttgggtattgacttgtgttcttattctctttctccttcctttttcctttcctctgaaccccttccctcctttctttcttctctccctccctttctcctcctctgtctccttctcgcctttctttcttttcaattttttcttttttggcagggatcttgctgcctttgacaaatcccatgatcaagctgtccgaacctaccaagagcacaaagcaagcatgcatcccgtgactgcaatgctggtggggaaagacttaaaagtggattaaagacctgcgtattgatgattttagagatttctcttttttaaatggaattcgtaaagaaatataaaacttcagctcacaattaaaactgtctttttagttttggctttttattgttttgttggtgattttactgaaataaagttgagctacttcttcttatagtggcatattctttgtaaattttaacaaggtttaatcttttgatttacaaattaaaaaattttgaattagctttatattaattttctctcagtatgatcacaaaatatgtcaaggtagtattttacctgatatatgatttaaattcattaatttgaatctgctgcagattcaaaaattcaacatggttaggattttgctttgctttttaaataaccttaaacataagtccgggcgcagtggttcatgcctgtaatcccagcactttgggaggccaaggcgggtgaatcacctgaggtcaggagtttgagaccagcctggccaacatggtgaaaccccgtctctactaaaaatacaaaaattagctgggcgtggaggcacgactgtaattccagctactcaggaggctgagggaggataagcactttaatctgggaggcaggggttgtagtgagccgagatggcgccattgcactccagcctgggcaatggagactctgcctcgaaaaataaaaaattaaaaaaaaaccttaaacatgaatgcttagttgtatttgcacaccacctacctggtggacagcagatgaactccttaccagaatgtgtcaaccctagcaggagctctcaactccctcctcctggacccctccggctcatccagtgggcttgtcctggtctcctgtccatcaggggtcagatggccaccccaagcaccagtctttcccatccctctcacagtctgttcaaagacaacaaaataacttgaaccaaataaaagacaaacataacaaagcacccctgccaatgcaacgtagtgccccagggcatctcagcacacatagctgtactaggtagaattattagtgtattagctctattagttagaattaattagaaccatagctgtgttagaattctttgattgcaagtaacagcaatccaagtgaccagaagtcaaaaagggaaaaggaagattattttaaggatgctaggtatggggagattatcagaacctgggacggacagaaggggtctgatgcccaggactgcagcaccgtcagtgctcctgtccctcacctctgcctctctagtccacgttgtacaggccggccactctccagctttactgttacaaatagctctgaccacatggggaggctatcacaattccaaattcccagaggtgagactctaacccaggttgggtccacctctggtcaaataaattgtgtaagaggaatggtgtcttagagtataattgttggcatggggtgggggtggggagcggtgtcctgaccaaataacccctcaaagtgctaatgcagtgactaaagttacaataggagtgaacacccaaggtgggacaggtatggaagagacatattcctgcctattcccggaatcctgacttttccctggctctcactctccctagcagtttttgttttgttttgttttgagacagggtctcactctgtcgcccaggctggagtgcagtggcatgaccatagctcactgcagcatcagcctctgggttcaagccatcctcccacctcagcctctggagtagctgagactacaggcatgcaccaccatgtctggctaatttttgttttgtagagaaagagtttggccatgttgcccaggctggtctcgaactcctgggctcaagcaatccacccgcctcgttctgtcctcttggtcacttatctatgctgcagtgtgattctttctccaggctctgctctcccttgccttccttgccaagaatacagagaagggagttcagctcaaatcactggcataagatcatgttctaagattagactttagcaaatccatttacccaaatactgctctttaaggcttctgccctatgagcttacaagacaagctgtaagttaatgtcgtttttagttatcacttagtgatactgaaagtgaattgtgacaagggatgcttgaagggtggcatggaagggtgctgtgaagaaggtagagggcgctaaagacaaacttaatcctgcttgctggtttacctaggggccagctcggtgcagttcacatttcttcagttcagctagtaagcatatgctaaatgtctttgtgccagatcggatatatacataattatggatgaacacagacaagtaatttcctagataatactaaagaagagctatgctaaggcatcccagagaagggccacttaacccaactgaagaatttagggaatgcttcctggagaagaaaaggcctaaacaggcttaaggagtaagaaagatctagacaggcaaaggaagttggaaagtgcgtttctggagaaagaataacaaggaagactctgctccacaatgcgtagggcctgagtttagaatcctcaaactgctgggggtgacttacatggctgggaggtggtatcacctggaagctccttccctcactagtctgatgcctgggctgaaattactcagaagctggtctcggcagtgacagtcaactggagcatgcagtagtttgggttgttttgcagcatgaagatagttagacctcttattagtcatctttatacagctttatccatcaccagacagtaagcctcatgaatgtagagcgtgtttgttatttatttcatccccagcacctcgcatagagcttgttacataacaggtgttgaaaaaatatttgttaaatgagtcaaggaatgaatgggggggggtggggcagaaggttaaggtggttcacatgtgcagtcctcagttttctcacagatgtaggaagtaaggtctccttctgagaattagaggtggatgtcgagaaggtcctggcagaggggtcaaagttttggaaagtcactgtgggctggatggaataaaagggcaataccatcaaactatgtgatcacaggactttctctatcagtgtcttctgcctgggtgaacagatatgacagtttcttttaattttaaacagggtcttgctctcacccaggctggagtacagtggtataatcataactcattgcagcattgactgcctaggcttaagcaatccttccaagagatggctgttttttgtgatgactaaggggatgggtgttattccaagtgtagacataagtttagggatgcaaaggaatctcagagtgcttaagaaagagtggtccagtgagcgactagggaccagcttcctaggatagtaagtgaggatgctggtgggaagtggagggatgaagagactgactggaggtcaggtccaaggctggcagtgactagagtaaaagggcagctggaaggttgtggtcagaaggtggaatattggaatttcagatttcttaagtgtgtcaaattcaggtcgtgacagattccagggtgatttcttaagtgtgtcaaattcaggtcatgacaaattccagggtgcagtcatggtgtgggtatctgaagagcaagtttcaataaggctcaaggaagggtagctatttgtacgcttcctgggaagctgtcagcagatgagagggactctgggtatgagtataggtgtttttcttgagcaaccatgtctctcttcccaacagaagtctgatttagtggaaacagacttttcaggatttttctagtgcaataatcaaatctctaaaaattggcttacgatgaaagtgctgcttagtcaaaatagcatctgcatatctttgatgccgtaatcatgctatccagagttccttaataccaatggtaataaggcgggtgcagggagcagttatctgtggtgaagaagcttaattgggtgagggatatccatgtgccaagatgaaagagcatttatggaactttatagctttatgattcatacagaacatttataaagcattatagttacatggagtattggtgtccagatactagtaatcacagacacttctataatatttccactatgccaggtgttgtgttgagggctttacatatatgaactgacttcatcctcccaatagccctttgacatatatactatcatcattaccattatcttcattttacagatgaggcaactgaggcccagagaagtcaaatcacttgcccacaagtcatacacttagcaaatggcagagccaggatttgatcacaggtaaatcctgcacatactggaaggaggcagttagcccctaggccttctgataaggaaatacagggtaatactcacctaatcaaggctaataagtagtagagctggactctcatccacggctgtctgagcccctaatctccaagtcagagtggttcatttgcccagatgacgacctttagttgtgaaaatgatctctggcctttgcagtcttccctggtggaaagaaagcttcagaaaaccttactggtgacaggaagtagttgctcaatacatgtttgtggaataaacaaatgagtgacgattgccacactcccagtgtcacagttggcccacagaacacgttttacagttgagtaatctcagataaagacaggaacatggtgtttataagctgcccttaatggcagagaacacagacagaaacgagggaagagagagaaattggggaccctgaagaaagggggccagcagcaggtaggtgccatcagggacaagaacagcacctcccagggtgggagaccccaggcctttctggcagcaggtctggatggaaagtggacaggaggctcacccgtctgcatcccctgctcctgcccctgctcggctacaaaaaccaaagggacagcaggtacctcaataaatatttgtccaatgcatgaatgagtaaaggtgaaggagggggagtggtttgaaagtctattctcatccttccagctgaccacaccccggtagccactcctgcataaagctctcccctcctgtgaccagctgaggacctcaggctgcagcggagccatgcccagatacacggtgcacgtacgtggggaatggctggcagtgccctgccaggacgcgcagctcactgtgggctggctgggccgggaggccgtgaggcgctatatcaagaataagcccgacaatggtggcttcacctccgtggatgacgcgcacttccttgtgcgccggtgcaagggcctgggcctgctggacaacgaggaccggctcgaggtggccctagagaacaacgagttcgtggaagtgggtgagtggctgcaggagagggccgcgaacgggtgcggtttggcctggcttagtctttgcagcattgaacccccacctcagggaaaatgatgagcagaggtcaggcttgccgaggctggccctgtgcaggcacatgccacgcctctggggatcttaagtcctcacacaaccctgtgagatgggtaggattctcctccacctctgatggaggagaaatcagagaggaggtaacttacccagactccagcagctagtaagtaacaaagactagactggtactcaaggctgcaggtctgaatccctttgcagtgactgaatcattttgaggttattttgcctttcgaaagaatccacccccacccccagactggaggccggcagcatagcatcagttcagattttgaagaaaataaagctgggaatggggatggaagtggaattctgtcttgaactttcatctaaacccctggtctctgccctgacacctacctttctgctttttgctctcctcctacataaagatgctaagaccacatgaaaccatctgaagcagttttaaagcagccatttctatagaattcatgggccaatgatgggccgttccttggtttaacagggggaacatggctgtacaatgtgatctgtaacgagtctcccgtgcattgttttagttatagagggtgatgccatgtctcctgacttcattccatctcaaccagaaggagtttatctgtatcctttcccacaggctctttggtctgctctgggggtggctcctgcagatggtggggctgggggtttttccacaccaccctatatgttcctttacctggatacagatacagcaagtaccgggagcctgaaaaggtaagcttcaaaccactttctttttcttcagaaaattaaggccccttatttaagagggaggaaagccaggaaaacttctgagaaaacactgtcaattagaacagggctggccgggagcagtgactcatgtctgtagtcccagcactttgggtggccgaggtgggcagttcacttgaggtcatcagtttgaaaccagcctggccaacatggtgaaaccccatctctactaaaagtacaaaaattagccaggtatggtggcgtgcacctgtaataccagctactcaggagcctgaggcacgagaattgcttgaacccaggaggcagaggttgcagtgagccatgtttgtaccactgcactccagcctgggctggagactctgcctcaaaacaaacaaaccaaccaaccacagggctttatccagctctgtagtggggaaagggggcttggaaaggcattatgcttttgcaccaataagcctcctcttatgcaagatgcatttttatttagcatattcatgtttcacgcaatgatcagatctctgaaatgtcagtttggttctgttggaggtgtccctactctggttagaataatcaagctgttcagactcactgagatccccttcttttgtgtagtacatcgagttagatggagaccgtctgaccacggaggatctggtcaacttgggaaagggacgctacaaaataaaggtatggggagggaggggaaagatgtcctctggccatttttgttgcccgtggaagtctttaacgtgctcagttctgatcaacattttcctagctcaccccaacagctgagaagagggtgcagaaatccagggaggtcatagatagcatcataaaagagaaaacaggtatctttttatctttatgttataaatatttttataaacaaacaaaaatccctgcatttaattgcataatgtctctttttattctagttgtttacggtattactacaggttttgggaaatttgccagaactgtaattcctatcaataagctacagtaagtttaaaacacacatatgttcacgttccacctaccctcatcttttaaatatttttcaacaagggaaataattcacatttgccccaatttacagatcagaggatgaggcttgggttaccttgcatgtgagttggtattgaaaacccaggctggctggtttctcccattgccttccttctgtccctccaaggatttgaccatgattcccttcattttcccagctgagggaacattttctcactgcaatgtatctaagagggtttttacctttctgttgcagggagcttcaggtcaacttagtacgctcacattcttcaggtaagtcaaaacgttgggtgcctcctggatcttgtgtgattagatgaataaagcacagcacagtgtgagttatccagttatagtcacaaaaagctagtttctcaaaacagcatttcaagaactaggtgccgaggtgagaagggatgcagaaagaatcagctgagcctcagaaaaagaaatgggccaggtggagggatggggttggtatgagaacacatgtcccatgccatggagacactgttgcattcagggaaggaaataaagcctggaactcaaagaatgagttaggatgggcatagtgagatgggaaagactgtcaccaatcagcacccatcagatggtaaagaagttgtgctaaggactctggatgctattctaaaggtgagtgggaggtcaggggttcactgaagcttcccaaaaaggggaattgagaaggcaaaactggggtcttaacctttgtcaggaagatggggctcagacaagtcagacaggcaggagggagagtagtccaactacctgagccgagaggagaaggtaatagcaggctgggctacatatgggaaagattggagggagggagggcaattgtcaggagacaaaaaggagtttgcttttcttggagaaaacatcaattctgttttgcaggtgttgggaaaccactaagtcctgagaggtgtcggatgctcttggctttaaggatcaatgtcttagccaaaggatacagtggcatttccctggagaccctcaaacaagtcatagaaatgtttaatggtaatgcaatggctccctagacggaacctctgtggaggctggacatgtaccacagggtagaattgattggccagatgctgaggaatcacctgagaagacatgaaataattgaaatgagtgggaaatgccgttggcaaaaagtaggatagttagatgggggaagaggagaaagtcgatcagagatgcttactcctatgaactttaacttattctgcaagaccctttccctagcatttgtcatcttcaagactagaacaggactcttaagtctgcccttacattcaagcctgcctagaagaaacttggattaagtggtacatgaatatggttagaaaaattgcatgatatcaatgtccatcccaaaggccaattcagtagttctggttggtgcctgggaatctgaaatcgtaatgtcccccaggtgatggccagacttgcacactaaaatccaacttcttgcaagggtagaacagaaatgcaaagaggttaatgactcccttgtaatcaagaagccatgtagtggcaggatatgagggaactcaactctggagctttcttcttggataggaaaattctaatgtggaaaccagatttgcagtgattggaggtattgtcccttctcacaggtaaggacaagccttctaggtcagtggagactcagaactctttgaggggaaggagagggaggagaagcagtgctgaggcagtcacaaacagcaaaacacattcttgagtttccatgttatggacgcaagtggcacgtgaataggatctgccaatgagtggagagcaatttcaatgagcagtctattgtatatacagggctgtgctgaacagactagtagtgattccaacacctatttttactcctaccttggtctgccatactatatagccctaaaatcccagatagtagcactccaaccttaaacccacctgtactttatgggggagtctaaggcacctctgagaattccccagcgtgaactatcagccagaagttggtctgtggatggcactgccatacccgactgacattatttaacagttggaaaaaatgctgctgtcaggaatctgattttatttcagaaaaatgaagcctcttttttggtaactttttgggaatttcttagaaaatggcacgtgttcattgataaggggcagtggagtgtagactgggtgactggcaaaatgaaaagactcagttgcctatgacttctcttcccctgggaaaccttgttaatgctttggtgcaccacctccttctggaacattttatattacttttccaatgtttccaaacattttccaatagctgtgaatggctaaacttggtcaaatgaatgtcctttaatttcatatttagataatttctaactatttttcctataataaacaatgaactgtaaaacaaaaacaaaaacaaaaaaaacagctagttcctgatcacttcttcaagatatattgctaaaatttctacaagtggaagtactaggttgaattagagcacacagattttgagggctttgcatccagaagtgtcctccttccttcttcttatttatttaggagacaggatcctgctttgtcacccaggctggagtgcagtggcacaatctcggctcactgcaacctccacctcacgggttcaagtgattctcccatctcagccttcccagtagttgggactacaggcatgcaccaccatacttggctaatttttgtatgttttgcagagacagggtttcaccgtgttgcccaggctggtcttgaactcctgggctcaagtgatatgcccgcctcggcctcccaaagtgctgggattacaggcttgagccactgcgcctggcccttctttccttcttgctgactttccctccagccctcctttcctccctgtctcctctttaccttcctctcttcttcctctccac

SEQ ID NO: 1284 - DNA, 1920 bp, Homo sapiens
ttcctttcccggcgtgcaccgcgaatccctcctcctcttctttacctctctccctcctcctcaggttctctatcgacgagtctggtagctgagcgttgggctgtaggtcgctgtgctgtgtgatcccccagagccatgcccgagatagtggatacctgttcgttggcctctccggcttccgtctgccggaccaagcacctgcacctgcgctgcagcgtcgactttactcgccggacgctgaccgggactgctgctctcacggtccagtctcaggaggacaatctgcgcagcctggttttggatacaaaggaccttacaatagaaaaagtagtgatcaatggacaagaagtcaaatatgctcttggagaaagacaaagttacaagggatcgccaatggaaatctctcttcctatcgctttgagcaaaaatcaagaaattgttatagaaatttcttttgagacctctccaaaatcttctgctctccagtggctcactcctgaacagacttctgggaaggaacacccatatctctttagtcagtgccaggccatccactgcagagcaatccttccttgtcaggacactccttctgtgaaattaacctatactgcagaggtgtctgtccctaaagaactggtggcacttatgagtgctattcgtgatggagaaacacctgacccagaagacccaagcaggaaaatatacaaattcatccaaaaagttccaataccctgctacctgattgctttagttgttggagctttagaaagcaggcaaattggcccaagaactttggtgtggtctgagaaagagcaggtggaaaagtctgcttatgagttttctgagactgaatctatgcttaaaatagcagaagatctgggaggaccgtatgtatggggacagtatgacctattggtcctgccaccatccttcccttatggtggcatggagaatccttgccttacttttgtaactcctactctactggcaggcgacaagtcactctccaatgtcattgcacatgaaatatctcatagctggacagggaatctagtgaccaacaaaacttgggatcacttttggttaaatgagggacatactgtgtacttggaacgccacatttgcggacgattgtttggtgaaaagttcagacattttaatgctctgggaggatggggagaactacagaattcggtaaagacatttggggagacacatcctttcaccaaacttgtggttgatctgacagatatagaccctgatgtagcttattcttcagttccctatgagaagggctttgctttacttttttaccttgaacaactgcttggaggaccagagattttcctaggattcttaaaagcttatgttgagaagttttcctataagagcataactactgatgactggaaggatttcctgtattcctattttaaagataaggttgatgttctcaatcaagttgattggaatgcctggctctactctcctggactgcctcccataaagcccaattatgatatgactctgacaaatgcttgtattgccttaagtcaaagatggattactgtaaataaaccaataagtattattaaattgtacttgaacaaaaataactaggtaacatttatttcaggccaaagaagatgatttaaattcattcaatgccacagacctgaaggatctctcttctcatcaattgaatgagtttttagcacagacgctccagagggcacctcttccattggggcacataaagcgaatgcaagaggtgtacaacttcaatgccattaacaattctgaaatacgattcagatggctgcggctctgcattcaatccaagtgggaggacgcaattcctttggcgctaaagatggcaactgaacaaggaagaatgaagtttacccggcccttattcaa

SEQ ID NO: 1285 - protein, 486 aa, Homo sapiens
MPEIVDTCSLDASVCRTKHLHLRCSVDFTRRTLTGTAALTVQSQEDNLRSLVLDTKDLTIEKVVINGQEVKYALGERQSYKGSPMEISLPIALSKNQEIVIEISFETSPKSSALQWLTPEQTSGKEHPYLFSQCQAIHCRAILPCQDTPSVKLTYTAEVSVPKELVMSAIRDGETPDPEDPSRKIYKFIQKVPIPCYLIALVVGALESRQIGPRTLVWSEKEQVEKSAYEFSETESMLKIAEDLGGPYVWGQYDLLVLPPSFPYGGMENPCLTFVTPTLLAGDKSLSNVIAHEISHSWTGNLVTNKTWDHFWLNEGHTVYLERHICGRLFGEKFRHFNALGGWGELQNSVKTFGETHPFTKLVVDLTDIDPDVAYSSVPYEKGFALLFYLEQLLGGPEIFLGFLKAYVEKFSYKSITTDDWKDFKYFKDKVDVLNQVDWNAWKPGLPPIKPNYDMTLTNACIALSQRWITVNKPISIIKLYLNKNN

SEQ ID NO: 1286 - DNA, 2626 bp, Homo sapiens
ttcctttcccggcgtgcaccgcgaatccctcctcctcttctttacctctctccctcctcctcaggttctctatcgacgagtctggtagctgagcgttgggctgtaggtcgctgtgctgtgtgatcccccagagccatgcccgagatagtggatacctgttcgttggcctctccggcttccgtctgccggaccaagcacctgcacctgcgctgcagcgtcgactttactcgccggacgctgaccgggactgctgctctcacggtccagtctcaggaggacaatctgcgcagcctggttttggatacaaaggaccttacaatagaaaaagtagtgatcaatggacaagaagtcaaatatgctcttggagaaagacaaagttacaagggatcgccaatggaaatctctcttcctatcgctttgagcaaaaatcaagaaattgttatagaaatttcttttgagacctctccaaaatcttctgctctccagtggctcactcctgaacagacttctgggaaggaacacccatatctctttagtcagtgccaggccatccactgcagagcaatccttccttgtcaggacactccttctgtgaaattaacctatactgcagaggtgtctgtccctaaagaactggtggcacttatgagtgctattcgtgatggagaaacacctgacccagaagacccaagcaggaaaatatacaaattcatccaaaaagttccaataccctgctacctgattgctttagttgttggagctttagaaagcaggcaaattggcccaagaactttggtgtggtctgagaaagagcaggtggaaaagtctgcttatgagttttctgagactgaatctatgcttaaaatagcagaagatctgggaggaccgtatgtatggggacagtatgacctattggtcctgccaccatccttcccttatggtggcatggagaatccttgccttacttttgtaactcctactctactggcaggcgacaagtcactctccaatgtcattgcacatgaaatatctcatagctggacagggaatctagtgaccaacaaaacttgggatcacttttggttaaatgagggacatactgtgtacttggaacgccacatttgcggacgattgtttggtgaaaagttcagacattttaatgctctgggaggatggggagaactacagaattcggtaaagacatttggggagacacatcctttcaccaaacttgtggttgatctgacagatatagaccctgatgtagcttattcttcagttccctatgagaagggctttgctttacttttttaccttgaacaactgcttggaggaccagagattttcctaggattcttaaaagcttatgttgagaagttttcctataagagcataactactgatgactggaaggatttcctgtattcctattttaaagataaggttgatgttctcaatcaagttgattggaatgcctggctctactctcctggactgcctcccataaagcccaattatgatatgactctgacaaatgcttgtattgccttaagtcaaagatggattactgccaaagaagatgatttaaattcattcaatgccacagacctgaaggatctctcttctcatcaattgaatgagtttttagcacagacgctccagagggcacctcttccattggggcacataaagcgaatgcaagaggtgtacaacttcaatgccattaacaattctgaaatacgattcaggtacatcattttaacttgtctctgtggaagaaagcagaaaactaaactcctttgaaagatggagaaagggaatgcagagtatgagacatacttgagtcttgagaattccttgtcaaactgactgcttctatataaatacttatagtggtatttaaggaatagttgcaatatgtaatctggtagtattaatctttttgttagactttgctctaaacctctcttgccttaaaagaaaaaaaaaaaattagaatgaaggattccgtggtaaataggctttctccacaaccaactaaatctactttgaaatgggaatagttagaaatattttattctattatatgttaatctttcttaattcaaatttgtaatgtgaggcttaaaccaaagtttaattccttcagaaattgcatgtataaggtatgtgagcacctacctgatctttcttaattcaaatttgtaatgtgaggcttaaaccaaagtttaattccttcagaaattggatttataaggtatgtgagcacctacctgatccagacctttaaaaatatatgatctttttcaagaaccagctcctcttctttctcttcaccaattattaaattgtatatataaggatttgagagtctcagaatcaagacataccataaagtggtgtacagtataactatagtggggttattcatatcactacagaagtaatattaagatatacctgtcatatcctgccccttcctcattttctactccatgctccccccaaatcctccttttagatggctgcggctctgcattcaatccaagtgggaggacgcaattcctttggcgctaaagatggcaactgaacaaggaagaatgaagtttacccggcccttattcaa

SEQ ID NO: 1287 - protein, 547 aa, Homo sapiens
MPEIVDTCSLDASVCRTKHLHLRCSVDFTRRTLTGTAALTVQSQEDNLRSLVLDTKDLTIEKVVINGQEVKYALGERQSYKGSPMEISLPIALSKNQEIVIEISFETSPKSSALQWLTPEQTSGKEHPYLFSQCQAIHCRAILPCQDTPSVKLTYTAEVSVPKELVMSAIRDGETPDPEDPSRKIYKFIQKVPIPCYLIALVVGALESRQIGPRTLVWSEKEQVEKSAYEFSETESMLKIAEDLGGPYVWGQYDLLVLPPSFPYGGMENPCLTFVTPTLLAGDKSLSNVIAHEISHSWTGNLVTNKTWDHFWLNEGHTVYLERHICGRLFGEKFRHFNALGGWGELQNSVKTFGETHPFTKLVVDLTDIDPDVAYSSVPYEKGFALLFYLEQLLGGPEIFLGFLKAYVEKFSYKSITTDDWKDFKYFKDKVDVLNQVDWNAWKPGLPPIKPNYDMTLTNACIALSQRWITAKEDDLNSFNATDLKDLSSHQLNEFLAQTLQRAPLPLGHIKRMQEVYNFNAINNSEIRFRYIILTCLCGRKQKTKLL

SEQ ID NO: 1288 - DNA, 2211 bp, Homo sapiens
ttcctttcccggcgtgcaccgcgaatccctcctcctcttctttacctctctccctcctcctcaggttctctatcgacgagtctggtagctgagcgttgggctgtaggtcgctgtgctgtgtgatcccccagagccatgcccgagatagtggatacctgttcgttggcctctccggcttccgtctgccggaccaagcacctgcacctgcgctgcagcgtcgactttactcgccggacgctgaccgggactgctgctctcacggtccagtctcaggaggacaatctgcgcagcctggttttggatacaaaggaccttacaatagaaaaagtagtgatcaatggacaagaagtcaaatatgctcttggagaaagacaaagttacaagggatcgccaatggaaatctctcttcctatcgctttgagcaaaaatcaagaaattgttatagaaatttcttttgagacctctccaaaatcttctgctctccagtggctcactcctgaacagacttctgggaaggaacacccatatctctttagtcagtgccaggccatccactgcagagcaatccttccttgtcaggacactccttctgtgaaattaacctatactgcagaggtgtctgtccctaaagaactggtggcacttatgagtgctattcgtgatggagaaacacctgacccagaagacccaagcaggaaaatatacaaattcatccaaaaagttccaataccctgctacctgattgctttagttgttggagctttagaaagcaggcaaattggcccaagaactttggtgtggtctgagaaagagcaggtggaaaagtctgcttatgagttttctgagactgaatctatgcttaaaatagcagaagatctgggaggaccgtatgtatggggacagtatgacctattggtcctgccaccatccttcccttatggtggcatggagaatccttgccttacttttgtaactcctactctactggcaggcgacaagtcactctccaatgtcattgcacatgaaatatctcatagctggacagggaatctagtgaccaacaaaacttgggatcacttttggttaaatgagggacatactgtgtacttggaacgccacatttgcggacgattgtttggtgaaaagttcagacattttaatgctctgggaggatggggagaactacagaattcggtaaagacatttggggagacacatcctttcaccaaacttgtggttgatctgacagatatagaccctgatgtagcttattcttcagttccctatgagaagggctttgctttacttttttaccttgaacaactgcttggaggaccagagattttcctaggattcttaaaagcttatgttgagaagttttcctataagagcataactactgatgactggaaggatttcctgtattcctattttaaagataaggttgatgttctcaatcaagttgattggaatgcctggctctactctcctggactgcctcccataaagcccaattatgatatgactctgacaaatgcttgtattgccttaagtcaaagatggattactgtaaaagatgatttaaattcattcaatgccacagacctgaaggatctctcttctcatcaattgaatgagtttttagcacagacgctccagagggcacctcttccattggggcacataaagcgaatgcaagaggtgtacaacttcaatgccattaacaattctgaaatacgattcagatggctgcggctctgcattcaatccaagtgggaggacgcaattcctttggcgctaaagatggcaactgaacaaggaagaatgaagtttacccggcccttattcaaggatcttgctgcctttgacaaatcccatgatcaagctgtccgaacctaccaagagcacaaagcaagcatgcatcccgtgactgcaatgctggtggggaaagacttaaaagtggattaaagacctgcgtattgatgattttagagatttctcttttttaaatggaattcgtaaagaaatataaaacttcagctcacaattaaaactgtctttttagttttggctttttattgttttgttggtgattttactgaaataaagttgagctacttcttcttatagtggcatattctttgtaaattttaacaaggtttaatcttttgatttacaaattaaaaaattttgaattagctttatattaat

SEQ ID NO: 1289 - protein, 600 aa, Homo sapiens
MPEIVDTCSLDASVCRTKHLHLRCSVDFTRRTLTGTAALTVQSQEDNLRSLVLDTKDLTIEKVVINGQEVKYALGERQSYKGSPMEISLPIALSKNQEIVIEISFETSPKSSALQWLTPEQTSGKEHPYLFSQCQAIHCRAILPCQDTPSVKLTYTAEVSVPKELVMSAIRDGETPDPEDPSRKIYKFIQKVPIPCYLIALVVGALESRQIGPRTLVWSEKEQVEKSAYEFSETESMLKIAEDLGGPYVWGQYDLLVLPPSFPYGGMENPCLTFVTPTLLAGDKSLSNVIAHEISHSWTGNLVTNKTWDHFWLNEGHTVYLERHICGRLFGEKFRHFNALGGWGELQNSVKTFGETHPFTKLVVDLTDIDPDVAYSSVPYEKGFALLFYLEQLLGGPEIFLGFLKAYVEKFSYKSITTDDWKDFKYFKDKVDVLNQVDWNAWKPGLPPIKPNYDMTLTNACIALSQRWITVKDDLNSFNATDLKDLSSHQLNEFLAQTLQRAPLPLGHIKRMQEVYNFNAINNSEIRFRWLRLCIQSKWEDAIPLALKMATEQGRMKFWLFKDLAAFDKSHDQAVRTYQEHKASMHPVTAMLVGKDLKVD

SEQ ID NO: 1290 - DNA, 2214 bp, Homo sapiens
ttcctttcccggcgtgcaccgcgaatccctcctcctcttctttacctctctccctcctcctcaggttctctatcgacgagtctggtagctgagcgttgggctgtaggtcgctgtgctgtgtgatcccccagagccatgcccgagatagtggatacctgttcgttggcctctccggcttccgtctgccggaccaagcacctgcacctgcgctgcagcgtcgactttactcgccggacgctgaccgggactgctgctctcacggtccagtctcaggaggacaatctgcgcagcctggttttggatacaaaggaccttacaatagaaaaagtagtgatcaatggacaagaagtcaaatatgctcttggagaaagacaaagttacaagggatcgccaatggaaatctctcttcctatcgctttgagcaaaaatcaagaaattgttatagaaatttcttttgagacctctccaaaatcttctgctctccagtggctcactcctgaacagacttctgggaaggaacacccatatctctttagtcagtgccaggccatccactgcagagcaatccttccttgtcaggacactccttctgtgaaattaacctatactgcagaggtgtctgtccctaaagaactggtggcacttatgagtgctattcgtgatggagaaacacctgacccagaagacccaagcaggaaaatatacaaattcatccaaaaagttccaataccctgctacctgattgctttagttgttggagctttagaaagcaggcaaattggcccaagaactttggtgtggtctgagaaagagcaggtggaaaagtctgcttatgagttttctgagactgaatctatgcttaaaatagcagaagatctgggaggaccgtatgtatggggacagtatgacctattggtcctgccaccatccttcccttatggtggcatggagaatccttgccttacttttgtaactcctactctactggcaggcgacaagtcactctccaatgtcattgcacatgaaatatctcatagctggacagggaatctagtgaccaacaaaacttgggatcacttttggttaaatgagggacatactgtgtacttggaacgccacatttgcggacgattgtttggtgaaaagttcagacattttaatgctctgggaggatggggagaactacagaattcggtaaagacatttggggagacacatcctttcaccaaacttgtggttgatctgacagatatagaccctgatgtagcttattcttcagttccctatgagaagggctttgctttacttttttaccttgaacaactgcttggaggaccagagattttcctaggattcttaaaagcttatgttgagaagttttcctataagagcataactactgatgactggaaggatttcctgtattcctattttaaagataaggttgatgttctcaatcaagttgattggaatgcctggctctactctcctggactgcctcccataaagcccaattatgatatgactctgacaaatgcttgtattgccttaagtcaaagatggattactgccaaagaagatgatttaaattcattcaatgccacagacctgaaggatctctcttctcatcaattgaatgagtttttagcacagacgctccagagggcacctcttccattggggcacataaagcgaatgcaagaggtgtacaacttcaatgccattaacaattctgaaatacgattcagatggctgcggctctgcattcaatccaagtgggaggacgcaattcctttggcgctaaagatggcaactgaacaaggaagaatgaagtttacccggcccttattcaaggatcttgctgcctttgacaaatcccatgatcaagctgtccgaacctaccaagagcacaaagcaagcatgcatcccgtgactgcaatgctggtggggaaagacttaaaagtggattaaagacctgcgtattgatgattttagagatttctcttttttaaatggaattcgtaaagaaatataaaacttcagctcacaattaaaactgtctttttagttttggctttttattgttttgttggtgattttactgaaataaagttgagctacttcttcttatagtggcatattctttgtaaattttaacaaggtttaatcttttgatttacaaattaaaaaattttgaattagctttatattaat

SEQ ID NO: 1291 - protein, 601 aa, Homo sapiens
MPEIVDTCSLDASVCRTKHLHLRCSVDFTRRTLTGTAALTVQSQEDNLRSLVLDTKDLTIEKVVINGQEVKYALGERQSYKGSPMEISLPIALSKNQEIVIEISFETSPKSSALQWLTPEQTSGKEHPYLFSQCQAIHCRAILPCQDTPSVKLTYTAEVSVPKELVMSAIRDGETPDPEDPSRKIYKFIQKVPIPCYLIALVVGALESRQIGPRTLVWSEKEQVEKSAYEFSETESMLKIAEDLGGPYVWGQYDLLVLPPSFPYGGMENPCLTFVTPTLLAGDKSLSNVIAHEISHSWTGNLVTNKTWDHFWLNEGHTVYLERHICGRLFGEKFRHFNALGGWGELQNSVKTFGETHPFTKLVVDLTDIDPDVAYSSVPYEKGFALLFYLEQLLGGPEIFLGFLKAYVEKFSYKSITTDDWKDFKYFKDKVDVLNQVDWNAWKPGLPPIKPNYDMTLTNACIALSQRWITAKEDDLNSFNATDLKDLSSHQLNEFLAQTLQRAPLPLGHIKRMQEVYNFNAINNSEIRFRWLRLCIQSKWEDAIPLALKMATEQGRMKFWLFKDLAAFDKSHDQAVRTYQEHKASMHPVTAMLVGKDLKVD

SEQ ID NO: 1292 - DNA, 24256 bp, Mus musculus
atttctccctctctctcccccctctctctcacatacgagagagagagagagagagagagagagagagagagagagagagagagagagagagagagatgaattttaaaaacaaagaaacagccaggcattgtggcccacatttttaatcccagcacccaggagacagaggtagacaaatgtctgagtttgaaaccagccatgactgcacaggtcttcctagccttgaactcatgattttactctggctgacactgaacctgcaatcctcctgcctcacactggtgaatatctgagattctctacctatgccaggtccagcttggaagcttcatgagtgcatttttcattatgaaagtgaaactcataccacatgtaactggactttaccccatgagccttggccatgagcatacatagaaaggagtccttgtccttgtcgttctcctagtaccagggccacaaaggtctcttcctcaagcaaaaacatcaggtcttttggtctcatggaggcagatcctaaactccacaactggaggctacaccgtgatgctgcctggcatctcagtcacacaacatccttgggtcacaactcctctaataatagcctattgtaagcccattgatttcagcaataggaataatttttcatttgtgcctagtttgagcttgtcatctcagaatatcagagaagtgaggcaggaggattgcaaatacaaggcaatttaataggtaatttagtgagaccctgtctcaaaacaaagggccgggccagcaagtaccttgaatgtgtaaggcagtgggctcaatgggcagaaacacacacagtgaagaagagggttcatctgacatcttttatgctaagtaaaaaaaaaagtctctggtcactaagatgatccatgttaaagaacatcacagtcatctatactacatgtgcttgtgtatgtgtgtgtttatatatatgtgtgtgtgtgtgtaatatgtatgtggtacatatcttttgtttcagcactctgaaggcagaattgggtgaatctttgtgagtttaggccaacctgtgatacatagcaagttccagattgtcctgggttatctactgagatcctgtctaaaaaacaaacaaacaaacaaaaaacaaaaacaaaaaacaaaaaaacttgatatatcatactatatactactatatagtggttatgttgatttacataaaaagtaaattctcatacaggaatcataacaaagacagagaaatgccttcataaagcacttttatttggagcactgggtaggtagggacacagcccagcaagcactcgacttttgatgtttgggtgaagactaaagcttttagtgggtttagaagaccctggggggttagattttaaaaaggttgatgcttgccagacacttaacaaaaataatcttgttcgcacacatgtaaatgttgctatagaaactgtaggcaggtggatggttcagagctgctgtgagcttgcactgcaggtcttagcagagtcttcctcatccaggagtggaagattccttttggtcatacaagagtggctttcacacccagctctgagcctccccccaacccccctcatctgacaaactcctgcagggcattaattcaaagggagagtggaaattcccagagaaagaggttccctatatcccccgagtcagtatcagtgtgtgtgcccatcagggatgcaaatttcagggcaccaggagaccatggatccatggctcacccagtagatttccaatccctttgtggtatgatgaatgtgtagcccgcaaacaggtgtggctgagcctgcaatgatggaagatagaaagcacctgctacttcagcaggtatggcctggaaaacctctggaaagcaatgtgcatgtgcgccatcttggttcacttgggtttctccacatctcacacaaaaaaaatgtacctggcgtggtggctcatactttcatcttagcaccgtgaaggcagagtggtgtggatctttgtgagttcaggccaagctgttatatatagtgagttccatgccaaccagagctacctactgatatcctgtcacagaagaaagtaaaatttggaactgtttgcttcagcaataacaaggagtggttaaaaaaaaatccagtcatcattatcgtcgtcgctgtcgtcatcatcatcatcgtcgctgtcgtcatcgtcaccgtcactattattactgttattagtgtgtgtactttgttacagagatgcatgttctggcccaggtatggatcagaagccagaattggttctctcctttcacctttgccagggtcctgagattcaactctggtcaccaggcttgtatgacgagtgactttttaaacctcctgaaccattttgccctcttagtttttatttttcctcaaatattatgactgttttttttttctctattcctgagagttaaattgctgctactgtgttttttcattatatgatccttttaggcagggctaataaacacttatgcagagttgtgtgtatgtgtgttagttatcagtgaaaacaggtagcaagcaatagattattcttattttaggattcctacccctttccaaatataacccagtaactgcagtagtccagtagaatagtgtcatctgataatgctggagaacatgaactataaggagatgacatgatttccctcacgtcacacattacaaagtagctgagccaggactggaatctaggttggtcagacgccaaaacaccccagccttgaccagtaagataatatttaactaattacgtggaaactgccattgtacaacaggttaaatgcacaacaggttgtacagtgtcttttgtgcccctaggtcggtgctgtataaactaacagaccttccaagggacggggatgcgaactgggtccctgtcatttaagctctggctttgcaatgataaaagttaaataatggtatacccactttgcaggattgtcatgacgcatcaatagttttacaatcgtttctttactgggaggtagacatgtgtgcatggcccacacgtagaggtcagagatcagaggtcaacttgtaaaattcagttctcttttactatcacatgggaacaagctctggttgtcaagtttgggggccaagagcccttaccggttgagctatcttaacaggtcagtcatgagagatttaatatgtaacaatctggttacaaataaactgtaaccacagcctcatgccacaatgtgtcaagacttgactctgtgaagaatccatcagatggcttgaagcctcattgcttacactgaaatctggggttctcatcagtatatttggggggaggaggttctgggataagtttgagaaaccaaattaaagcatgaatgaggtcatgcccagtgattgctttttccttgggtagcatccttttgttaaggtccatcctttataggcaagttctgactgctgtcctccctttatgtgtacgggcaagcaaatggtatggacacctccttcattaaactgaacttaactcagttccatggagttacagtcgtgagctgccatatgagtgctgggatttgaacctgggtcctttggaagagaattcagtgtgctcttaactgctaagcagtctctccagccctcacgaaccaactttttaaaatgctacctcaagaaattagacattatccggatccacccagttaacctgggtaaggtgtcatttgagctaggctaggacatctcctcttttaccccattgttaaactagagtgaattaaactggtttgggcagtcttttgaggggttagctgcaagtgaggaacctggcaggctattaggctggcttcaaaaggagtgtttggggcaggaaataaaacttctcagtggagtccagttccataaagatccggctgagaagtggactgactgcaaaccaagatcagatgggccgctctgttggtattggtcctgggggctacacgaagctttgactttgtacacagccaatcatgcatctgatcagggcttcctggtgtcgatccattaggcctcttgcattcctgtttctgctgttcaagcatagcttgctatcttttcaggcccctgtcaggagagtccgtcaggatgaatctcataccctcgggtacacctttattttaaaccagataatttctaactgtactcttcaaaagggttagattccatcttgaggtttaacagctccaaaggctgttgcaattttgaaggcccacccccacccccacccccgggacatctaagagtaaattgtgaatatatcacatgcctatattttaagtcaagagcttcgagaacaccctcttcctgtttgttgaaaaaaatctgcctagctattttcacatgatgtgttaataaatgtccgttgttgccagagagattattccaggaagattaaaggtcatgccaactcatccaggtcctagaagtcccaaggctccttcaactcaggaaaattcctgcaaagccacattgcttctgcgagggcctgaagaacatttatagccatcgcacagaagcaaggatgcaggccctagctttgtttctgttgctgtgataaaggaccctggcaaaagcaagttagaggcggtgggagtgttatttcagcttataataccaggtaaagaacatcagtttggaggaagttaaggcggggatttcaaacagctagccacaagccctccccaggcaagagagggaggaaattaattcatgcatgttcacctatattcagctcgaattctctactcacacttggggaccctctgcctagggagatgcccacaatggggtttggtgtcccccacatcaattaaatgtaattattacaatcccttcacccattgagtcaatctagaccatctctcattgagactcccttcccagatcaccctaggttgtactaaccactaatgttaactattaccgtgtgcctccatgcttaggagagtgggaccaagagggctttctatgttctctcgttttgaaaaaggtctcctgtggttgggagatgtggttcagtggtagaatacttacatagcaaatttgaggacctggtttcaattcccagtactatagtaaataaagcaatagcctcctacatgtgaataatattctagaaagaaacggaagacattgttatcaaggaagcctgtggtctgtctcatggctagaactctaatcatggaagagagtttttcctgtgagcctgagcagtcaaaaggtcctgggcagacaaagggccaactgcgacagcgagttagttttattcaagaagtgaataaagctttattcaggctaactttactaaagcagtgatttaaaagaatatcatttttgtggggactggggcagcaagtctgttattttaaatggtaaaggccgaggaaaagacttccaagttcaagcaaagcctgtgtgggctctagaatgaatttaaggccagcctgggtaactcagcaagactctctcaaaataaataatttaaaaaggaccacgcgctctttccaatcgatctccagtaacacgggtgggggtggggtggggtggggtggggtggagcagagggggagaagtcactttctttgtatcctacatttctaagttgtctcttatctccatattcatttgagaaactattcatattcctaaatgtcctttaagcaaatacatatattcccaactttacacgtttatggattccccttcttgcttagctttccacacagcacttctactttctcgcaccatacatcactgttgtatttctggactgatgggaaggtgcgctcaaggaagggaagcaatctttagtttaaaaaaaaacaaaaaacaagaatgaaaaacctatttttgtatgtattttcatatatgagtgtgaggtcaccagtgtgctttggagccagaagacaatctcagatgttgctcctcaggactcatgcgcaccttgatttttgagacagggtctcttaccaactagacggggttggctggctagtgagcgcctgtgatcttcctatcactacttccttagtgctagtgttgcaagcattggtttattttcaatttattattattattattattaatgtatagatagatagatagatagatagatagatagatagatagatagatagataatgggttgggtttttttttgagacagggtttctctgtgtagccctggctgtcctggaactcactctgtagaccaggctggcttcgaactcagaaatctgcctgcctctgccgcccaagtgctgggattaaaggcatgcgccactactgcccggcttcaattatattatttaaaaacaacaaacaaacaaacaaacaaaacaacatgggttctggggatcaaacttgagtcctcatacttacaagaaaagccagtactttaccggcttgtcatacggatttcattcctactacttccctaaaacgtggagtgagagaagaaatgaagtgagtgaagaagtgaagtgaggcccagggctgcctccatattggtgagtcatacaggtaaggtttgaattcaggcccatgctcctagctaaggaactgtgagagttagaacccacgatacataccctaaggaagaaagaactattaatcttgtgaatggttgactagtgaagaaaaccactggtgtgtgccacggagccttaccctcccttaacgtacgtgcagtgtgtgcaacagaacctgtggtcaaaagctgaaatgtacaacttaggcaagttaaaatctttgtgtcttagcaggaagtaggagcttaatgatccttggacgtggtcacctcaattctggcctcaagccctgagcaccttctctgctttagtttagcctcgggtcaattccttcatcttccttacctaacttgtgttaggttttctaaagactgcacaaaattactcagggagacacagaaacaaggccgtgtccaccctacagcaccgttccataaactctttcatctgtctcggtgtaatgagccgaaaacatttttttaaaatgtgcattggtagtttgccttcatgtatgtttgtatgagggtatgggattctggagttacagttgtgagctgccatatgggggctgagatttgaacccgggtcctctggaagaacaatcagtgcccttagccgctgaaacatctctccagcccctgtaaaccaactttttaaaaggcaacctcaagaagttaagacatcccagtccaccaaggtaacctgggtaaggtgtcatttgagctggagtaggacatctctctcctgctttgccccattattaaactagagtgaattaaactgttctgagcagacctttgaggggttagctgcaagtgaggaacctggcaggctatcaagcagacttaaaagggagtgtttggggcaggaaattaaaaaacaaaacaaaacaacaacaaaaaaccaaccaaacaaaaaaagcaaacaaacaaacaaaaaaatccgaccttggccaaaaaacctcccaaagtgctcaagccattttgcaggttagctcaaaaacatataagcatatcagctaacgggcatgacattcccacacatggtgcccacttaatattacaaagaccctgtaaaatacaagaaagatgacaaggagaaaaaactgtaactggatatagttagatcgaaaggtcaaatttcctgaaggaagtgggaaaaaattcagactcagaaacataggtacaaatgcttagagctctccaccagtgtgcaaagatattattatcaacctcccaactgtctggtgcttcacttcaaattttggtaaagaaaaacccaacctgcttccctcttctgtttggaggttgaggcttgtccttcacgtttccgcggagcaccccacttccctcctcctaaccattggtcccacagactgaaatgtctcagggtgggaaaacctgtaacagatggggaaggatctgggggcgtcagctgcagcacaggcctaccccagcgggagttggaagctagccaatgaaatatgggcgttttgttcccagtgctgcccaaaaaaggcgcggagagaggttggaggcaacccccattttcatcaaaacgctccttctggggcgcctgcctgcgggagggctccaaaattggctacttggacctccaagtcgccctgttttagcccacatttcccaaaccccggaagaggcgggtgattaaaaatgcaaattgctttgcgggcgacagtaggtaggacccggctgcgaggcgctgggctggggagatcccgtgaccttagacgccctccgcgccccggattcgggaagggccgcagccggcgcttccgcctcccggtcgcggccggacaaagcccagctcctttccctgggacccgaggggctgaccggatcgggacgcgcgccttccgcagggcccgccgtcgccgcacacaggtggttttccgtccgggaggggcggcctctgcacttttatataacaatagaaccgagcgcgccggggatgcgctcttgtcgccgtcgcggcccccgccggccacgcctccatccggctccggtgccgcctccgtcctgagttgcctgcgggtggtgcccatgagacttcccaaccctaactctggaaccatggggtccagacagggacacctctggctccttttccgctccaggtctctcactaggcgacggttccgcgacggccttacaagcgatcacggggtcgtcgcgtgtcctgcccccccccccccatcccccagagcagcaatgctgcggccaaagcgcagcgcgcaagcgcgtttggagctgctagcgtgctccttgcggggcccggggaccgctgcagcctagaaaggataggggaccggcctctgtccacaaccgccactgtttacgcttgagttcccgcaggcttgcaggtctccggggtgcaggaaacgttggtgaggcctgtcgtcccaggcacctaacctaggctgccttgccagaccggttcctcttagaaaccaaactctgctcttggctccagatcgttaaaggagctcgactccccaggctcgatgggtgaccggtgatggtggtggggagcaagatctccggaacaatggctcagaatgcccccacttcaccggagcagaagaaaagtgcagggatagctgacaaggttttgggtgcttacaccacccgcccccccccctccgctgccgccaagaaagttgagaaagcccggggttggggcgcttctggttttctggacaaccaaacgcttgtttgcttagttgctttaaaatgtttcaacaaaacactagtttgtttctagagatgttggattagcatttaacacttcgttgggtcgctaaagcccaggcagtccaccagtcccaacacagcctcgcctaaaaggacattagaacaaacagaactagacttttaaaagagccaaacaaatgccacacacgatctaaaggaggaccgggttgggggtgggggagcaggggcggcgctatggcgggcttggatctagcgttaaagagaattaaaaagggggaaaacccctcaagttttattaaggctaacttaagattgtaagcgtcgcgaataagggcttttgtgcttgctaattgcactactggtgcgcaagagttagacgcgaagtgtgaactctaaacagaaggaaacacgagacaactttagtgccctggtttatgtgccctgctcctcctccaccgccgcctcctcttctttctccttcctcccgccgagcccgcagttgcagcttgtttgcactggggcttatccggagcggaaattcctttccgtttttgtgaatgacaaactcattaacaattcatcaacacaacctgttccagccggcccgtccccacggcaacagccccttccgcagcgcgctcattggctgaccgagagaatgtatccattgagacgctggctgtttgtatccattgaggagctgcctcgcacagggggtgtgctctcgcggagtcctagggactgtgagcaaacccagtcttgaataatccggcgagaaacaccgggttggatccgaggtgcagcctcagagggaaggattaagagccgctagactttttttcttttccctttttctcctctcagtggcacggagtccgaattaattggatttcattcactgggtaggaacaaaactgggcaccttcattcagagagagagattcattgactcggagagtgatctggtgcagagggaccaccgacttgacttctgtgtcgctttccctaaccgctagcctcggcttgggaaaggcgaggcggaatcaaaccccgctccgagagcgggagcttcgcgcagcgtgctcggcctatgcctgcctcgaggggcgtctgctaggcaccccgccttctcctgcagctcgacccccatgatagatacgctcagacccgtgcccttcgcgtcggaaatggcgatctgcaagacggtgtcgtggctcaacgagcagctggagctgggcaacgaacggcttctgctgatggactgccgaccacaggagctgtacgagtcgtcacacatcgaatctgccattaatgtggccatccccggcatcatgctgcggcgtctgcagaagggcaacctgcccgtgcgtgcgctcttcacgcgctgcgaggaccgggaccgctttaccaggcgctgcggcaccgacaccgtggtgctgtacgacgagaatagcagcgactggaatgagaacactggtggagagtcggtcctcgggctgctgctcaagaaactcaaagacgagggctgccgggcgttctacctggaaggtatgttgtgcgccccgggtgcagggctccgggctgggactgcaggctggggaaaatgttagcgaggtagcgatcgccgcttgcattgcgcttaggggagctagctgggccaccgtggtagcttctccttcaagggttaatcaggcacctttctttgggtaggtgtaggattaaggttcacaagagctggaaacgtagttcagggtgcagcttggcacctcgcagctcctcgaaatattaagaaaagtaatcttgtgcatttccagattcaggagaataagtgttcccagggtaagcagcgggtagtgttcctaaaggtgcgcattgaagcgtgcttctaccactgccgggggttcctagggtgcctgtccatagtgttctttgtgcttctcactagctgtaaattactacagcttctccggttacaagattgcttttcttgtttctggcaggtggcttcagtaagttccaggccgagttcgccctgcactgcgagaccaatctagacggctcgtgcagcagcagttccccgcctttgccagtgctggggctcgggggcctgcggatcagctcggactcttcctcggacattgagtctgaccttgaccgagaccccaatagtgcaacggactctgatggcagcccgctgtccaacagccagccttccttcccggtggagattttgcccttcctttacctgggctgtgccaaggactcgaccaacttggacgtgttggaagagtttggcatcaagtacatcttgaatgtcacccccaatttgcccaatctgtttgagaatgcgggcgagttcaaatacaagcaaattcctatctcggatcactggagccaaaacctgtcccagtttttccctgaggccatttctttcataggtgagactaatttacagtcattcatagagttgaagatcttaatctgttttcctgcaggctgttttgctggactgcaggtcttctactgtctttaagagtgttaattcttgtttaccttcttgcttaaagggaaaacagggcccgttgacgtagcagatcgggggactatttgagccatttaattcatacttttaaaaggaggctgttccaatcagccatgttttccttatctctagacgacaggatgtgagaggagagtgagttaaaagcactcacttgcagacaagaattctagtattgcattataattaaaaaaatatatctaggagttattttaggacacccaagttagttgttggaaagcagtttgaatactagctgttacctagctgagtgatactgcagggtactggttactgtgagcctctgggtaacctgatcccccgcaggaaggactgtgggctgagagcctaagagaagcgaagctccaggcattgtagtgcatttcctattacaaaggaactcattttcaggccatgtagacatcctgttccttctaatgggctgtcccctgtgacttccctctctcttttaaaatgcctgaatacccccattgttagctgcacaacagttgggagaataatttaatagacccttgcagtctgcttggtctgtatgagaggcattcaggaccggattgcagggtttctggtattcacaagttgaggcaaggaatgtacacacattaaggagtttttttgttgttagaaacttactacaaaagctccctttacaggaaataatctgaaatatgtgattgtgttcagtgtgcatgtttatctcccgttatacattttctggtgccttcgggggcttagttgccacatataattgttgtttactattccttctgaattcagacttcaggctaagcattttgcaaaggcttggttcctttttttttttccagtctagtgaactcttgcctttttttgtgtgtgttcccgcagatgaagcccgaggcaaaaactgtggtgtcctggtgcattgcttggcaggtatcagccgctctgtcaccgtgacagtggcgtacctcatgcagaagctcaacctgtccatgaacgatgcttacgacattgttaagatgaagaagtccaacatctcccccaacttcaacttcatgggccagctgcttgacttcgaaaggaccctgggactgagcagcccttgtgacaaccgtgtccccactccgcagctgtacttcaccacgccctccaaccagaacgtctaccaggtggactccctgcagtctacgtgaaaggcacccacctctcctagccgggagttgtccccattccttcagttcctcttgagcagcatcgaccaggctgctttctttctgtgtgtggccccgggtgtcaaaagtgtcaccagctgtctgtgttagacaaggttgccaagtgcaaaattggttattacggagggagagatttgctccattcattgtttttttggaaggacaggacatgctgtctctagatccagcaataggtttgcttctgtaccccagcctacccaagcagggactggacatccatccagatagagggtagcataggaatagggacaggagcatctgttctttaaggccttgtatggctgtttcctgttgcatctggaactaactatatatattgtcttcagtgaagactgattcaactttgggtatagtggagccaaagagatttttagctctgtatttgcggtatcggtttagaagacaaaaaaaattaaaacctgatacttttatctgattattgtaaatatttgatcttcaatcacttgacagtgtttgtttggcttgtatttgttttttatctttgggcttaaaagagatccaaagagagaaagagcagtatgccacttcttagaacaaaagtataaggaaaaaaatgttctttttaatccaaagggtatatttgcagcatgcttgaccttgatgtaccaattctgacggcattttcgtggatattattatcactaagactttgttatgatgaggtcttcagtctctttcatatatcttccttgtaactttttttttcctcttaatgtagttttgactctgccttacctttgtaaatatttggcttacagtgtctcaaggggtattttggaaagacaccaaaattgtgggttcacttttttttttttttttaaataacttcagctgtgctaaacagcatattacctctgtacaaaattcttcagggagtgtcacctcaaatgcaatactttgggttggtttctttccttttaaaaaaaaatacgaaactggaagtgtgtgtatgtgtgcgagtatgagcgcccatttggtggatgcaacaggttgagaggaagggagaattaacttgctccatgatgttcgtggtgtaaagttttgagctggaatttattataagaatgtaaaaccttaaattattaataaataactattttggctattgagcgtgtttttatttttaagtgtctcagtctatgaagttacacacttaaggggtgattggcagagctggtaggggtagcaaggttatactactcatgtctttcagatgaggtctgaaattttgtttcaagttaagacctcatagggtagactgaccacttcttgcaatacagataagccttcaggcttcattaagatttttttttatttaaacccttcccggagaagtgaagcccacagtataaacattgttgaaatataaagtttggatattcacaaatggcatggcccccagaaggctgtcccaggataatggcagccacatgttaacctctgtcttccagagtcctccactccataatccttgggcatgccaggaaggaagtagaataattttttccaggatgtctagttctgaccagaatgatcctagcatgagctatcctgggtccctttctctctttgattctcaggacattgtaatggtatgttggctttctcatggacttgcatgtggtttttatgtttgaatgttcactctgctgggtgaaatcttttgttgccaatttaagtctgcttttgtgcttagctattttaggacgtaggccagaaccaccattgaatcttagttatagatggtttttaagttttcctctgagccaaaggcttaggcatcctcttattcttctgaaggcctttttctgagctcagaagtaggcacactaaattaagaggaggaggcatgcattagtaccagaagtgctaggatgtgttttgggatatcacgcctgagctccatcattttgaagtgggaaaaaaagatgcttttcagcccagcatcatgggagatgactcttgtgctacctgacagtctacgtgtagttggcaagtggattttcattcgacaagcagttgtgtcaacttgtcttctgggagtgactttttttaagcgactaactccaagggggtgggggtggggggggggaaccagaaaaataatcaagccaggctctatttgggtgtcccaagtcagcaggaacacaaagcagaaatggaccgcagttcaacttggctcccgttcatccgggttctgaagagtttccggttctgaagagtttccggtcctggctcctggcatttgcaagcagtggttgctgtctcgctgcagctcaagtagctgactgctttctttccttttctctgatttcttctctctcatttctttttttttttatattaaagggggctggggtgcgggtaatttgagtgtgtctccctcttcgtggatcatctctgttccttccagaacttgcatccacccgagttcctaccgctgggctcaacccggacagctggcctccgcagcacttcctcttgttccactgtgcgtttgttgttttgtcagtccacttctgaaattaataatgttttctggccaagtgccacaagccattaccacaaaggggaagtaacacatatgaatagcaggaagccgtgcagggtcacagtgtgagctgaacctgtggagggaacataattgaggctggcccattcagcaagtgtctgagtgattgcaggcaaggggagcttacagccttcgagcggctcaagctgtgaaaagggggggaaaaggtttccaataaattggaagcaaatggtctttgtcaccagtctgagctaaaggagagtttagggcccccataaagttgcagtgtttggggggtttctccgctcctggcatattgtttcataagcctggtgaacacagggcgcctgtttcctctgttcccacaaaagggttcatgttaaaagggtgattttttacggttcacctaggccaggagattcaaagagctgtctgcttttcttctgtttctcctctgaacggtgggagccagtaacggaccaacagcaggagccctcacctcaccctgcctctgcctccttctcttcctgctaccctttgtgcttgcaaggagccaagggaaagctatcattttccttctcaaagttgggctgctttcctgaatggagccctcatggttactagggcaacctttgccagcagctgcaagctctctagccaggccttcttcatcacctgctatccccattagagccatcctccagtctgggagaaagcgttaccttccctgccttgtgttgggaggggggaggctctgataggagaaggggttgtctgcaggtttcaggggtgctgcaaaaccaaaccaataacccctcggggtgtgcagcagctaatgggatgaacagatttcagggttaaaagtcggagttaggaagttttgtctggtgataaaaataccaacagtctttagaggaatgaaaaatatttgcatggactttaaaactgggtggcatgaattgtgattccccttctctcgctaatggaatgagtagcccagggcaaggcttttggccccactaaagggtttggttttttttttttttttttttttttttctcatctgtgaaaagatgctgatctatccttctaggctccttttataattctagccttctgatcgtggatcggtgatactctaaaggttaaaatgagagggtcaggtggcaacaaccccgtctataatagatactgcatactgtgcattgtgggtaatactcctcttaacttctcagaatggctctgtgagataggctccattattgttctcttccaaagaggaaactgaggcagggatccccccttatggcatctagtactctattagggaatccctgtccctgcccctcttccttctcctcttccccttccccctccggtgtgtgtgtgtgtgtgtgtgtgtgtgtgtgtgtgtgtgtgtgtgtgtgtgtgtacagtattgttaccttttcgaaccgagctttggggctctgtttgctgcagactgcttgtccagtcagcgttggctgctcttcacagcatcctgtgatgctgggtaggaagcggcgcctccattttatagctgaggaagtggagtaatcagaggttacacgggccggcagggatgccagagccaaatcatgaaaaggccaagctgccgggccttttcatgtgtcagttcatctggaagcttctttccttcctctccggagagaagttgcccaaccttgggccgattagcacataagttacaacactgatgtccctcaggatctctagttagcatcatggggcctggccccgacctttgctcacactcctgggtcagctcagcggaggggggggggggggacttctgaaagcagctacctcctccctctcagaatggctctgtgagataggctccattatctgatttcttccggaagagatttgtgagagagagtcagggttaggggaagggcaagagaaagagtggaggtctgcagaccaagggacaaacagccagcgaagaacaggagatgggctgggggagggggtgggggtggggatagtaaaaacacacggaaagaacaggtcctggggtagctgatggtaggacaaaatccttgaaaagcccttagaaaacccgtccacagatttgaagctgtttcacaaggacaacttgggctgtaaatttatatgccgtgcctcacatgcagtttcccaagtaccctgcaagactttcaaagattctaatacaatccttgtgtcttcggtgctctcgtagcagttggctctgaacaggtccagtttggggataggagcaggtgtgtgcgcatgcgtgcgcgctcccctgggcgctggggcgattctttcaaacgtctttatagtccaaagggaattgaagggcacagaacaaagttcaaacagttcacaaatatttattcagaccttgatgtgagtctgtttgaagaaagaaggtgacaatgaaggacagctgaagaccttcactgagtcctccaaagtcaaaggcagggccaagcctccaggtgtcaagggatgttttctggatgtcccaaatcattgggtcctctagggacaagtggacttcttgtctgtcctgctttgtttcagtcatgcaaacaacattttataccctgtattttaatgtttacgaagggatggacggatagcgtgcagcttcacctagcgacttccctagaagcagagaccagatgtgacaggaacattttcaaagatgaagtaccaaaggcactatatgttctttgagaatgacaccttcaaagagagcaagaaaatcaacgacaacaaaatctattgttcctcctctgttagaattgtccctttctggattttggagaaaaatctaaatttttaataatgtttaaattttaaaaaatgcattctttaaattttttttagttgtactggagattgaaatcagactctttggtatattaggcaaatactcttgtttttgtttttgttttttttgagacagggtttctctgtatagccctggctgtcctggaactcactttgtagaccaggctggtctcgaactcagaaatccgcctgcctctgcctcccaagtgctgggattaaaggcgtgcgccaccaccgccaggctaggcaaatactcttactatttagctacatgcccggtccatcctgactactttgtgtgtgtatacatagttgtgtgtgtacatgtagttgtttgcagagaagagaaaacaaccttaggtactattactcttggtcaaatccactttgttgttgttgttgtcttccaaaaaaaaaaaaaaaaaaagaccagcaagttctcgccgggcagtggtggcacaagcctttaatctcagcacttgggaggccgagtcaggtggatttctgagtttgaggccagcctggtctatagagtgagttccaggacagccagggctacacagagaaaccctgtcttcaaaaaaaaaatcaaaaaataaaaaataaaaacaaggtctctcaaacgtcgtggaagcaggtgaatttggctagggtggctggctaacaagcattaagaatcctgttgggctggagaaatggctcagcagttaagagcaccgactgcacttctgaaggtcatgagttcaaatcccataaccaatgatggcttagaaccatctatattgagatctgatgctctcttctggcgtgtctgaagacagctacagtgcacttacatataataaataaataaataaataaataaataaataaataaatacataaatctaaaaagaaaaaaaaagaattctcctgtcaccacctccacagctacagtgcacttacatataataaataaataaataaataaatctaaaaagaaaaaaaaagaattctcctgtcaccacctccccagctctggaattacaagtgcacagccccacacctggtttgtgaggtgtgggcatcaagtcccaggctctcaggtttgtaagacaagagctttgccaacagagctagttcaccggcctcacactgattactttttattagtttcagtttaattcctattacacacgctaaaagaagaagaagaaagagagtgagatatggaaatagatgtgtctttaaaaatagacagctccctcccgcaggataattatagcgaggatgatccttatgtttctgtgagttattggcacgtaataaagtaccacaaccttagtggcttcaaacaatgataatttattttgtttataatcctgcactagggcggagctcaggaaggaagtgtggtctctgctcctggctatatctggtcgggacagttcaccttcagtccagagaatccaattctaagacgtctcactcagttacctggcagtgtgtcctgggagcgcatccgggactgatgcctgaaactttgcttcgtctccccgtgacctgaattgccatgcagtacggtgaacagactctgtggacgaaatctcaggaagaacacaaagggggaagttgtgtttacttttgtgactttggcacagaagccacttctgaacacaggttcagaaggggacattagaactcaccttttaagatagaaggagggccctgtttttgacagagcaaatgcaatggagttgtgtggctcccatctgtggtaaatacaacctggtgcatgttacaggaaagaggttggacggtgggccattcgaagtactagcgagctcccactaagtggaatcaaaatcatttagctgtcttcatctcattgtcctactctggagacatagctgtcaatagcttctgacactttccacggttgacaatggagtaataatgccatccaaataaatagcttttagatggcttctcacaattaaaagaggaatccgaatttttttgttgcatgcatgtgtatacacatgctcatgtgtcatggtttgtgtgtatgtgtgcatgtaggtcagacgacaactcacaggaattggttctcttttatcatgtgggttatggggattgaacttaaggctttaggttttgcaacacatgtctttatccactgaactatcctgccagcccagcaaaacagtctctgaacactgtttgctatcacagtagcttaaacacaggttatttttcttgctgcttgctcactttggatataaataaaataatgttaatttcggtgaataaggcaccgtttcttagattgattcatctaaattatcgattcagtaacttctgttcccagcgtaaacccatttttaggaagggtacatgacctagtctagtccccaaaagattctcacttctggttttggtagtgcatttcaggatgggacatgagtaaatttcaactcaccatatcaactcctccattgtctgtggaagattttctctgagagtttcaaggccccagaacctcagagtcaaaaatccctggaaacaaagtccagtgtccttttcttacaaaaggtccctaggtgatttgttttccttttgtcaagtgtgggaacttcctagatacgccaggtatcaaacaagtgtgttcaaagaacccaatgaaagggaacttgcatatttatatgagtgagtgtatatgagcatgggcccccaaagctaagtgcacacagctcagttgtgaacacacacagttataggtcccggctaggaactgtcttagagatgctctttgtcctaattcatttcttgccctacagagtgaaaacgtaagttgtgtgtaccaggcctaccagctgcccacatcttatcttttctgttctaaagtctccgtgcgctcttttcattccctaatcattgtgagtgaccttcactgaacagccttcactttcattatgacgttgttgaggtttggtggccaggaccgagacgacccgtggtatttctggagcagaggaattctggcgtcggtgtgtgtgtgtgtgtgtgtgtgtgagtgctcataagtctgtgctttctattttgttttctacatccttcctgatgatgctggccctttgtgacagccacaatacatctgacggacctcttcagggaatggcctgcagtgatgccatcttccttttcctggatcacgtctccacccggagaccccggtctctgcaggatgaggtgggtcctttcctacactggccatgatggcgcagccgacgccactaaaggtgactgtcgacaccctcacacaagctctgtgagacccccttcaccttgagtctcaccagattggtgttttagtggccagggactctggatgtcccgagaaacatgaaattttactttattgctatttcagtcgctttagaaaatggtaaacaatactagtgcgttaatccatccacacgattcatagaccttcaagctcaagcacgattactatccttttgattttccattaggtccatctgtaacctgcaatggcactaggactcagtgtaaacatatgtgcacttcctatgaaactacagcttcgtgatcgcttaaaaatatacccttttcttccagttccaataagaaagtgttatttccaagccctttctataaggatatttggaactgctcctggtctctatccattgttaacaatgaaatctaagtcatttgtttatttgagatagcatcctgctaagtagctgaggctggccgtagactggggaagacttaacagtatagaatatgtgcttagctgtgagatagattttcaccatgtgaccttagacaagtagcttagtctccctcggcttcggtgtttttcacttagatggtggggatggaaacagtaactggagtcttgaaagtcatggagacagctgttgtcagtcacttagaacagtgggaagagatgatgtttgagacgttagggatcccaattgtaatatagactttcacatactcaatgccatgtagacagcccattatacataggaacaccatacattctggaaaccatagaaggccaaatttatatgaacattgtccttttgccttgatatcaaaataattatcataaagaattgaaagatgaaagataatgagtcatactgtggctgagagcacagactctgggtttagagtcttgaagattcaaatgctagtggcctcgttagttacctgggaaatctttattttcctcattaagttttcctgttctcaaatgttaaaaagaatgaagaggccaggaggcggtggcaggtacctttagtcgtaccagcacttggcaggcagaggcaggagaatctctgtgagttttaggccagcctggtctacaaagtgagttccaggacagatagagctgcactgaagagacctcgtctcaggagaaaagaaaaaaaaaaaatgatggcgatactaatactgttgactgtacagtgttgttgtggggttaagtggtaaagttcacataaagtatatagcactttgactaccccattgagaacaatattaactctcttcacaaaaaagagatctgaaaaactattgtggacgttcagaggagccctaggtctctgtctactgtatggagaaatgtaaaaccacggaaaagacgataaatcacaaagccagtccccgccaccacagcttttgtgatttgggacctcattccgaccccgtgtgctaggcaagtgttctgctgctgtgctacattcaatgccttagcttactgaagaatctaacacactgtgccagtattattaaactggcttaactcttttggtttttgttatatatttttttgtttatttgtttttctagacaaggtttttctgtgtagccccggctgtcctgagactcactatgtagaccaggctggcccctgtcttaactgagacgtccaactgtctctgcctcccaagtgctggattaaagaaaggtgtgtgctgccaccaatgtcgttgctgctaccaccacccaactgaggactttttgctttgtttaaagggcttgtttttatttttaaaattatgtgtatgcgtgtgtacaggtgggacgtgccgtatgagtgcactgccctaaaagtccatactaaggtgactgggaactagctcacacatcatgcctgaaactgagaggcaccgtcgcctctatctagcccagcgaaggttttacagcgctgttatgtcttcatctttcagataaggaaacagaaacccagtaactttaagtgcaataacttgccaaagctcatccctgcaccctgcccagaaaagtactgagaagctatgggtctacccaacggactagagtctcagctgcttccttgtcccagctcctggaaactggctactgctcatctttccgggatgagggttggtggggagggggcgactacctggaaggatggtaaacaaaaacatggaatctgagccacatactttgtggcgtatgtcatacagtttatattaagaaataaaataagatttttttttctctcgctgggatgtccactgagtggtatggggtgattctcacacattctaaccccctgattctcttgtccttgtcttttatctgtaatcccagtaccatctatgtggactcttttcttttttcttttctctttcctttccttttctttctttttttttt

SEQ ID NO: 1293 - DNA, 2794 bp, Mus musculus
gtatccattgaggagctgcctcgcacagggggtgtgctctcgcggagtcctagggactgtgagcaaacccagtcttgaataatccggcgagaaacaccgggttggatccgaggtgcagcctcagagggaaggattaagagccgctagactttttttcttttccctttttctcctctcagtggcacggagtccgaattaattggatttcattcactgggtaggaacaaaactgggcaccttcattcagagagagagattcattgactcggagagtgatctggtgcagagggaccaccgacttgacttctgtgtcgctttccctaaccgctagcctcggcttgggaaaggcgaggcggaatcaaaccccgctccgagagcgggagcttcgcgcagcgtgctcggcctatgcctgcctcgaggggcgtctgctaggcaccccgccttctcctgcagctcgacccccatgatagatacgctcagacccgtgcccttcgcgtcggaaatggcgatctgcaagacggtgtcgtggctcaacgagcagctggagctgggcaacgaacggcttctgctgatggactgccgaccacaggagctgtacgagtcgtcacacatcgaatctgccattaatgtggccatccccggcatcatgctgcggcgtctgcagaagggcaacctgcccgtgcgtgcgctcttcacgcgctgcgaggaccgggaccgctttaccaggcgctgcggcaccgacaccgtggtgctgtacgacgagaatagcagcgactggaatgagaacactggtggagagtcggtcctcgggctgctgctcaagaaactcaaagacgagggctgccgggcgttctacctggaaggtggcttcagtaagttccaggccgagttcgccctgcactgcgagaccaatctagacggctcgtgcagcagcagttccccgcctttgccagtgctggggctcgggggcctgcggatcagctcggactcttcctcggacattgagtctgaccttgaccgagaccccaatagtgcaacggactctgatggcagcccgctgtccaacagccagccttccttcccggtggagattttgcccttcctttacctgggctgtgccaaggactcgaccaacttggacgtgttggaagagtttggcatcaagtacatcttgaatgtcacccccaatttgcccaatctgtttgagaatgcgggcgagttcaaatacaagcaaattcctatctcggatcactggagccaaaacctgtcccagtttttccctgaggccatttctttcatagatgaagcccgaggcaaaaactgtggtgtcctggtgcattgcttggcaggtatcagccgctctgtcaccgtgacagtggcgtacctcatgcagaagctcaacctgtccatgaacgatgcttacgacattgttaagatgaagaagtccaacatctcccccaacttcaacttcatgggccagctgcttgacttcgaaaggaccctgggactgagcagcccttgtgacaaccgtgtccccactccgcagctgtacttcaccacgccctccaaccagaacgtctaccaggtggactccctgcagtctacgtgaaaggcacccacctctcctagccgggagttgtccccattccttcagttcctcttgagcagcatcgaccaggctgctttctttctgtgtgtggccccgggtgtcaaaagtgtcaccagctgtctgtgttagacaaggttgccaagtgcaaaattggttattacggagggagagatttgctccattcattgtttttttggaaggacaggacatgctgtctctagatccagcaataggtttgcttctgtaccccagcctacccaagcagggactggacatccatccagatagagggtagcataggaatagggacaggagcatctgttctttaaggccttgtatggctgtttcctgttgcatctggaactaactatatatattgtcttcagtgaagactgattcaactttgggtatagtggagccaaagagatttttagctctgtatttgcggtatcggtttagaagacaaaaaaaattaaaacctgatacttttatctgattattgtaaatatttgatcttcaatcacttgacagtgtttgtttggcttgtatttgttttttatctttgggcttaaaagagatccaaagagagaaagagcagtatgccacttcttagaacaaaagtataaggaaaaaaatgttctttttaatccaaagggtatatttgcagcatgcttgaccttgatgtaccaattctgacggcattttcgtggatattattatcactaagactttgttatgatgaggtcttcagtctctttcatatatcttccttgtaactttttttttcctcttaatgtagttttgactctgccttacctttgtaaatatttggcttacagtgtctcaaggggtattttggaaagacaccaaaattgtgggttcacttttttttttttttttaaataacttcagctgtgctaaacagcatattacctctgtacaaaattcttcagggagtgtcacctcaaatgcaatactttgggttggtttctttccttttaaaaaaaaatacgaaactggaagtgtgtgtatgtgtgcgagtatgagcgcccatttggtggatgcaacaggttgagaggaagggagaattaacttgctccatgatgttcgtggtgtaaagttttgagctggaatttattataagaatgtaaaaccttaaattattaataaataactattttggct

SEQ ID NO: 1294 - protein, 379 aa, Mus musculus
MIDTLRPVPFASEMAICKTVSWLNEQLELGNERLLLMDCRPQELYESSHIESAINVAIPGIMLRRLQKGNLPVRALFTRCEDRDRFTRRCGTDTVVLYDENSSDWNENTGGESVLGLLLKKLKDEGCRAFYLEGGFSKFQAEFALHCETNLDGSCSSSSPPLPVLGLGGLRISSDSSSDIESDLDRDPNSATDSDGSPLSNSQPSFPVEILPFLYLGCAKDSTNLDVLEEFGIKYILNVTPNLPNLFENAGEFKYKQIPISDHWSQNLSQFFPEAISFIDERKNCGVLVHCLAGISRSVTVTVAYLMQKLNLSMNDAYDIVKMKKSNISPNFNFMGQLLDFERTLGLSSPCDNRVPTPQLYFTTPSNQNVYQVDSLQST

SEQ ID NO: 1295 - DNA, 26041 bp, Homo sapiens
agttatgcctgacacagcattttcctgttacgaagttctgatgcttgtgtctaaagaatactatttgactcatctttccagttacttcaagaacatttctacaattgctgaacagagtggatgagtgaggaatctgactatctgggatgtcactggaagcttctcaaagtttggtccacctgtataagccactgctggctgctggactacaatatagttgcctgagcccatccctagatcttccgaatcagagtccctgtcgggtaggccaggatatggactgagagcaagtacctccaggtgtttctaaacatttcatttctagacctactggtctgggtgggaagctcttgggctcactggaaacctctgcctaggcaagggactgttaggggatgattgttgtgaatgcttctaaaccagttgttagtccaggccacatatcagaattctctgggcagcttttggaaaatatcaatgccaagatccaccttacatcaattaaatcagaattactggttatgggacttgggcacctatatttttttaaaaagctttccttttaagccagtttgtctatagagtacttgtcagattcttttgatcaaaatcaggggttagtagttagaggctccagatttaggttacattccacaccacacttcatctcactctcactataaatgtaaatttcacagcaaatttaactagattaaaaattatgctttagcagtaggtacagttatacacactgggaaaaagtccttctctctgccataagtactctaattaacagcacattgcatgaaagggccacactgaagtcagcaatgttctaaaggtgaacctgcaggtcgtgtcatctcatgggggcaggatcctaggctcagtgctggaagccgcaccatgacacagacagttgagctgtctgctgtcttgtaccttggtcatgcaaggtccatgtgtcctgccacacctcctctaccacatattgtaagtgcaccaatttcaagaacataaataatttgtttttaggccaggtgcagtggctcacgcctgtaatcccagcactttgggaggccaaggtaggcggatcacctgaggtcgggagttctagaacagcctgaccaacatggagaaaccccatctctactaaaaatacaaaattagccgggcgtggtggcaggtgcctgtaatcccagctactcaggaggctgaggcaggataatgactcgaacccaggaggcggaggttgcggtgagccgagattgcgccattgcactccagcctgggtgacaagagtgagactctgtccccctgccaaaaaaaaaaaagaaagaatttgtttttaatatcctttatactaaattttaaaggtcatcaagtggattcacattaaaaaatgccagctaattattcctgcctaaagcatagagtactacagctggttacactgaattacttaaattactagagcattgggatagctgagttcatggaggttcctggagtatggtgcacctggaaagggcatggaaactgaagccccttcccacatgccttgccctacacatctcttcatctgtatcctttgtaatagcttttataataaactcgtaaatgagaaaacccccttggcctttaaattgaaatggaaaatagccataaagtggaacaatatgtacctgaaagactctagtcactacactgcatcatcaaacttaatcggttaaagtaaacttattatgtgataacaccagagtactaggagaaaacaatgcatgagatgattacataaagtgcttaatacaatgcctcacacaaagttgcttctaaataaataattacaagcaaaatataacagttggaaaatgcaataatatagatgttaaactaaaatttaaaagatttaacatttgaatacccaccaccaccctaatcaagatatagaacatttccctcactccaaaaagttcccccattcccctttccaacaaattacctgtctcttcaagacaaccacatgcaggcagcatgatctcccagatatctatgccctaatgcctggaacctgtgaatatgttaccttacatggcaaaggagactttaaagaccttgagatggggagactatcctggattacctaggtgggcccaatgtaacctcatgagtccttaaacgtagaagaggagagaagtggtagaagaggcagcagagatttgaggcatgaaaaccatgtgatctgctgttgttggccttgaagacacaggaaaggaggcacatgcaaaggaatgcaggtggcctctagaagttgggaacatagcaagcaaacagggaccagagtcctacacccataaggactaaattcagccaacaacctgaataatcagggaaacaggttttcccctagagcctccaaaatgaaaagcagccctgctgacaccttgagtttagtccagggagacccctttgggacttatgacgtacagaactgaaaaataataaatttgtgttaagccaaaaacaaaagcaaattaccatacagaaaatataacaaaaggacagagaaatcccatcataaaggctttttccctgggaaattggttagggaggggcatgacctagcaagggtttacactttttttttttttttttttttgagagggagtcttgctctgtcgcccaggctggagtgcagtggcgcgatcttggctcactgcaagctccacctcccgggttcatgccattctcctgcctcagcctcccgagtagctgagactacaggtgcccatcacaacacccggccaattttttttttttttttttttttttgtattttttagtagagatggggtttcaccttgttagccaggatggtctccatctcctgacctcgtgatctgcctgccttggcctcccaaaaatgctgggattacaggcgtgagccaccatgcccggccaggtttacactttggaggtttgggtaaggaatctaaaacttctggtaggtccagcaaaacctgatggatttataccaaaggatatatacttatcggatgtttaataaaaataatcttggaatcatatatgtgcaaaaattagtatggaaactgtgctaagcaggtgtctgtttactcaaacctgggtatgtttctacaaggtggcttctagcacaggctttctcatctgtccatgaatggaagtttccttccagtcacagaagagtggctctcatgctcagctctgaccctcccctcttccccctccttgtattctgaaaagctcctgctgggcatgaagtcggaaggagaaaggagattcccagagaatgggacttcttatatgcaggactcataatataaatgtgtgtttccattagctgccttgaacccagattactgagagacgacagctatgtggctcaggctagtagatttccaattctcctcttgcacaatatgcagtccataggatcagctatgagccagcattgatggagcagggaaagtgcctgctacttcagcaggtgagtcctagagtgatggggaacccctggtacgcagtgtgttttcactgtccccaaactatccaggtatctcagcccattaagaaacctcaatttctgggttgcttatatcagcaactaagaggggccgtaaagcagttgattctgttctttgaaacttttttcaaaaaatgtgtatggattgtttttctcttcctgagaactaaattaacactatagtgtttttttgttatatgatcccttttcagcaaagtcaataaacatttattaagagttgtggttgggtgcggtagcttacatctgtaatcccagcactttggaaggctggtggatcacttgaggccaggagttcaagaccatcctgggcaatgtggcaaaaccctgtctctactaaaaatacaaaaattagctgggcatagtagtgcacgtctgtaattgcagctacttgagaggttgaggcacaagaattgcttcaacctggtaggcggaagttgtagtgagccgagatcgtgccactgcactccaccctggtgacagagtgagactgtctcaaagaaaaaaaaaagaattgtgtgtatatgtgtgtgtgtgtgtgtaacaataaaaacaggtagcaatcaatgagttattgttctaggactgtttctacccactttacaaatataaatcattgattgcaatagctctgtgatagagtattcccattttacagataaggaaactgagacatggggagatgaaatggtttccctgagtcatagggccagaaagtaggtaagccaggattagaatccaggttgggctgattccacaagtcctagtcttgactagcaagataaagtgtaacaaattatgtagaagctatcatggtataccaggttgaattcattcagggccactcatcaggttggcagcagtgtgtatgtactaaggagctttgaagggactgagatgcaagtttggattccagcataaattacctgacattagagctcaggcttccccaccttaaagttgtgataatggtatacctgttttgcaaggttatcacaatggttagatttaacccgtacaatggttggtgtagaataagttgtagccactatgttgttatttcatgatatgtccagatataacttttataatgaacccaccaacagccttaagcagtgttgtttagactggagtttggggctccctagggttctattaatatattcttgggggatctgcaagttcttaaagtttgaaaaactgagctaaagcattcctgtattgtggacacacacagttacttccactgatttctgaagcaaaaatagggtggcaggaaatagtacccacttaggaaaataatgagttctcttacacaacagctatatgtactactcacacctgcgtaaataaagcaacacaagatggagagaaaagtcaccagaggaaacagcccacacagggaggctcacggcaaatattccacatgaagatgcaacatggataatgcccgacaccacacatgtggtgcttcatgacacgacatgagaaggttttggagagctgaatacatatagtctctcacttacctggctggcaatgtaagctatactttcccactaaggatcatcgctggggctttcaaaatagtacaacgggaaacaaggtaccgtcaactcctttccaaaagaaggtaaatgcgcttactcagaaatgtactgcagaaatgccaacgtcatgagtttcttatatatacatttatatatgctttttacatttcctgctttgtaaaaataaaggataaggaagaagaatcaatgaatattttcccagtggaaggcatggaattaaaacatctgaaataaaaaattaacattgctatcttttaatgaatttctttgctagagaccgtctagcttttaaaaaaattctagataaagtctctacaggagcctgaatgtaaattaatttgtctttcatcagatgacgggaaacagaaatgcaagaaagctgacgaagaccgtaatttttaaaagcttagccaaattggctaaggtctgaatttcacaatagttcatgtttttcttcaggtggtatcatcctggcaatgcgtgaatgtgccatctcgttcatggggaagctccaatctccccctagatatgcttgtgggtgtgattctggtgttgctgtccagctacctctgccttgaggtctaacctagcctgcctttccccttcccccgcattgtttggagaaatcattaacccgtgctcaataagcccttgcagctcctcatcatggggcaagctgcacggagcttccacgtgagaagcagtttgattgcaaacctggatctgcaattcccaggggctgccctcatggaattttaattgggggctatttgaaattccctttggctttctcacagcctatcactgcctataagtcatgttacctactgtcagttccttaggcttcttgtgtttctcggttgctactgttgtggtacaacttcttggtatcttttaaaagcactcatcagaagaccttagggacagttttgtgcaacccatatacattttacattaagccatactatttcaggtgtatccttcaaatacagttaaattcagttttgaagttttagctgcactgaaagccactgtcactttgagggcctacctgggacccctaaatgcatttacattttaagtcagaacttccaaaactctccttatttgctgaaaatctgtttaactgttttcacatgatgtgttaataaatgtcattgtattcacagagattattccaagaagattaaaggtcatgctagcccatttgcatcttataaatctcaagtgccctcaaactcaggaaaattcctgcaaaagtggaatgtttctcaaatggcctagagaaaattttataaccaaaatacactgctttaaaaattttttttttttaactaacaatttttaaggaactttccagggggaaacaccaggaggaattcaagcacaagcacaggtgctcggtgcacacatacatacacacacacacacacacacacacacagaggaagaaacaagaatctatgaaagtgcttctctgcactcatgagaatggatcacagatgatctgctatctccaatttttaaatacagacctcttcatatgaatgatatcctctgaagggcactgaggcctctggaattaaggaagcctgtaattcttccaactactacagcccttatctcctaagagagcttttcctcagtgcctcacaggaatggcaatatcaccaccaacagcattccttatgcaggaatgaagtggtgatattttaaaaatcatcttctgaataccgactttgtgccctacacttctcgtgtgtcatctcagttgtgtctaatcctcacagtcctttgagggaggaatatatattcccaatgttacacacttccgaattccttttcttgctttttctctatagcgctttcactttctaatatataattatttgttttgttaattggactgtcctcattagaatgtaaacttcagtgaggcaggttattgttgtctgtttattctctactgctttcctggaatctagaataaatgcatcaatgaatgaatgaagtgaggcccagactactactgagtgacagaggtttgaacctaggcttatgtgctgtgctgacgcactagataaccaatgacacttgtgaagattaggatctagggcatattctaagagagataaaatatgcaacatttagtgaatgtttgactgatgaagggttgcgtgcaaagaaaaccactggtgtgtaaaaggagcagggaaagcagcctcgcttttgatctttgacatggaggatgcaacagaaaacgtgaggctggagaaagcctggaggtcaaaattcaaaatgctgaccttgaaattcttcacatgtgggcagggaataccacgtggaggtgaatatagtgtccataacactctatgtaatccgtgcatgtgggcatccttaagagtctgtaaagggtttggcctcacgtcttgacactctgttgctactgtgtgcccttgggcaaattctttaatctttgtaaatgggataatttacatgttttttctgaagactgtccgaaattatgcaagtaaacacagaaacaagacggtacccatcatgcagttaagtgcccaatatgcattgttgtatcagtttgctgtggctggagaacagcgtgttccaaaggtgaccagtagggagaaatcagaaatgtagctgggtccattctgataactgtgctaaaggatttttgatcctggtctacgataacaccccctttacttgacagctgaattggaacggattaaatcggttagggtagtatctcagagggctttgctgcagatgagcgagtccaggcgggctgtcaagcgagcctcaaggggcatctgtgggatgcccaaaccgtgtccccaagccgaggcctttttacaggtcctcaattcagaatgaaaaattaattccaacggctaatagcaccccaccaccactttaggacgtttcaccgtacccattttgtcgtcacagggaccctatgaagcagatagttttatcttcgttatgccgacgtggaagactgcaacttagaacggctaaatgatttaactaagggcgcttacctaggaagaagcgggggacataatgcaaacgagggccgtcccactccagaagcccttttcgcagcatttctagtactgagcagtcagaacgccactttaatcaatgcgccaggaaacactggcattcccttggcgataaagttcagaagcatgggtaaaactacagtttcgatgtatcctcccgaatctatagtcatactcaagtagctgcgtattaaaacaggcaaagtagaaacccaacttccctccctttctcttctgttggaggtcctgtgctgaacctccaacaggtttgctcttctcagttccgctgaagggcatcctgcctcttccctccctgtccccaggtcccaatgactgaaacgtctcggggtgggaacttctgtgacagatcgtggaggacagggggagtcaactccagcgcaggcctcccccggctgaaactagaagatacccagtgaaatatacgagttttgttccaaggactgcccaaaaatggtgcggagaggagctcggcaatccccacctttgtcgaacacgctcctccaggggcggcctgcctgaagcagagctccaaaattggcaacctaggcctcgcagccgcctttttttagcctacatttcccaaaccagggaagaggcgggtgactaaaaatgcaaattgcagcgggggtgttagcaggcatgcccgtgggtgcggggcgtcgggcgaagggagaccccgcgaccttaggcgccctcgcggtgttcacggtaggcgcaaagcgcagcaagggacactccccaaagccgcaccccgccggacggctgcccccgcttccgcctctcaggcagcggtgggacaaagcgcggcctcttttccgccggggtttagggagggaaggccggattagggcccgcgccttccggctgcatccctctcgcgccgcgccggccgcacacaggtggttttccgctcgggaggggcaggcttcggcacttttatataacaatagagctctgcgcgccgggaacgcgcctccccgccgccgcggcccccacccggccacgcctccatccggcttccaatccgtccgccccgcggcgcctgggccgagtgctgctcgctggcctggcccgcacctccccaaagttacctgctggctttgcagcgcggtagagacgttcccctcgactccttgggagcgaggagccaggggggtcccggcaggcactcgtccttgctccccccaccctccccagatctctatggacccgggagtccctcgctgagccccgcacccgtccactgcgtcgcgcacagccccgtgcccaagcggggagacggggacggcggggcggtggcagggagcgcagcgcgcaggcgcggctggtgctccccggagtgcccggcgctggacaaagggaggaggcggcggcaggagagggctggggaggccccctctgacatgcctccctgccaactgtaaccaatcgtcgagcccccctgccgagcccccgcagcctgcaggtcttgcgggaggacttcctcacgcctcgcccatggcggggactgctggcccggcccggcgcgtcccagcacacctcgctcaggcagccccgccagaccggctcccccgtcagaagccgagctccttgcccagaaatcattaaccagcgcgacctcccagcaggcgatggtggtggtggggcggggggagagatatagattcccccgaacaatggcttgtaactccccacgccgccggagcggaatacagtaaaagcactggactgacctaagagtttgtttctgcactctacattgttttaatgaaaataaaatgttattttaagaaaaaaggttttcttctgattttctgcacaaccagacgtttgtttgtttgctttaaaatgtttcaacaaaatcctggtttgtttcgaaatatgttggattagcatttaacacctcatcggtcactaaagcccagtcagttcaccagccccaacacagcctcggctaaaagaacatcagagcaaacagagctgggcctttaaaagtggcaaacaaatgccacacaccgcctaaagaaggggggttgggggaggggagggttaaggcgaacttgggtccaaatgagtttgaagggaatacaaagaacgaaaagtcagcacaagttttcctaaagctagctcgcgaacgcaagcgtcgcgaacaagggcttttgtgcatgctaattgcgccattggtgcgcaaaagttccgacgcgaagtgtgaactctcaacagaaggaaacatgagacaactgaagtgccctggtttatgtgccctgctcctcctccgctgccgcctccccttctttctccttcctcccgccgagcccgctgttgcagcttgtttgcactggggcttatccggagcggaaattcctttccgtttttgtgaatgacaaactcattaacaattcatcaacacaacctgttccagccggcccgtccccacggcaacagccccttccgcagcacgctcattggctggcccggagaatgtatccattgagacgctcgctgtttgtatccattgaggagctgcctcgcgcagggggtgtgcgaggctgagtccaagagatagcaaatcgagtcttaaataatccggggagaaagacgcccgggtagatttgaggtgcagccttggagggagggattagaagccgctagactttttttcctcccctctcagtagcacggagtccgaattaattggatttcattcactggggaggaacaaaaactatctgggcagcttcattgagagagattcattgacactaagagccagcggctgcagctgggtgcagagagaacctccggctttacttctgtctcgtctgccccaaccgctagcctcggcttgggtaaggcgaggcggaattaaaccccgctccgagagcggcagcttcgcgcgcggtgcgctcggcctatgcctgccccgaggggcgtctggtaggcaccccgccctctcccgcagctcgacccccatgatagatacgctcagacccgtgcccttcgcgtcggaaatggcgatcagcaagacggtggcgtggctcaacgagcagctggagctgggcaacgagcggctgctgctgatggactgccggccgcaggagctatacgagtcgtcgcacatcgagtcggccatcaacgtggccatcccgggcatcatgctgcggcgcctgcagaagggtaacctgccggtgcgcgcgctcttcacgcgcggcgaggaccgggaccgcttcacccggcgctgtggcaccgacacagtggtgctctacgacgagagcagcagcgactggaacgagaatacgggcggcgagtcggtgctcgggctgctgctcaagaagctcaaggacgagggctgccgggcgttctacctggaaggtacgcgcccagggaactccgcgcgcggggcagggctaggggcgcagggctgcgggcggggcgcgtggattgaaaatacctctgctccgctcagctggagcttcggagccgcgctgcccgcctagggaccggcagccggcgaggtaggggccgcgaaccgcgcgttccgcaccagagaaccgggccggctcagaatccactcgcttccggctgcgggtaccggcggtttctttctaacgggttctgcgccttcttagccagaacatcctccaccatcaccctgttttctatcgttcgattttgaattaagatttgcaggacgggagagattgttggggatgcaaattggcacatcttagctctcaaaatattccaaaaagttgccattttgtctatttccggattcaagcgaataagggttccctggcgaggcgggcccgttcgttccattcccgatggtgcacatttaaagtgtgtttctcttatagatggttctgtatgtagggggttcgtaggatgcttgtggtgtttcttgcgccgggctgcggttcttacaagctgtgaaaactactacggcttctcaggttagatgattgcttttctcgttctggcaggtggcttcagtaagttccaagccgagttctccctgcattgcgagaccaatctagacggctcgtgtagcagcagctcgccgccgttgccagtgctggggctcgggggcctgcggatcagctctgactcttcctcggacatcgagtctgaccttgaccgagaccccaatagtgcaacagactcggatggtagtccgctgtccaacagccagccttccttcccagtggagatcttgcccttcctctacttgggctgtgccaaagactccaccaacttggacgtgttggaggaattcggcatcaagtacatcttgaacgtcacccccaatttgccgaatctctttgagaacgcaggagagtttaaatacaagcaaatccccatctcggatcactggagccaaaacctgtcccagtttttccctgaggccatttctttcataggtgagactaattaatagtcgtcgctctgacatttaaatgcaaaattcctagccattcatagagtttaagctgttaatcgttcttgctgcttgctaatttgtctgactgcaggtctctaatgttcctagagcgtccttaattctggtttatcttcttgctaaaggaagaaaacctgccttttgacatggctgcagatcacaggtgtatttgaaacgctgtttcttgaatctttgaattcagtcattgacagtcgttcataatcggacaacagatttttccccccagtctttggactcaggggaagggtcagatagaagtactcactatagacaggaattccagcattgctttataatttaaaaacatctaggagttattttaggacatcaagttagttgttggaaagcagtatgaatgctgaatgttatccagttgaatgatgcggtgatactggtaacagtgagacagtgggtaacctgagcccagcaggaagaactgtgggctggaagcctgggagaagtgaatctccaggcattgtaatgcatttcctattacaaaggaactcattttcaggccgtgtcgacatcctgttcctcctaatgggccgtcccctgtgacttccctctctcttttaaaatgcctgaatacctccattgttagctgcacaacatttggagcataatttaatagacccttgcagtctggttgtctgtgtaaaaggcattcacgaacatattgcagggtttctggtattcacatgccgaggcaaagaatgcacccattaaggagttttttgttggcagaaacttaatacaaaagctctcttttcagaaaatatctgaaatatgtaattgtgtccagtgtacatgtttcatttcagtgatacattttctgctgcttgtagggctcaactgccacacacaactattattattattatgttttcaagttcagtttttagactgatcattcacaaagggtggttttcagtctgctgagatcttgcttttctttttgtgttcacagatgaagcccggggcaagaactgtggtgtcttggtacattgcttggctggcattagccgctcagtcactgtgactgtggcttaccttatgcagaagctcaatctgtcgatgaacgatgcctatgacattgtcaaaatgaaaaaatccaacatatcccctaacttcaacttcatgggtcagctgctggacttcgagaggacgctgggactcagcagcccatgtgacaacagggttccagcacagcagctgtattttaccaccccttccaaccagaatgtataccaggtggactctctgcaatctacgtgaaagaccccacacccctccttgctggaatgtgtctggcccttcagcagtttctcttggcagcatcagctgggctgctttctttgtgtgtggccccaggtgtcaaaatgacaccagctgtctgtactagacaaggttaccaagtgcggaattggttaatactaacagagagatttgctccattctctttggaataacaggacatgctgtatagatacaggcagtaggtttgctctgtacccatgtgtacagcctacccatgcagggactgggattcgaggacttccaggcgcatagggtagaaccaaatgatagggtaggagcatgtgttctttagggccttgtaaggctgtttccttttgcatctggaactgactatataattgtcttcaatgaagactaattcaattttgcatatagaggagccaaagagagatttcagctctgtatttgtggtatcagtttggaaaaaaaaatctgatactccatttgattattgtaaatatttgatcttgaatcacttgacagtgtttgtttgaattgtgtttgttttttcctttgatgggcttaaaagaaattatccaaagggagaaagagcagtatgccacttcttaaaacagaacaaaacaaaaaaagaaaattgtgctcttttctaatccaaagggtatatttgcagcatgcttgactttaccaattctgatgacatctttacggacactattatcactaagaccttgttatggcgaagtctttagtctttttcatgtattttcctcatgattttttctctttatgtagtttgactatgccttacctttgtaaatatttttgcttgtgttgtcgcaaaggggataatctgggaaagacaccaaatcatgggctcactttaaaaaaagaaagaataaaaaaaccttcagctgtgctaaacagtatattacctctgtataaaattcttcagggagtgtcacctcaaatgcaatactttgggttggtttctttcctttaaaaaaatttgtataaaactggaagtgtgtgtgtgtgagcatgggtacccatttgataagagaaatgcatttgattgtgaagaagggagagttaaattctccattatgttcgtggtgtaaagtttagagctggaatttattataagaatgtaaaaccttaaattattaataaataactattttggctattgaatgtgtgtttttaaaaactcagttatacctatgtgtgaagtgacacattttagaactttttcattcagggattgattttgacttgtaggcatagtagggcaaggttcttttaagcttttcctagaacgtttttcagcagcagtttatgaaattcatcgtttgccacgaataaagatgacatcctagaatggaccgactgtaccgtgtatatgaacaatacctcttatgagtatagttccggcttaagattttaaagcccctgaagaaaaatgaacctatagagcatagcttgctgaggaatacaatttggatattaaccacagagaggtgtagcagaataccaagatgacagccacatgttaacctcctccctatccttcactgtcaggatcttctgctttataatgctgagataatgccaaagaggaagtagggataattctttttccagtctgttgtcatgggcaattctacctgcagatatcctagtgtgagaatgctgaatccagaatgatgtctccactttttcccctagcatgcgcatggcaaggcatatctaagcttcctcaccgtgtcaggatatggctttagaattttacattggcacttaggaggcaactttgtcatccctgttgtaatgtgcttttttgtttaactggcttgggatgtgggtcagaaacccttattgaaacttgtggggattattttagtttcttttcaagctaaagactttatatcttgccatttttcttgggacctaccctctccttacctcaaatgtaaaaatacacaaaccaaaataaaaggcaggtgtatggaatcaaaagaactagaacgtacttatatttggggctctttttgcatgagctcagtcccttcatgtgaagtggggagaagaatgagcttttcacctacatggcacatgagttgactgcttggtcgtctacactaacttaggaggcaagtggccttcattcgatggcaatcatataaaactgtccatggtgatttttaagcaactaagtataaaaagcaaacagaaatagtgcaaatatatatatataccaagtcagtctgtcctatttgggtgtcccaagtcagcaagagcacagaaaggagaagtggattgcagttcaacttggctcgtgttaatccagttctgaacggtttccgctcctggcattccctaaactgcctgttcaaagtaaggatttgcaagcagcgttagcaatttcctgtccagctgcagctcaagtagctgggtgcttttcccccctttcttttctctgatttcttttctctttctttttctttctttcgttttttaaaaaaatatgggctgtggataattttagtgcatttcctctttgtggattattatctctttcctcctagaacctgcatacattgagttcctactgcttggctcaagccgacagctggcctccccagcacttcctctcgttttactgtgggtttgttgtttgtcagtccacttctgaaattaataatgttttctggctaagtgccacaagccattaccacaaaggggaagtaacacatatgaatagcaggaagccatgcagggtcacagtgtgagctgaacctgtggagggagcataattgagcctggcccattcagcaagtgtctgactgcaatttggggagagggagctcgctgcatctaagcagctcaagctgtgaaaaaaaaaaaagtttccaataaattgggagcaaatggtctttgtcaccagtctgaataaaggagagagagagtatgaagagcttagagcctccataaagttgcaatgtttgaggtttctcccccttctcctgacatattgtttcagaaggctggtgaacagaggggtgcctgtttccctctattctcaccaaaggactcatgttaaatgggtggtttttacggttcacataggccagaagattcaaagagctattctctttccttctttttcttctgtggaaggtggaaggttgtaactgacagcatgggcccccacctctctctgtgcctccctttcttccagctatatcagggctcctctggttcctttgtgcttgcagtagccgcgtgaaggcgatcattttgcatcttggagttgggctggcttcctgaatggagcccgcacggttactagggcaacctttgccagcagctgcagttccaccgcctccttcctcacctgctgtccccattagtagcttcctcaggtctctgagaaagcgctacctttcctggccttttgcaggggcaggggggtagggtggggtatggcttttgggaaggggaggttatcagcaggtttcctgggagctgcaggagacagagattgcagtggttaatagtatgaactggtcttagcgttaaaataggaatgaaaaagggttatctggggataaaaataccaacacagtcttcaaaggaatgaaaactgagacttgcaccaaccttgacaattaggagacctgaactgtagctgctgctttcttgctaatgaatcaggtagccctgggcagggcacccaatcttaccgcatttcttttttcttgtctgtaaaaatgagggagtttttacctcccattctaggattctctcataattccagcttctgttcatggattggtgacacttattacatgataaaatgaggtgcggagcaggtgaaacaaataactaacatttatcatgagtaccagatactatactttgtatctcatttaatcttcaaaacagctctgtgagataggtcctattattatctttattttgcaaagaggaaactgaggcagagaaaggccaataaagcctaaagccacctttatgggacacctgacacataatgttagagaaggtttgcatatccagtgcttgttactgcagaactgaaccttgagcctttggctcttcctgttggaaactgcttgtcatcagtatttgctcccctttataaagtctcatgatgtcggctaggaaatgctgtccccattatacagctgaggaagtggaggaagcagaggttaaatgactagccaaattccatgtgaattccacagccacatgggaggccccagctggtgtgctgtcagagaggtgtccaccgggggtaaacttccatcctccttctccgcagagaagttgctcttccttggtcccattggcacttaaattataaaactacttttcctaagtatctctaaaatggctaccagctagcatagggcctgaccctgacccttgcccatactcccctttcaggatgacacaactaaactggccccaaagaagttcacttcctcactcttatccctcctagaggcaaactgggagagggaggtgggtcaggggaaaggggaagggtgtgaagaagcaaggaggagaggcagaagacatatatatggtgcaggtctacagaagaagagaggtaaactgaccagcaaattagcaaataatggagatgggggtttttaggatacagccagggcagatcatgtggtagctggctgtaagaaaatatccttgaaatgtcctcttaaaaaaagtcagtcttcagactttcagctgcttcagaaggattactttgggtgtaaatttatatgcagttcctcacacagccataatcgttttcggaaagatcctgcaagactttcaaatacccttgttcctcccgtgttctcactgctcacttagcaattggccctgaatcagtccagttatggtgaacgaattttcaaacttctttaaagtccaaaatcgatttcctgagaatattgaagggcacagaacaaagttcaaacaactcacaaatatttatccaggccttggtgtgcattgcactggttcgatgaaacaagttaaaaataaaaggcaacgaaagacctcccaggagccctcagaggctgaaggcaatgacccgtttctagatggaaccgctaaagtgcccaaatcaaagaggagccctgaagaaactaccgggcaaggtcttgtatttccctatctgcttccaactaacattttagatcccacattttatttttttatataggaaaggattaatggcccacatgtatgcaatttgacccactcactttcttactttgtcatggaaaacaccactagagaaggcgtgcatatctattagccatcactgatgtaataaaaacatgttaaaccaccataccgtcaaacatgaactctcagacactcaaaggaaaagtgaggaaatatcattcactttttgataatgacatccgagaaagcacgaagcaagtctggaaaaggttgctaattctaaagaattctgtttcctacttttggggaaaatctaagtatttatcacgttaagtatttttcattgggtccagtttaattcctactgcaaacacgaacagaaggaggaaagaaagagcggaaggagcagcaggggatcttcgggtgtacctggctctctgaaaaattgtagcaggaatacccttttatcttatgttccatttatttattgctacattacaaagcgccccaaaacttagtggcttcaaataacagtcatttattttgttcctaagtctgcatttggtcagggctcagcaggggaggctggcctctgatcagcgcagttttgtcaggggcagctcaactgctggccagaggattcatttctaagatagttcactcactttgctggtgagttggttttggctttggctgcccactgggacctctgccaggggccggggctggggactttggttctccatgtggcctaaatttccacatagtatggtggctgggttccatgggtgaaatccccagagagagagagagagagaggctggtggaaactatgttgatttttatgacctgctcagaggtcacttctgctgcatacaaagtttaaggagaaagaacgtaaaaatccatcttttaatggaggagaggaaaaattctgaaaaagcacaagagatggaaaatattgttgcagttgttcttggaaagtacaatgtgccacatcttggttgcgtgaatgttgtttcaatgtgggactgtgagagtaatagtgagtacccacggagatagatatgaaagtgtttagccatactaatttcttggttcaatcttgaaaacattcaacaactgctataattgttcctttattcctatttttttcatctgtttctaacgttaacagtagagtaatgccgtcaaaacactctttaaaggccgggtgcggtggcttacgcctgtatttccagcattttgggaggctgaggcgggtggatcacgaggtcaagagatcgagaccatcctggcccacatggtgaaaccctgtctctactaaaaatacaaaaattagctgggcgtggtggcgcacgcctgtagtcccagctactccggaggctaaggcaggagaatcgcttgaacccgggaggcagaggttgcagtgagccgagatcatgccactgcactccagcctggtgacagagcgagactccagctcaaacaaagaaacaaaaaaatttttagattgacccataaaataaaacagtttttataaaagaatattaatttttttattttgtcagagaaaacattatatttgagattgagtcgcccaagttattgagtgtagctatggtatacattattttcatgcaaaatatagtgtttcatgtattacattatagtaggtaatcttacattggtagaatttgggtttttccccctaattttgactattttgaacaatactgctaagaatacttttgtgcatgtattctaatgctcatgtgtacacgtttcccggtggtttgcagaggagtggaataagcatagtttgtgtagaacctcaatttcagacaattaaaatcgtttttgaagtggatattccaacttatattcccactaatgatatttaacttttcatactctcccaaattttttataaacacttgttttgtttacactttttagttttcacctatctagtagatgtgaaatggtagtttattttgattctaatttccattattctgattcctaatgaggttggatccttttcttgtgttcattggccataagatattttattttgtgaagagcctgttcaaatctgttgtcaagtttcagttgtgttacttctatttttttgtattgatatcagaggtgcttggacactctaaatactagtcctctattgagtatatgcattaaaaatatcagtacaatgcttttcaaactttgttcctcagggaaggaccaggctacatttggaggcaggatgtacactgcacagctctacagggtatcagtcagaaagataatgatacaaatggccatgcccaacctgtataaccctacatggagttctaggagactcatgtgggacttgtgcctaaacatatttgaaatccactcattgaatccatttaacaaatgtggaaacagagtcagagagattaagttgaaagaatagatacttttgattatctcgattgaagtggggctggcctagaagtgtttttggttatactaaatcttgaactcagttttgaagaggggctagtttttcacatagatgtggaaaagatgtgacagttgtgagtaatgaattacacccagctttggaagtagtaaaagacaaacttcctcgcaagagatggcaacaatatttttcaagatgtaaaacagagataaaaaatcaagatgcttagggatatgagagataaaatttaaagagaagttgcaaagtgcagaaataactgtattttttttgtctgcctatcctcccttcccagttacttgtagttgtggaattctacagtatcagggaggactaggttcagaagtctacaacagagaatgaaaactgaaaattatcaaaactcatgagggtttattctcatctataaaagccaggagtgggaaattcaagcctggtaggacaattttatgagatcatttgagattcaggcttcttctgtctttgatcttaaagatcacaagatagagattccctgtccagtcatacattctgtcaccgaaagaaggaaagagaaaaagaaaaaaggtttacttccttgagtcaattctcttaaagatgcctgctggaaatcctacagcagacttgtactccatgttcttaatggctggaattagccacatggccatagctagagaggctggggatacagactttcagttggacacaagcttcccctaatattagtttggtgcaaaagtaattgtgttttttgccattacaatcattgcaaaaactgctattacttttgtaccaatataactgaggttctgtttctcaggaagtagggggcactgaatgttagtcatctaccttcttcttttctggagaaaactccattcccatcatagggaagggtatataacccagcccaggccaaaaaaggcctcattttctggtttcagtgattgtttcaggggtgggacatgattccatttcagccaatcaacttataccttggattcatctatggaaaggattttctcttagagttgctaagccccggacttactgattcagaatttttggaaatgaagcctgggaatctggttttttataaatggccctcaggtgattcttttgattgtcctgtttgggaattaccagatctgccatgtgtagtaaaccaacatttaatctagcatctcctctcttagggcattcaaagaacaacagcattaaagggagcttgctagatgtctttccaaagatggacatcaaaaggctgagcatatagtgtaggtataactgcaccataactatcatgggctcacaactatagacttttagagttatgattttttttctagtttgttacttgccctataaagtagcacttgaaaatataaatagtcctaaaagcacttttttaaaaattttaccagggcttctaggtctgctttgctgggatttggtgtcagaatctgtgttcacttaatcagtaccctttgtgattttatcaacctgatccgccaactcttatgttttgtctttctaggctgaagtgttttaaagtctctttggtttcttttcaaaccctaatcattttaagggacctcctttaagtaagttccagtttcattatgccatttttcaggtttgatggctggaactatactcagtatttctggagccaatgaattctggtgtctctctgtgtatatgtgtgtgcgtgtgtgcaaacgctcataagattgtgctttctattttgtttttgacatccttcctgatgatgcttgcttttgtgactgccacaatacattggaccgaccccttcagggaatggtcggcaatgatgccatcatccttttcctggatcacgtctgcactcggagtccttggtcttctaagcacgaggtgcgttctcttttcctgcagctattcctgtgcaaccaactgcactgagcacggctatttactggctactcacacatctctgcaagaccttcctgacgtttattattgtcatgatgatgtttgaattctcaaaaaatctctgtgtcatctattgatttgaattttcactttattgatgtttaaaccacttttgaaaaatgataggcatacatacatacagattcatgaaatacacatttttaatatatcctccagcagaatagtgattacttctttaatatgcccttataatatccatcagcagcccacaataatagaatctgattgacaaaacagtgagcttcatattaaaatatagctttacgataatttcaaaattccttatccccctcccccaatttcaatgagattgttattcccaaacccttcctataaggatattttggaattgccactgatctctatccaaggtttcacatttttgagtcccttctaactctttgacagaagcaattcaggtttaaaacttttaaaatgagaaatgctggctgagtggaccataaattatgcccatggtttgatgaggctatctctgttctgatcctattttcagctgaggagtgatggttacaagctcagtcagtgggttcagttttcccagatgtgaacccagatctgtcacttgttagccatgtgaccttgcctagtctgtgtagatcctcaatttcagacaagtctctctgagccttggtttcttcacctgtgcaatgagaataataataacacttagctgatggagttgggaggattcaatgagaaaattgacgtaaagcacctagaaaaatgcaaataaattgtaattgatgaggctctggggaatggaattatgtatgccactattcatttattaattcaacaaggcatagacaacctattatattcagggaatgttctgagtgccataaagagataaattagacacaaatttgacctttcagccttgaaatgaaaacagccttgaacataaatcattataagatataaagtaacaagtagcataaagaacatagtctctggatttagactcttgcaggttcaaatataagcttcatcactagctacctgtgtaaccttaggccaggtgcttaatcttagtaagtttcccatctgttaaaaaatggaaataataatggtatttacctcacactgttgttatccggattaaatgagaaaatgcacgtaaaatgctcagcacttcgactgtcacataatgtgtaacataaactgctttcataagtaagatccagaagtactgcaaaaatttagtggagcaggggattttatttttcttttgtttatatccatttgtggaagggaaaggtcatggaagacttcttgcaagagactgataaatcataaagccaatctattatttttgtttgtttgtttttttgagacagagtctcaccctgtcacccaggttggtgtgcagtggtgcaatctcagctcacagcagctgctgcctcttgggtttaatcgattatcgtgcctcagcctcctgaatagctggaattacaggcatgcaccaccatgcatggctaatttttctatttttagtagagacagggttctgccatgttggccaggctagtctccaactctttttttttttttttttttttttttttttttttttttgagacggagtctcgctgtgtctcccaggttggagtgcagtggcgcgatctcggctcactgcaagctccgcctcccaggttcatgccattcttctgcctcagcctcccaagtagctgggactacaggcgcccgccaacacgcccggctaattttttgtatttttagtagaaacggggtttcaccgttttagccaagatggtctcgatctcctgacctcgtgatccgcccgtctcggcctcccaaagtgctaggattacaggcgtgagccaccgcgcccggcctagtctccaactcttgacttcaagtgatctgcccaccttggcctcccaaagtgctgggattacagacatgagccaccatgcctggtgcaatttatgaatttaaaaaagaatacattgtgctgtttgccatcaggctggctcaactatcctacgaggtaggttttgtagggatattaaatttccatcctttagatgcttaaacagaaactcagagagtttaaattaagtaacttgctgaaggttccccaggtacttgatgaagctggtatttgctcacagggatgtttgacttgaaagcccagctgctgcttttttttttttttttttttgacagagtctggctctgttgcccaggctggaatgcagtggtgtaatctcggctcattgcaacctctgcctcccaggttcaagcagttctcctgcctcagcttcctgagta

SEQ ID NO: 1296 - DNA, 3963 bp, Homo sapiens
tgtttctgcactctacattgttttaatgaaaataaaatgttattttaagaaaaaaggttttcttctgattttctgcacaaccagacgtttgtttgtttgctttaaaatgtttcaacaaaatcctggtttgtttcgaaatatgttggattagcatttaacacctcatcggtcactaaagcccagtcagttcaccagccccaacacagcctcggctaaaagaacatcagagcaaacagagctgggcctttaaaagtggcaaacaaatgccacacaccgcctaaagaaggggggttgggggaggggagggttaaggcgaacttgggtccaaatgagtttgaagggaatacaaagaacgaaaagtcagcacaagttttcctaaagctagctcgcgaacgcaagcgtcgcgaacaagggcttttgtgcatgctaattgcgccattggtgcgcaaaagttccgacgcgaagtgtgaactctcaacagaaggaaacatgagacaactgaagtgccctggtttatgtgccctgctcctcctccgctgccgcctccccttctttctccttcctcccgccgagcccgctgttgcagcttgtttgcactggggcttatccggagcggaaattcctttccgtttttgtgaatgacaaactcattaacaattcatcaacacaacctgttccagccggcccgtccccacggcaacagccccttccgcagcacgctcattggctggcccggagaatgtatccattgagacgctcgctgtttgtatccattgaggagctgcctcgcgcagggggtgtgcgaggctgagtccaagagatagcaaatcgagtcttaaataatccggggagaaagacgcccgggtagatttgaggtgcagccttggagggagggattagaagccgctagactttttttcctcccctctcagtagcacggagtccgaattaattggatttcattcactggggaggaacaaaaactatctgggcagcttcattgagagagattcattgacactaagagccagcggctgcagctgggtgcagagagaacctccggctttacttctgtctcgtctgccccaaccgctagcctcggcttgggtaaggcgaggcggaattaaaccccgctccgagagcggcagcttcgcgcgcggtgcgctcggcctatgcctgccccgaggggcgtctggtaggcaccccgccctctcccgcagctcgacccccatgatagatacgctcagacccgtgcccttcgcgtcggaaatggcgatcagcaagacggtggcgtggctcaacgagcagctggagctgggcaacgagcggctgctgctgatggactgccggccgcaggagctatacgagtcgtcgcacatcgagtcggccatcaacgtggccatcccgggcatcatgctgcggcgcctgcagaagggtaacctgccggtgcgcgcgctcttcacgcgcggcgaggaccgggaccgcttcacccggcgctgtggcaccgacacagtggtgctctacgacgagagcagcagcgactggaacgagaatacgggcggcgagtcggtgctcgggctgctgctcaagaagctcaaggacgagggctgccgggcgttctacctggaagatgaagcccggggcaagaactgtggtgtcttggtacattgcttggctggcattagccgctcagtcactgtgactgtggcttaccttatgcagaagctcaatctgtcgatgaacgatgcctatgacattgtcaaaatgaaaaaatccaacatatcccctaacttcaacttcatgggtcagctgctggacttcgagaggacgctgggactcagcagcccatgtgacaacagggttccagcacagcagctgtattttaccaccccttccaaccagaatgtataccaggtggactctctgcaatctacgtgaaagaccccacacccctccttgctggaatgtgtctggcccttcagcagtttctcttggcagcatcagctgggctgctttctttgtgtgtggccccaggtgtcaaaatgacaccagctgtctgtactagacaaggttaccaagtgcggaattggttaatactaacagagagatttgctccattctctttggaataacaggacatgctgtatagatacaggcagtaggtttgctctgtacccatgtgtacagcctacccatgcagggactgggattcgaggacttccaggcgcatagggtagaaccaaatgatagggtaggagcatgtgttctttagggccttgtaaggctgtttccttttgcatctggaactgactatataattgtcttcaatgaagactaattcaattttgcatatagaggagccaaagagagatttcagctctgtatttgtggtatcagtttggaaaaaaaaatctgatactccatttgattattgtaaatatttgatcttgaatcacttgacagtgtttgtttgaattgtgtttgttttttcctttgatgggcttaaaagaaattatccaaagggagaaagagcagtatgccacttcttaaaacagaacaaaacaaaaaaagaaaattgtgctcttttctaatccaaagggtatatttgcagcatgcttgactttaccaattctgatgacatctttacggacactattatcactaagaccttgttatggcgaagtctttagtctttttcatgtattttcctcatgattttttctctttatgtagtttgactatgccttacctttgtaaatatttttgcttgtgttgtcgcaaaggggataatctgggaaagacaccaaatcatgggctcactttaaaaaaagaaagaataaaaaaaccttcagctgtgctaaacagtatattacctctgtataaaattcttcagggagtgtcacctcaaatgcaatactttgggttggtttctttcctttaaaaaaatttgtataaaactggaagtgtgtgtgtgtgagcatgggtacccatttgataagagaaatgcatttgattgtgaagaagggagagttaaattctccattatgttcgtggtgtaaagtttagagctggaatttattataagaatgtaaaaccttaaattattaataaataactattttggctattgaatgtgtgtttttaaaaactcagttatacctatgtgtgaagtgacacattttagaactttttcattcagggattgattttgacttgtaggcatagtagggcaaggttcttttaagcttttcctagaacgtttttcagcagcagtttatgaaattcatcgtttgccacgaataaagatgacatcctagaatggaccgactgtaccgtgtatatgaacaatacctcttatgagtatagttccggcttaagattttaaagcccctgaagaaaaatgaacctatagagcatagcttgctgaggaatacaatttggatattaaccacagagaggtgtagcagaataccaagatgacagccacatgttaacctcctccctatccttcactgtcaggatcttctgctttataatgctgagataatgccaaagaggaagtagggataattctttttccagtctgttgtcatgggcaattctacctgcagatatcctagtgtgagaatgctgaatccagaatgatgtctccactttttcccctagcatgcgcatggcaaggcatatctaagcttcctcaccgtgtcaggatatggctttagaattttacattggcacttaggaggcaactttgtcatccctgttgtaatgtgcttttttgtttaactggcttgggatgtgggtcagaaacccttattgaaacttgtggggattattttagtttcttttcaagctaaagactttatatcttgccatttttcttgggacctaccctctccttacctcaaatgtaaaaatacacaaaccaaaataaaaggcaggtgtatggaatcaaaagaacta

SEQ ID NO: 1297 - protein, 233 aa, Homo sapiens
MIDTLRPVPFASEMAISKTVAWLNEQLELGNERLLLMDCRPQELYESSHIESAINVAIPGIMLRRLQKGNLPVRALFTRGEDRDRFTRRCGTDTVVLYDESSSDWNENTGGESVLGLLLKKLKDEGCRAFYLEDERKNCGVLVHCLAGISRSVTVTVAYLMQKLNLSMNDAYDIVKMKKSNISPNFNFMGQLLDFERTLGLSSPCDNRVPAQQLYFTTPSNQNVYQVDSLQST

SEQ ID NO: 1298 - DNA, 4401 bp, Homo sapiens
tgtttctgcactctacattgttttaatgaaaataaaatgttattttaagaaaaaaggttttcttctgattttctgcacaaccagacgtttgtttgtttgctttaaaatgtttcaacaaaatcctggtttgtttcgaaatatgttggattagcatttaacacctcatcggtcactaaagcccagtcagttcaccagccccaacacagcctcggctaaaagaacatcagagcaaacagagctgggcctttaaaagtggcaaacaaatgccacacaccgcctaaagaaggggggttgggggaggggagggttaaggcgaacttgggtccaaatgagtttgaagggaatacaaagaacgaaaagtcagcacaagttttcctaaagctagctcgcgaacgcaagcgtcgcgaacaagggcttttgtgcatgctaattgcgccattggtgcgcaaaagttccgacgcgaagtgtgaactctcaacagaaggaaacatgagacaactgaagtgccctggtttatgtgccctgctcctcctccgctgccgcctccccttctttctccttcctcccgccgagcccgctgttgcagcttgtttgcactggggcttatccggagcggaaattcctttccgtttttgtgaatgacaaactcattaacaattcatcaacacaacctgttccagccggcccgtccccacggcaacagccccttccgcagcacgctcattggctggcccggagaatgtatccattgagacgctcgctgtttgtatccattgaggagctgcctcgcgcagggggtgtgcgaggctgagtccaagagatagcaaatcgagtcttaaataatccggggagaaagacgcccgggtagatttgaggtgcagccttggagggagggattagaagccgctagactttttttcctcccctctcagtagcacggagtccgaattaattggatttcattcactggggaggaacaaaaactatctgggcagcttcattgagagagattcattgacactaagagccagcggctgcagctgggtgcagagagaacctccggctttacttctgtctcgtctgccccaaccgctagcctcggcttgggtaaggcgaggcggaattaaaccccgctccgagagcggcagcttcgcgcgcggtgcgctcggcctatgcctgccccgaggggcgtctggtaggcaccccgccctctcccgcagctcgacccccatgatagatacgctcagacccgtgcccttcgcgtcggaaatggcgatcagcaagacggtggcgtggctcaacgagcagctggagctgggcaacgagcggctgctgctgatggactgccggccgcaggagctatacgagtcgtcgcacatcgagtcggccatcaacgtggccatcccgggcatcatgctgcggcgcctgcagaagggtaacctgccggtgcgcgcgctcttcacgcgcggcgaggaccgggaccgcttcacccggcgctgtggcaccgacacagtggtgctctacgacgagagcagcagcgactggaacgagaatacgggcggcgagtcggtgctcgggctgctgctcaagaagctcaaggacgagggctgccgggcgttctacctggaaggtggcttcagtaagttccaagccgagttctccctgcattgcgagaccaatctagacggctcgtgtagcagcagctcgccgccgttgccagtgctggggctcgggggcctgcggatcagctctgactcttcctcggacatcgagtctgaccttgaccgagaccccaatagtgcaacagactcggatggtagtccgctgtccaacagccagccttccttcccagtggagatcttgcccttcctctacttgggctgtgccaaagactccaccaacttggacgtgttggaggaattcggcatcaagtacatcttgaacgtcacccccaatttgccgaatctctttgagaacgcaggagagtttaaatacaagcaaatccccatctcggatcactggagccaaaacctgtcccagtttttccctgaggccatttctttcatagatgaagcccggggcaagaactgtggtgtcttggtacattgcttggctggcattagccgctcagtcactgtgactgtggcttaccttatgcagaagctcaatctgtcgatgaacgatgcctatgacattgtcaaaatgaaaaaatccaacatatcccctaacttcaacttcatgggtcagctgctggacttcgagaggacgctgggactcagcagcccatgtgacaacagggttccagcacagcagctgtattttaccaccccttccaaccagaatgtataccaggtggactctctgcaatctacgtgaaagaccccacacccctccttgctggaatgtgtctggcccttcagcagtttctcttggcagcatcagctgggctgctttctttgtgtgtggccccaggtgtcaaaatgacaccagctgtctgtactagacaaggttaccaagtgcggaattggttaatactaacagagagatttgctccattctctttggaataacaggacatgctgtatagatacaggcagtaggtttgctctgtacccatgtgtacagcctacccatgcagggactgggattcgaggacttccaggcgcatagggtagaaccaaatgatagggtaggagcatgtgttctttagggccttgtaaggctgtttccttttgcatctggaactgactatataattgtcttcaatgaagactaattcaattttgcatatagaggagccaaagagagatttcagctctgtatttgtggtatcagtttggaaaaaaaaatctgatactccatttgattattgtaaatatttgatcttgaatcacttgacagtgtttgtttgaattgtgtttgttttttcctttgatgggcttaaaagaaattatccaaagggagaaagagcagtatgccacttcttaaaacagaacaaaacaaaaaaagaaaattgtgctcttttctaatccaaagggtatatttgcagcatgcttgactttaccaattctgatgacatctttacggacactattatcactaagaccttgttatggcgaagtctttagtctttttcatgtattttcctcatgattttttctctttatgtagtttgactatgccttacctttgtaaatatttttgcttgtgttgtcgcaaaggggataatctgggaaagacaccaaatcatgggctcactttaaaaaaagaaagaataaaaaaaccttcagctgtgctaaacagtatattacctctgtataaaattcttcagggagtgtcacctcaaatgcaatactttgggttggtttctttcctttaaaaaaatttgtataaaactggaagtgtgtgtgtgtgagcatgggtacccatttgataagagaaatgcatttgattgtgaagaagggagagttaaattctccattatgttcgtggtgtaaagtttagagctggaatttattataagaatgtaaaaccttaaattattaataaataactattttggctattgaatgtgtgtttttaaaaactcagttatacctatgtgtgaagtgacacattttagaactttttcattcagggattgattttgacttgtaggcatagtagggcaaggttcttttaagcttttcctagaacgtttttcagcagcagtttatgaaattcatcgtttgccacgaataaagatgacatcctagaatggaccgactgtaccgtgtatatgaacaatacctcttatgagtatagttccggcttaagattttaaagcccctgaagaaaaatgaacctatagagcatagcttgctgaggaatacaatttggatattaaccacagagaggtgtagcagaataccaagatgacagccacatgttaacctcctccctatccttcactgtcaggatcttctgctttataatgctgagataatgccaaagaggaagtagggataattctttttccagtctgttgtcatgggcaattctacctgcagatatcctagtgtgagaatgctgaatccagaatgatgtctccactttttcccctagcatgcgcatggcaaggcatatctaagcttcctcaccgtgtcaggatatggctttagaattttacattggcacttaggaggcaactttgtcatccctgttgtaatgtgcttttttgtttaactggcttgggatgtgggtcagaaacccttattgaaacttgtggggattattttagtttcttttcaagctaaagactttatatcttgccatttttcttgggacctaccctctccttacctcaaatgtaaaaatacacaaaccaaaataaaaggcaggtgtatggaatcaaaagaacta

SEQ ID NO: 1299 - protein, 379 aa, Homo sapiens
MIDTLRPVPFASEMAISKTVAWLNEQLELGNERLLLMDCRPQELYESSHIESAINVAIPGIMLRRLQKGNLPVRALFTRGEDRDRFTRRCGTDTVVLYDESSSDWNENTGGESVLGLLLKKLKDEGCRAFYLEGGFSKFQAEFSLHCETNLDGSCSSSSPPLPVLGLGGLRISSDSSSDIESDLDRDPNSATDSDGSPLSNSQPSFPVEILPFLYLGCAKDSTNLDVLEEFGIKYILNVTPNLPNLFENAGEFKYKQIPISDHWSQNLSQFFPEAISFIDERKNCGVLVHCLAGISRSVTVTVAYLMQKLNLSMNDAYDIVKMKKSNISPNFNFMGQLLDFERTLGLSSPCDNRVPAQQLYFTTPSNQNVYQVDSLQST

SEQ ID NO: 1300 - DNA, 3516 bp, Homo sapiens
tgtttctgcactctacattgttttaatgaaaataaaatgttattttaagaaaaaaggttttcttctgattttctgcacaaccagacgtttgtttgtttgctttaaaatgtttcaacaaaatcctggtttgtttcgaaatatgttggattagcatttaacacctcatcggtcactaaagcccagtcagttcaccagccccaacacagcctcggctaaaagaacatcagagcaaacagagctgggcctttaaaagtggcaaacaaatgccacacaccgcctaaagaaggggggttgggggaggggagggttaaggcgaacttgggtccaaatgagtttgaagggaatacaaagaacgaaaagtcagcacaagttttcctaaagctagctcgcgaacgcaagcgtcgcgaacaagggcttttgtgcatgctaattgcgccattggtgcgcaaaagttccgacgcgaagtgtgaactctcaacagaaggaaacatgagacaactgaagtgccctggtttatgtgccctgctcctcctccgctgccgcctccccttctttctccttcctcccgccgagcccgctgttgcagcttgtttgcactggggcttatccggagcggaaattcctttccgtttttgtgaatgacaaactcattaacaattcatcaacacaacctgttccagccggcccgtccccacggcaacagccccttccgcagcacgctcattggctggcccggagaatgtatccattgagacgctcgctgtttgtatccattgaggagctgcctcgcgcagggggtgtgcgaggctgagtccaagagatagcaaatcgagtcttaaataatccggggagaaagacgcccgggtagatttgaggtgcagccttggagggagggattagaagccgctagactttttttcctcccctctcagtagcacggagtccgaattaattggatttcattcactggggaggaacaaaaactatctgggcagcttcattgagagagattcattgacactaagagccagcggctgcagctgggtgcagagagaacctccggctttacttctgtctcgtctgccccaaccgctagcctcggcttgggtaaggcgaggcggaattaaaccccgctccgagagcggcagcttcgcgcgcggtgcgctcggcctatgcctgccccgaggggcgtctggtaggcaccccgccctctcccgcagctcgacccccatgatagatacgctcagacccgtgcccttcgcgtcggaaatggcgatcagcaagacggtggcgtggctcaacgagcagctggagctgggcaacgagcggctgctgctgatggactgccggccgcaggagctatacgagtcgtcgcacatcgagtcggccatcaacgtggccatcccgggcatcatgctgcggcgcctgcagaagggtaacctgccggtgcgcgcgctcttcacgcgcggcgaggaccgggaccgcttcacccggcgctgtggcaccgacacagtggtgctctacgacgagagcagcagcgactggaacgagaatacgggcggcgagtcggtgctcgggctgctgctcaagaagctcaaggacgagggctgccgggcgttctacctggaaggtggcttcagtaagttccaagccgagttctccctgcattgcgagaccaatctagacggctcgtgtagcagcagctcgccgccgttgccagtgctggggctcgggggcctgcggatcagctctgactcttcctcggacatcgagtctgaccttgaccgagaccccaatagtgcaacagactcggatggtagtccgctgtccaacagccagccttccttcccagtggagatcttgcccttcctctacttgggctgtgccaaagactccaccaacttggacgtgttggaggaattcggcatcaagtacatcttgaacgtcacccccaatttgccgaatctctttgagaacgcaggagagtttaaatacaagcaaatccccatctcggatcactggagccaaaacctgtcccagtttttccctgaggccatttctttcatagatgaagcccggggcaagaactgtggtgtcttggtacattgcttggctggcattagccgctcagtcactgtgactgtggcttaccttatgcagaagctcaatctgtcgatgaacgatgcctatgacattgtcaaaatgaaaaaatccaacatatcccctaacttcaacttcatgggtcagctgctggacttcgagaggacgctgggactcagcagcccatgtgacaacagggttccagcacagcagctgtattttaccaccccttccaaccagaatgtataccaggtggactctctgcaatctacgtgaaagaccccacacccctccttgctggaatgtgtctggcccttcagcagtttctcttggcagcatcagctgggctgctttctttgtgtgtggccccaggttaatactaacagagagatttgctccattctctttggaataacaggacatgctgtatagatacaggcagtaggtttgctctgtacccatgtgtacagcctacccatgcagggactgggattcgaggacttccaggcgcatagggtagaaccaaatgatagggtaggagcatgtgttctttagggccttgtaaggctgtttccttttgcatctggaactgactatataattgtcttcaatgaagactaattcaattttgcatatagaggagccaaagagagatttcagctctgtatttgtggtatcagtttggaaaaaaaaatctgatactccatttgattattgtaaatatttgatcttgaatcacttgacagtgtttgtttgaattgtgtttgttttttcctttgatgggcttaaaagaaattatccaaagggagaaagagcagtatgccacttcttaaaacagaacaaaacaaaaaaagaaaattgtgctcttttctaatccaaagggtatatttgcagcatgcttgactttaccaattctgatgacatctttacggacactattatcactaagaccttgttatggcgaagtctttagtctttttcatgtattttcctcatgattttttctctttatgtagtttgactatgccttacctttgtaaatatttttgcttgtgttgtcgcaaaggggataatctgggaaagacaccaaatcatgggctcactttaaaaaaagaaagaataaaaaaaccttcagctgtgctaaacagtatattacctctgtataaaattcttcagggagtgtcacctcaaatgcaatactttgggttggtttctttcctttaaaaaaatttgtataaaactggaagtgtgtgtgtgtgagcatgggtacccatttgataagagaaatgcatttgattgtgaagaagggagagttaaattctccattatgttcgtggtgtaaagtttagagctggaatttattataagaatgtaaaaccttaaattattaataaataactattttggctattgaat

SEQ ID NO: 1301 - protein, 379 aa, Homo sapiens; identical to SEQ ID NO: 1299

SEQ ID NO: 1302 - DNA, 71214 bp, Mus musculus
  misc_feature (1)...(71214): n = A,T,C or G
tctaactcttcaattggggttcctgggttcaagtcctatggttggctattagtatctgcatctgcatcagtcaggtactggcagagcctctcggggaacagccataccaggctcctgttaacaagtacttcttggcatcagcaatagtgtctgggtttggtgtctgcggatgggatggatccctaggtgggacagacagtctctgaatgacctttccttcggtctctgctccattttttgatcctgtctttcctttagacgggaacagttctgggttaaaatttttcagatgggtgggtggccccatccctcaactgggtgctgtgcctgtccactggatttagtctctgccgtttctatctctcctttgttgagtatttaggctaacatcattcttgctgggtcctcctctgtaactgctcatcctgggagagctgttgagaccagtgatgtcattaccttcttttttcttatttgtggtcccatagttattaagatactttttttttattttccctggttattagcatatatatctacatatatactgaaatttaaattaataaccctatcctctaatatgatgctacataatattttgcattgctcaatttctgcattttaatccattttctctataatttcagtctaaacttctagtcttttgcctcaattagccctaatactttcaatttcaaaatatcttttcccatttttttccaaatatgtgtttatggtgtatagacatgatgtgttttcttctgagggatatactgtctcattcttaatacagtctactagttataatctccttgccttttgtccgttcctgattttaaccattttatttggaatctttttgtagctgagtatgttaacattggtattttacttaaaaaagcatagcactaaatgtttcgttaccttaaattctattttttaaaaaatctatttttattttgtcttttattaaagataacacctcacatatgtgccatttcctctactcgcccgcttcatccttacctcaccccttatccaggccctcatccttcctctctcttatcagaagacaaacaggcatcgaagggatagaaataaaagaagataagagaaatcttcacacagccaccttaattttatgcccattttctctatgcctggtactttcttggtttctaacatcttcctcctgactttcccatgtactccttcccatggtcaatcaaatcaaacctccatgatctctgaatttgctgcatcgccacatttctctgcccctttgtaggttgttgttatctttgtatcccacaaaagggtctttctccttctttctgtcaaagctttcccttgtgtgtggtacccctcaattccctgtccctgtctagaggcctaatcgatatattttttgttgtcatttcttgctctttttctttaaaataattcattcttaaaaatgtgagaaatttgtctcataatgaaacacttttaatatgtgatttttagaaggaaaataatttgctctgatttttactttaacattataactggttgtctgtcataatataacagacaactcaatacccgtcaccccagaattcaaagactatttctggactattacaggagcttggctaaggagggctaagacattgaaacagggccatgatggtactgatgaagacacagggcgaagagggatgaagcaaacagattttggaagattggctcagggacaggatttcataagcgcagaaacaatcgaaaggaattcattagactacatcttggcttacacactcccttgccttcataggccatctctaattaattttcagaagttattaattaatatacattcattgtaagagaaaatcttcatcatggatcaccataccggctatgctgaactgattggcagtcagctagcttattctgcgtagcttgtgaagatgtctgtttcaccaaaagccttcaaactgatgcgacgcacacatttttcaagtgacactcagttactgagtcttaggcatttggtgatttacgtcattttgtgttactgtcatgaaacatatgagtctgggtcatacttttagagactttatgtcattcacagtttggatggagccttagctatggaacaaactctagaggagcttcctatggctgtatcacctatggtagatagatagggatatttgtggatacatgtgagaagagggaaaccaaggagactaggtaagggtcatgtttgtcttttatggcaaccatgtcattagtactaactcagaaatcccaggagaaccattgctaagcccctatccgtggcacgcctccagggccctaaatatgtcagtccactaggctccatcttttaaataaccaaccccatgtctacatagccacaaataggaccagggctcaacaagagccattcagggagaaatgacatcaaaaccatagccttctgcaaacgtcaccgaactgaaatccgttgatcccttggatccattagtccttaggcaacttaagatgcagtttgtgatcaactatctcaaactaatcaaacgtacctggtctcctgctataaaaccaaagtgattttccaactttctttgtctgtccgttcttaacattcattttccccatagaatgaaactctacaaagttatagaaaattatagaaaattaaattgaatatacagttgggtcataagggagtggcactattaggaggtgtggccttgttggagtaggtgtggccttgttggagtaggtgtgtcactgtgggcataggctttaataccctagtcctggctgcctggaagccagcactctgctatcagccttcagatgaagatgtagaactctcagcttctccagcatgaccatgcctgtctggaagctgccaatgctcctgccttgatgataatggactgaacctctgaacctgtaagccagcctcagttaaatattatcctgataagagttgccttggtcacggtatctgttcacagcagtaaaacccttactaaggcaccttctaacatttaattccaagcaatacttacctcatctgtcaggcccccttacagtgatgtttatgatctcagcggacatattcatttgttgttttctgagatttggaagcctagttatttcgtaaccaaaattccaggatttcccaaagaatcaaggacttaacatttgttagaatagctattttaaggacaagggtaaatccttctttgtgaagtatattgtatatcactgcagaaatgtaaaaggacactatagaaaatagtaagaaggccctcacaataggaaaagtaaaattattcatgatttagcaagtccaccagtggaaatgttgctcatgtcagacttcatatcatagtgccaaagttatgtctgcatgtcatatttacagcctccctattcacaatgatcaagtaatgaatttaactgaaaagtttatgaacaaatatgtgttgtgtatatacacacacacacagatacatgtaagtattatacttacagttaatatcagtgcacagtaatatggaaaattgtgtagaaagtatattttaaatgtcattactaaaaaatggtacatgttcaagctagtatacatataaactagcaatgttaatttcacattgcattaatagatcttaataccctttactacacaatatctatttttaattgtttattttttattttatttttattcttcaaacttttttttacagtccagactttatccccatccctgtccaccctttgactgttccacatcccacatttcctcctcccctcatctccaagaggatgtcccaaccccaccagacctcccaccttcctggtgccccaagtctcttgagggttaggtgcatcttctctgactgagtctagacctggcagtcctctgctgtatatgtattgggggcctcatatcaactggtttattctgtctggttggtggctcagtgtctgagagatcccaggggtccaggttagtagagaccgctggtcttcccatggggtcaccttcctcccctgcttcttccagattttccctaatttaaccgtaggggttatcaacttctctccattggttgggtgtaaatatctgcatctgactctttcggctgcttattgggcctttggagggcagacatgataggtccctgtctgtcagcacatcatagcatcagtaatagtgtcagatcttgggatctccccttgagctggatcccacattgggtctgtcactgatcttcttttcctcaggctcttctccatttttgtccctgtagttttttcatacaggaacaattatgggtcagaatttttgactgtgggatggcaacctcatccatccatttgatgccctgtattcctgccggaggtggactctacaagttccctctccccactatagggcatttcatgtaaggtccctccttttgaatcctgagagcttctcacctcccaggtctctggtacattctaaagggtcctcctacctcctatctcccaaggtttcctgtttccattctttctgctggccctcaaaacttcagtcctgtttccaccacccaatacctgatcatgttcccctcttccccttcctgtcccctttcctatccaagtccctccctctcttctccctcctgtgattactttcttctccctcccaagtgggactgaggaatcctcacttgggcccttcagcttgttgacctatttttgtttggtggactatatcttagtatcttaggtattctgtacttttatttttggctaatatccacttattagtgagtacataatttccttttgggtctggattacctcactcaggatgatattttctagttccatccttttgcctgcaaaacacatgatgtgctcattcttaatagctgaatggtattccattgtgtaaatgagacacattttctgtatacgttcttctcttgggggatatctggatagtttccagcttctggctatcacaaacaaggctgctatggacatattggtacacatgcccctgtggcatggtggggcatcttttgggtatatttccaagagtggtatagctaggtcttcaggtagatctatttccaattttctgaggaacctccaggctgatttccaaagtgattgtactagtttgtaatcccaataacaatggaggagtgttcctctttctccacatcctcgccagtatctgctgacacctgaatttttgatcttagtcattctgattggtataaggtagaatctcagagttgttttgatttgcatttccctgataactaaggactttgaacatttctttaaatgcttctcatccatttgagagtcctctgttgtgaattctgattagttctctacttcggtttttgattgggttgtttggtttcttggtggttagcttcttgagttctttatatgttttagatattagccatctatcagatatggagttagtgcagattttcccaatctgtggatttcctcaataatttcatttcattccaattagatggataacttgggttaaaggagttgacagtaataaacgttcctttaaaattattacaatttgtattataattaatatatatatccatattaaaagtgaactacttctaatattgttaacatataataagtatattaagtgaaagtacatgcctgagttcattcaatcttcatagtgattttattcagggataatagtcatttcttctttaagaatgagaatccctgctccctggccctggtattcccctgaaaagtaaatgaagaaaatatctaatttaaaaaaaaagagagagagagaaagaggggttcagaaatttaaccaaagcaaagaaaaaaaatgagaatccctggtattgagaaaataaatatttaatcagtggacatcacatggattggaagtggcagaatttaaacttagtgctatagaatgtcacccaaatagtacatgttttataataggtcctaaaattcattttcatacattatacctttgattttatcattttaattactatcaatgaatatatatacgcataaacacacaataatatataaatatataattagaacttcatatatatgtatgtatgtgtgtatatatatatatatatatacacacacacacacatatatatatatacacacacacacatatatacacacacatatactctttttggtttggaataaatttagtcttattatatcttctttattttctaaagtataattcatagagatttatataacatttgttaatcaaaatacttgaagaatattggctttggaagtaggaattctctatatttgactcattggcctgaagcttgatgattgaaatattcagtgagttcatacagaagttgccaaatattttaatttgtgttcattttatattattcacatttacaccaacttcttccctcaaaacctacaattaattcatagaccaatcctggaaaacgtaacacactttgtaactcaatcatagctggcgctatgaagttgaatacaatgacgcccttgtgtgctgatgaaccagaggaaagttttcaggccaagcccagtgtcaggacacaatttgtcttccctttgcatcagctcaaataacagaactgaacgaaagttgacagctttgtttgcattctccttcatcagagcataacatagagtgcactggtgagcttgtgagttcttaccacatcttctattcatgcccactgtctccttgaagacatgccccatttctcactgctttcttccactcatgcagttttgatttgagaattttaaggaaaaaaatatgggtgtgctggcatatgcctgcaatcccagagcttgagaaacggaggcaggaggatggctgcattttcaaagctatcctggttagcgaaataaatttgaccttagcctgagatatataatgggatcttatattacaaagcaaataaataaataaataaataaataatctatgtaaatgtgttttatttattacaacaggtaattatattttgcatcttaattgttttatgtcttgccagctgtattatagcatttctttgggatatagtatttcaccctctcttgtgatttttcttgtagtctatcatttcttttacttataggaaatatacacattcatgaaaaataatgccttaccaaaagtttgtgcgtgtgattttttaggcagaaatgtggtttcattttattgggttagcaactgattttgctgactatgataaaaaccaggcctatggtctaagcaaacttttaggcaacggcctcaagtttgcaatccatccccttgagaaaagactggagcaagccagcagggtctgcccatttgtttgctctgaggctttctacccagtgctaaaagccagcgcggtagcttctgtttgtttgcctaagatccctgaaagatgtgcgcccacattaaggctctttcgatacgaaccaggagaatacaatcaaaatgcagtattgctacttatctacttcattcagtttgctatctactatgaggatgtttccctgtaatctgctgtcctcctaaaataaaacccatgcattgtggacggtgacacaggcgacctctcctagagtcaccgaggagaacgtgaccactctgattcagtagtgtctcttagtcgaggaagcagagaaaccagaaatcccagctaattagaagataagaatctggcagatggagggagccagaaggaagctgtgcagtttctcagcctctgccccagttactccaattgcttcatccctgtgaagcaattaaccttaacaagtatttcttcttatgctagcagagcaaaacacaacagtgctgatcgtggtctcagggacatcttcaggagtgactatagatcttgttctttacggagggaccagttgttagtcttgtgtcttggtacaattctcaatgcaaggattactgttcacccgtgtttataagttaggaagcttaggtgacattcctaagtttgcagtggtcgtaaactcctctgggcctctgaccagatttgtctaactccagaaacccagtctcctcctctctgtgggtcctttaaagtcaggtgatggtcctgtggcccctgcctgtggagggactggtacaattcaagtctaactcagactctgctagcaaggtgaacttggaactctgtaacacaagtaaagtacagataaaagaagggaacttaatgctttaaatttatgtctttacaaaaaggaaaaggaaaatttccagtcctataaataaaataaatccttaagattcactgtataaatgagtattagggaatcaccaaataagatcatttagaaattgtttatgttgtgatctagagggagccatgaatcattttcttatatgcaaacgttggcaaaataaagattatagatacggaaatttaagtggcactttaccaacatagtctcttttatgtgccaatataccttcaggttttcacatggtgagaaaaatagtatcactagatatgccttagagattccttgatatcttctgaaaaatctatcttctatgttttaatatttggaacttttctacccagtaatactctgaaaaattgatcagtctgtcttagatgtttagctatataaagtattatcatactaattttcaaagatatctgtgtgcatgtatatgtgtgtgtgtgctcacacacatgcatcatttaaaataattaacataataagaaatattaattatcctatatgggagggactatacatttgtacaacattatcaagcatgtacattacctatataaccatgtacatgtgtgtgtgtatatgtgtgtgtgtgtgtgtgtgtgtgtgtgtgtgtttgtgtatgtgtgtgtaccagagccttatctgtttcctgaagtggccagaagagggcatcaggtcactcagaactgcagttatagacagttgtgagctgccatgttggtgctgagaaggtaatctgggtctatgcaagagtagtagtaaatgctcttgacgctggggtggtctctccagcacagaagtattttaaatagtatatttgcactgtcttggcatttagtgctcatgactctgagataaaattcagagctcttcagcttaagctgggctaattttaggcaccgtacattggccacagtttctccttagattcaacatttctaggctgcttctctagtttcatttcaattttaatattatgtcctacttccatctaccttgtgacaaagttacaaatgaaccacccatgataccttaacatctttaagccgatttctgacttttatggttactagactgaaggatttttaaaaatagtaacatttctttttgtgtgtgcgatattcttgaaatttcagcttttctttatatcgtgaccagttcctagagtcaccctcttctgtaagtcagatgccaaccctgtggctggcaatacacttcccgattctgcatttcaattgctccattataactccacatgctgcctctttgtcctaatgcacacacatttcaagaggcttaaatgagagatgacagtccaaacaatatatcttagacaggaaggaatttgcaattatttcagaaaaccacgccaaaacattgtcacattagagtatctagggtgacaaattcaataaagccccttcggagaaacacattttgttagaaagttcctctataagtcggtccaggtgacttccttttacacagacaggattattttcaaaataatggaggaaagggagaaaaaaataaaagagagaaactcaaactctttcccggtagcgatctcctctggagccatctgggaagggagttttgcttggtcacaagtgactagtccatgattttgaaaggagtgattcatcctcctttgaaacaggagataagtgggggaaagagccgtttaaaaatgactttacaactgtttccttcggagctatgacttctttagctggaatgcgatccagaacagtttccctttgagcctcacatttgcctcgcggggttttcttgtctctccttcccccacgcccttctcacttcttctctccctgtctcccaacagatttacactgactgggccaaccactacctggcaaaatccggccacaagcggctgatcaaggacttgcagcaggacattgcggacggggtccttctggcagacatcatccagatcattggtgagacctgctctcttaaactcggagaggctctgctcacagctcttaggctacattgtagtttaggaagaacggacacagaactgttccatgtgtcctggagtgctgtgagtgtagctatctccattgtaatgaaatgcgtttatgagagactgaaagggatattctggccgtactttgaaatagttggaacagtgttctttacacatatagcattgtcagaaatgaaaggttcgttaaaccatgtgcctcccatgtgtgtgcattttgttaaccagagtaactcattcactgagactccttgaaactgggtcttggtccagcagggataattgtgaaaggtctcatgtcaggagtcatttggcacagactggaaggaaaaccagcaacgacttcctttttttttttttttttttttttcctttgcttgaattgtccacatagaattgttggctgagagcaagtgtgttctcctctcctgtccatgtgcttaggagactgaataggggggtatttctgtttggttatttatttatttatttattttaagatctcccttctctgtgtttcacttcattgcttaagcatgttgtccttttctctctctttttattttatttcttgatcttagcaaatgagaaagtcgaagatatcaatggatgtccgagaagtcagtctcagatggtaagagtccgatttattcggaatctcagcgctgggcgccattttcaaagttaactgcctttgcatgatggctttcacatttgtctgtctgctgtcctgcttgcatgagaaatcatctgctcccaggatttctgtgtgtccactgtccgtgcaacaacctcagactctgaggaacgctgactaccgcgtaccatgcctgtaggtgtgttttctgacctctgacctagtttttctcttcttctcctgtttgttctgctgttcctatagtatgtaattctgtacactgggctttctgtcagtaaacttaattgcaagttttaagcaatagagtttgctggggcaactatttttggaatagcacttaccttgtgcatttttcaaatataagcatagtgttttgggtgttcttcaggacggtcagtgtacgcatatgagattgtgcctctgttggaaacagctccgaaggcttgcttgctgtagtctatatgctgaacaatatatgacactgagataagagtcatagtgtctttcagaaactcctcagtgagtctggaggccctttacctcagcagcatctgccctttcccatctagcaaaggttaacatctataaataaaatcatagagtgatgaacagctgagagaacaaacaaacaaacaaaaacaaaacagctagtcacaaagccacaacttaattttctgggatgaacctaagatggacttcctgtagtgaggataaaagtctccaagaaagactgcttcagagaattctcatgttcacatagcataggtgctttgattatgttaagggatccttgtcatagatttagtcacgtgaaaaactcatgaacttcttcaacctgctgacttgctttaattaatgtcagaaacctgaaatccaatgtaataagagggatttattcttcaagagtgattaattagcttgcttaaaacaagagcactccaaagaaacacaacatcaaaaaaaaattaaaatgctatcaaaatgccatgatctacagctgttgtgaaaaaaaagtcgccataaagataccgtctctataaaagacttcagctttgagggtatttcctgaccaaattactctcaatgtaaatggttctctgtggaaattaattacatctgctttgtaaagttttactgctggtgtgctaaataggaaagatggagatgctgctgtgcttagtggttctgtgatgttggaaaaacatgtaaactctctgggctttctcagttgaaaaataaaccctaattgaatgattgaatggtgatctctctctctctcgctcactctctctctctctctctctctcacacacacatacacacataattatacatatatatttcattacatataattcattatatataatgaatattacatatatattaaaaatggtgtgcataaaatactaatttaatataattgtatatacaattatataaatatagtataaaatttattgtgaactttgtaagtaacatatggacagattaacacctgttaaaatactaggagagctttttcttgagtttctttttagtgcctgaggtgcacgtatcatagttgtgattctaggacttggtggttgtttccatcattcttaccataagggaatggcatacaataaagtgttttaagttatagcctgctaccctgatgttacattgcttcccgaggatctgatatgcaaacaagctcatacgtgatgacagggaacaaaacctctccaaagctcaaaattatggaggggcaatcctctcatacagatctgaagtatctgggacctagaatttctacaaatctgcagaagtatcttaatagctgtctctgtacgttttctggtttcttgtttgttagacctgctgtgcaacctctggtgtgcatgctatcttaatacctctgcttctgacaacagaaagtgacggtgttatgaaaactgtgactttctccctctagaaagcgttagttggggtcatattacattttgagtagggacaacttggaccgaggctttctgattggttgaatttcagttctgactttggcatgagccccctctgttgattgagaagaaaagctgtgtgacaaatgtaatttctgactggtctatttttgtcattgttctttagaatttttattggcactgcgtgattaatgagtacagagcccagatgagagcatcgaccagacaggaaaagacagacttaggcatatggatcagacatgatactgcagattgttattgtacaactcaaagctgtgcatcaatcatagaatgccatccttaaacacagaagaactttctttgttatctgtctcaacttttgtgacctttggttgctgtttttgcttagtatcatcatcatcatcaacaacaacaacccattaaaaatatcttctagtactagatggtctgcgctgacatgttagattctagggccagtgtagaatcattttaagcacttaatactagaatttctggagacaggaagctgcagtatactgatccatttttaacagtccggtaattccacatttagcctgtgtttacttggagctgtaaggtagatggtagcagggcatttgtttgaagtccatatgaacatcagagttgcaatataagtgcctaagagccacagagttgcatagggaagaacaaaaggtccccagaagcaggggtcttgatgtgttccaggaaaatctttgtagatggagcctaactagggatgtttgacggggaaggcagaacctaatgatgtaagagccttgggaagaatttaggtggtgctttgaaccagtggaggaactggatgacagttgatgtttggctatgtcaagatatgatacgtttattttaaaaatcactggagatgctcctgatatacatagaatgtatgttagacttcagcttgatggggaagatagccagttagtttttgatttttggccaagcttggaatttccattgaagaaactaggctggaaggtggaatgaaaaatgatgcatttatattccctatctatagaggtcgatgcctgttgggccatcaggcagggagggagtagcttaggttgttaccttgagcatctgaggaagctagtgattggaccatgctcatacaccggtgatggatggcaaggaggaaatcttggtggaggtctgtgtaaattcaacagggagaaggtttatgatagagaatattaatatttatgaagtagaagtcaggaaaggaagagcggtaagtgagtgtgagctctttgagaacagcagatcacaggtgtatcttgttaaaactcaggatagatttcacagtttaagttatagtgtttcctttagcacaaatactgaataaacggagtcgattatttcagtgtagcatatgctgtgaaatcccacctagtctggttaatatgctaggttgtgggagtcagcttcggtgacctgataggtgttcataaccagtgggatatctactgagcgacaattcatatgcttgggtatcttattgaaaagaacagaaaagctgctggagaaacagctgggctgggggtagttttctctgtggtgaaaaaaaaaagaagaagaggagatggtagattggggacaggagagatggatatagttatgagaacttgctgctcttaaataggaccccactggcagcttgaaacgctctgtaatccagttcctggaacttgacaccctttctgacctccacaggcttccggcacacatggtgtatggatatacatgcagacaaagcactcatacacataaaataaaaataaatacatctttaagaatgtagcagcagagagagagaacagatccatggtaacagggacatgagtggcaatgtggactcctaaaggaagtagtacagaaagttattgtagagtccgtctagaagattggccattaaagaaaagtattaagaaaacaaacaaaaaaaatcattttcctctgtcatgtcatataggatatgaatatatgaaaatgtggtattgaagtagcttaaaccaatattgaaggaatccaagtcaatatagtaatgatcagaattttaggtcatgctaatataatcttttctgctgttttccttttgtttataataaaaacatatatacatatatatgtatatataattataacatgtcttatacaataaaagctaaatcatgtatgtatggatatacaaaggaatgtaacaatgttattttatataacatggtttcgagggcacatatttaaaaattgactctgtcccctttgaaatatatagctataacactcagagtttcaaagacatgctttatcagtgaatttcaggctatgatcactttgaaacatagacatcattctgtgggagcgcaccaaacactgtatttaagatgaaattaataatatgggtgacagctgtcgagtgatttctaggtaggtaataactcagatccaaaatatatgctctgggtggcataacattggtaggctgacatgaggaaataaattaataaactataaataccaggaatgtcctgaatgctcagtagattaaaaatagcaaaagaaaaagaatgcccatcatttacttgaaaggcagaggcacaagtgtaagcttctcaaacaagaatgttagacatgaacgaaaactgttttgaaaacaagttcttttatttcatcttaagatagactgttatatttcaggatcctcagcaatgcccggatgatttaggaatttgatgggtgaaattcttgttgggcaagaactagtttctatgacagagctgagggttaaaaatgggtggctcacagcttgtctgttcttgatggtgcattcctgtatgtgaccctgcgtctaacacaacattcattgaaccacaactctttgcatcgctttctatcatgtcctatatgttgatgtgtaaaaattgctgacaaagtgtattttaggaggtctgtttctcgcattatttttaaatgcccccccccacttttttattaggtatttacttcatttacatttcaaatgctatcctgaaagtcccctataccctctcaccccccccccaactcacccactcccacttcttggccctggtgtttcccctgtactggggcatatatagtttgcaagacctaggggcctctcttcccaatgatggctgactaggccatcttctgctacatatgcagctagagatacaagctctgggggatactggttagttcatattgttgttccacctataggattgcagaccccttcagctccttgggtactttctctagctcctccattgggggccctgttgttctatccaatagctgattgtgagcatccacttctgtgtttgccaggcactggcaaagcctcacaggagacaactatatcagggtccattcagcaaaatcttgctggcgtatgcaataatgtctgagtttcgtggctgattatgggatggacccccaggtggggcagtctctggatggtccattcgtctcaactccaaactttgtctctgtaacttcttccatgggtgttttgtttccaattctaagaaggggagaagtgtccacactttggtcttcgttcttcttgagtttcctgtgttttgcaaattgtatcttggatattctaagtttctgggctagtatccacttatcagtgagtacatattgtgtgagttcctttgtgaatgtgttacctcactcaggatgatacctccagatccatccatttgcttaggaatttcataaattcattctttttaatagctgagtagtactcctttgtgtaaatgtaccacattttctgtattcattcttctgttgaggggcatctgggttctcatcagcttctggctagtataaataaggctgctatgaacatagtggagcatgtgtccttataaccagttagaacatcttctgggtatatgcccaggagaggtattgctggctcctccggtatgttaaatgttcttagaagacctaaaaatactactcagtgtccccttctctgtgattccgtggcccacaaggatatatcttctaaagaaaatttcttctggatattgaagacattttaacccactgttagagttaggcttgtcttggaagtgacccattcttgattaagaaagtatcctatgccttctgatttggtgctttttaaagttttaattctttttgtttttccctctttgaagatgcagttattttcgataagatgttatttaacattatgtacccccaggcagatatttcactttatggatcatatgaattattttttttcattttgattggttattttatttatttacattttaaatattatcccccttcccagtttcccctccacctgctcacccactcccacctcaccaccctggcatcccattccctgggtcatcaagtctccacaggatgaagggtctccccttccaatgatgccagataaggcaatcctctgctgcataaccagttggagccatgctggtggctgatgttatccagagggtacttaaggttaggacaagaagagagacttgacaaaatagagaagggataaagtgccaggctattcttaaattttagtacaattttatgagtcacactgtaggactctagcctataactcactagaaagctcagttcctaacttgctccattcacacgatcccccaccattttgaaagttactaactttggaacggcaagatgaggaggataatgaaatcaaatgtttattacccatatttctctgatatagtatgaaatacttaggaaaatttacactttacagtcccctcactgatttcattctttgcatataaactgctcttttagataacttatgtttcagttttgagactttccatcctggtggtttttaaaattaaatgtctatagaatcactttgcttattagtgaacttttgagatgtgttatatgggatggaaatggtcaagttaattctccttgaggctgtgcctcagaggaaggaattgtctctggactgcccatggcaacgaggaacggggacagtggatatcacagactgttcgcatactgattttttttaatctatgttttatcttagagaattatttcattttccatcatctttatagctattttaatttgctttgattatcaagtaagaaagatgtttactaaactatatttgatatagtaagaggaagcaattctgaaataagagagatcttctctacctggcttcaggatagccatttaaaaagatgacctttgaacatcattttaaatatagtaaagtctgagctagctgcttcacaaagttataattaaaggattccagtatgaattcaatctaagcttatgtgaacagccatgaagaaaaattcttaactattcttgttacaccttgaaaaatcatattgtctacatattttgttgattgctttgtatactgaagaaatatttaaaaataattgcatggaatccaaaatttaatggtagttctgagaatttggcatgacttattaattgggtttcaaacacatacacacacagacacacgcacaagcacgtatacctggaactagatgtttttccagctcttattattttttaatcagaacagctctgcatagtggtttggactcacagcttgatccaaacctgacatcctttagatgtgtttataaataagcttgacagaatgcagtctggaatttagaccactggattttggctgttcttcttccctctctgcattttcaaatacataatttttaatagaagttatagccatgcagaaaaattcaaagttatcaagttttcccctaggttctctgttcacatattcacagtaaaaactggtattggatgtggaagctgtgtcagctcacattcagttttatactttaattattgaatattctttacttattcatccaccctcaaaaaaccctcaaaaaaaaaaaaaaacccaacaacgacaataataaatctgtgacagaatcagagctagaaaaacaattagctttataacctctcttataacctgtgtctactttataaagaatgcttatctgaaatatatatgaatgaggtatgtgtctagcgaatgcattttacctaaaatatatacctcgagtatatattttagatagcaggcattctttggaaatagtgcttctgactgtattgttttacatcattattttgcctttccttcagacaaaaggttgaaacctagcttgctatttctttcatagattatacatttcatattgtatcaagaaaggcaatgctgcatccaagatggtctagatttttttttttactgtattctcacatttttaattttggtgacttatctttaaatatattgctcactttaaattaattttatgggaagaatgcaaagcctctgtctagagatgatgttctatgtgtgatatccatttgctttaacatctttttttttttttaaatatcatctttccttcatcatgttgcccttgcttctttgttgattttcagttgtctctacttatgtaccttcttcaattggctttctgttctgtccactaatgatttgtttgttctttctcagtgctaggctgccttaatcctacagttctgtggcaagtgttgacatctggtactattagtgttctgatccattttattttatgatttttgctccatggagttctatcagctattctgtgacttttgcttctacgtacaacattgtaatcatttcttcattgtttccaaaatcacactctgaggtttgatttgagattgtacttattctctctctctcattttaatgcctcttctttttcctctcctactcccaaacatgtgataaaaataagcaatcttttctgagaccacatgtgtttcttccacttgtggaaagaatataaatgtccatgtatttgaagaagggtgtggtcataagataggtgtggtcataagatagaaataatatttatagatatttttatggtgaagttgctcattagtgactcatgaagcaattttgtgactttgtgataaaacaccaagttcctgttttgttgtgtctgttgggtcacactgaaagggaagaacttattaaaaatcctgttatcttcaggtcaataaaatctgatgctgctttttgaaaacattatgagatatacttcattctgcctgatgtagttcatgataatgactcaacgtcattaatatttgaaaacaaaggttaacatttgatactttttattctctaccaagtcagttgaagtaaaggtgattttgaccaaaaagaaacttatctaataaaatctttgtatactttccatatctatgtctatatttatcaatatatagacacatacacatagaaatatatacacatacttatgagaagctgattttcacatatgaacaatatatattataatattaatccttctctatactagtatgggtctatgtgtatatatgtatattcatatagataaacatatagctatgcacatatgcctaattcctaccatacagctaaactcttcattttcaatcctcacataatattttgaggaaggaaataaaaatgctttaattcgaattctacacattaggaatcaaaaacttcaagaataaacattttttgttttctagtaacatgtacattgcaatgcccaaatgaaaattagattaatttaacagtaaagtatctatatattaagggacatattaagtaaatacatttcttatatcaaactgcaaagtagctaccaactaaatcttgaaaaaataaaggaaagaaataccaaagagatgaattgagtttccgtgcagttttccctatcttgctctacaaagttgggagcaagaagcatagttgtctcacatctcagtggggttagcacatattcaaggttttattctctctctgaagaattgtcctaaaatagaaggggtgactgagaggggcagtgagcaggatgtagagtaaataagtaaaaaaaaattttttttttgaaaagaattaagtatagtaggaagttgatttctgcatgtcatgaagattttcaaaatatcacaatgattttcaacatgtacctaaatttcctgaaaataaaaataaaataaattgcatgtgttacttgggaggaaaaaaatcacagcttcaaacagagagatttgaaaaggagctgcccacagaatccccaatgtcatgtagtttgaaaaggtgaaatttccactgatttaccttgtagataactgaattgtcttcaggggctactatactgaaccattaccaatttgataaattaaaagtatgaaaatttggtcccagaccttgaggccataacggaagtacttatcatcaggacagaatcaagacataattctatctgagttccttttaaaggtcagatcagaattccattctgtgccttttccagcctttggtgttggctagaattccagggattgtggtcccatcactaatcccctgttttggcctctgaacagacacaagaacattgggcacttgaacagtttggaggcatttaaacatgtaaactttcaaaacatgtagggcaagtggattttgcatactatactatctttacctacttcattcaccagacatcttagaacaacacttgtgcttgacactttgtctatatcatgggcaaattgcgtagacaattttagccaaaagaagaaatagctcagttataatatctgcatttcatttgccagaataatgtgagaaaaagaacaacttcactgcaggctccaggattgcactgaattctagctgtataatttattaattgttcacacacaaatgcaaggcaatctctctagcttctagtaaatggagaaaacaaagtcaaatttatcaagctttgtagggaatagtgaaagggtttttatttagaatacacagctaggttcttaaaaatgttttttcagcttgctccatgtcctagctctgacaagtcagggtagggggaaattgagaagtaacatctagactgttcctcttccttccattcttagcatgtaatatagaacacacagactgtctctttttcatgcaacatatggagctagaacattttggctaaggtatgaaagttaggatttctgagtttgagccagcctggtctacaaagtgagttccaggacagccagggctatacagagaaaccctgtctcaataaaaacaaaaccaaccccgccccccaagaaaacacattaaaatcattgttaaaagatggcaatggcagaaagcatgggtaaaattgacttgtgagctaatatccacttatcagtgagtgcatatcaagtgagttcttttgtgattgggttacctcactcaggatgatatctttcagatccatccatttgcctaggaatttcataatttcgttgtttttaatagcttattagtactccattgagtatatgtaccacattttctgtatccattcctctgttgagagacatctgggttcttttgagcttataaatgaggctgctatgaacatagtgaatcatgtgtccttattaccggttggaacatcttctgggtatatgcccaggagaggtattgctggatcttccggtagtactatgtccaattttctgaggaaccgccagactgatttgtggagtggttgtacaagcttgcaatcccaccagcaatggaggagtgttcctctttctccacatccttgccagcgtctgctgtcatctgaatttttgatcttagccattctgactggtgtgaggtagaatctcagggttgttttgatttgcatttccctgatgattaaggatgttgaacattttttcaggtgcttctcagcccttcggtatttctcagttgagaattctttgtttagctctgtacccgatttttaatgaggttatttgaatttctggaactaaaaaaaaaaaaaaaaaaaaaaaaaaaagacttgtgaagattctcttaacaattcatcagtaaaactatataaaagagatacttcattccttttaactaaaaagcactgttagaccaagctatatagtcagccttgacccttgtccgatcatggagggcgttcctctttaacccatacttgtcactgtgtcctgtcacctgcctccagattgctctggacttcaagattcttgaccccctgggccccccttgcgcaatctctcctgttcagggcattattcaaataggtccagtgtctcttgaccttcttaggaatttcacagttgtggacatataggagctatgaggaaagacatgggtgaggctcagttctctgtatccctggctattctgaacttgggtgcctcaggtttggattttcctgtgaccagctgacattcagctttattcatgggttcatctcataccacaggccttcggttagctcaccttccgtggcctgtctcgggaagagcaggcttctttttaagcagcaaaatggagatgtgtaaacagtaggacatttcgataactatgtcaggtcagttcttagttcagtacttttcattaaaatttgatatacgaatttcctctagaagaagatccctgtgtaggtttcagactttattgtcctttgaggacagtgtcctcattgtcctttttgattgaaaacaatcaacttttctgccttcattttaagtgcccatgtctctcatagaataacaagcattatattatattggaatttatttctcatttatagaaatacaatttcttacaactcctgaatcaggaagggtttgaagggagaagagaacacagtagagggaggctgtaacaatccaaatgcatactatatagttatgaagttggatggggtcacagccaggaggcttcagaagttggtctaattctctgaagtactcaaaaaaaaaaaaaaagacaaaaaagaaaaaagaaaagaaaaagaaaaaacccaaaacactcagttttcattttattctttctgtatgtgttgtaagaaatgttttataatatctggggctttctcactgtttctctaaagaccctcccaatatatggctcctcatttgcccttcatgtagctgcttccctgccatgtccaatctctaaggacatgattgtcccttccttcagccattcatcttctcagggcatcttctaacacttacagtttgcctgccctgttgtggtttttcttttgaactcaaaaataaatagataaataaataatccaattactaaagtaataaatgaaaggagccatcatataacttttaactaaagcagagtaattactctattttactttctttctccagacaagtttatgtttggttagattgtttgactaaaatctaattatttaaacccattagagtacacttttgatcaaagtgggccttcctgttttgattttcttagcaataatatctattattcagttaagtgatttaacaatttaactaatttataatattgcgagttcattgtgggaaacagaagcataaatgatgtcaggcatggcagcacagggctgtaatcccagcgcttgggtagctgaggcagaaggagtaggagttcaaggccagtctgagatatatgtcatgatccaatctcaaggtaaagttattaagaatacatttaaatccaagcaaataatgtaatgtcccttcagagagggctaaggtaggactgacttgagttcttcacatctgtaggtatctagcccttcacacatcttctaaccggagtgtgcatcttgcggacaaatgagccttcagccatgtcatccctgcagcttaccctgtgattctttgtctctttctgtttcacttgtatttgtatcaaagggcagagtgaccctttcggtgctgggagaaatctcctttatgtgtgtctctgtatacaatgaggcgttgttcagttgtccttaacaacccctgaacagttttccttgtagtagctctgcctgataggccttctccctctctctgcggctagtctagctttatcaaaatctgaattatcgctcaactctaaatggcatgctgtgaaggcgtctgcagatctatagtgaaaatggatgactccattctctccagtaccatgcaaggctgtttatatatctctcttggaatttatcatacagtgtcatgtattatcgtgatgtatgaccctttaccgtctcagcagctattttataggctcacaaagctgaagaccttgtaattcatttttataatccttcaccatcccacagagccctttgctcataataaacagacaatagttgctggatgaattaatcactcagtgttaatccccgtatcatgaataagatttaaacatggcttccaaggctaatattaatcatattatattagggtgcaaaagtcgttttcattaaatatccttaagcaagtatgaaaaaatggtggggattcaagctctaaatctgttgatgttgtgaaagactcctctcggtccattactcagaacaggttacaccagttttgctgtaaaataggtcagtaatcatgttgcctagtatatgagttcagtaaaaagatggttttgtttggaatcaattattcagcaccgaaaaaaatagacacaattgtttgtaatgcaaccaatactcacatctagaatacattagccctcagttaaaataatcaaaagtgtaaatatatttttgattgctttgactgttctgtaattgaaaaaaaaaaaaagacagtatcttcccccacccccttttcctcatttgaaacccagtttgatttggcagtcacacatttacataacaaggatgtaaggatcaacataaatgtatagctatgaactatggactaattgttttacaaactgggtctctattatttatgggagtttatgaaattattggaatttagtcagtgctctttaaattatttcacaacagtgtctcttccttaagtacaataataagtactgaatgaatgaataaatgtctcagttttgtataatatggacccaaaaggtaaaattatatttgtagtaactatattcattttaaactgtaaactttcagactagagaaatgatcagtggataatagagattgatgttcttatgcaggctgtgagtttcatttctggtgtccaaattgtgactcacaaccatttataaacccagcttcagaggatccaatgttcttttctagtttctgtggaaacacctggctccacatacacagacacctgcatgcaaatgtaaatatttttgaccgcatgctgaaaggttttagtttaggtgtttgtaacaccattaaatgtttagatagactcaaaaagcttcagagctcagcttacctgtatggcgtgatacttctgaaaatatttattgtatataggaaatttacattttatttttattatcctgttagtacttttatagttgttaatcatgatgacatttcacacatgaaagagggaaagtgggcgttccacaccacaaacatgcaaatcactgaaagtagaaaggactaaagtttgctaagacaatggtaggagactagaagcctttgcagtgattatcagttgaaatgtggactgctaacacatcagataagggatgtcatcatggaactcggaatgcttgtttttgtaataataccacaaaggtgtacaggtgtgactataactgtgtttcaacacaaaatgcatgagttacataatactatagttgacatgagttccataatactacatgtagttcacgtaagtaagaggtagtaacttcctataggctgtgtgtgaagtttccacaacaaatgaatgtaaactgaagttgcttgagggtttttccactgaggagagcagattccaggatttgaaataacctaaattttttgattaaactggccccatctactgacattttcattttattcattatgagataaaaacaacaactctgcctttgaaagtgcctattgtttcctatatagcataaactttgcaagctacttggttgttattattattattattattattattattgtaaaacaatattaagacaaagctgatatagggtctaaatccaaagaagctatagatatatttggtttattttttaccattgtcccctttattaacatcaaagagttttataatggccaccagtcttttttgtgggttatgaattctggctctgtgtggggtatagagctaaatgcttcacgcatataactcctttgagcattctctgtcatgacattgtatctaagtctcatttcatttgtctttaattgaaagggtcacgggaggatttccccccatgggtatgcaagcagtggagactctcgggatttctttctgttatttcacaaatataatgttggcaacttctgcccacacatcagccttgagaagatatcaactaaggatcgctcctgagtgacaggctggcctttctgtttcccaatgctgtgcttgttgctgatcaccaccatcctttcgattccagacgacaaatacttttcttcaataactcaaatggcaaaagacccaagtagcacattttaaattgatttcatctgatactgcaccttgtatatgatactatgttttgttttattgattcattgtggaagtccacaaagattcaccgatcatatgatctgttcccatcagcatatgcggttgtgggtaacagcagatatgagagtgagatgcctcttgtcacctgtagagatgggcacgatgaggatagaggctagaatctcaggacaccaggacatgatgagaatagaaactatattcttaggacaccatgggactactcagcacaagagattccacagtcagaacacacactgattttgattattaataatcttgtgatttatggcttctaatttatggtttgattatttttctattctttctggaatggtttgatgcctctgccttctgtgggccctgtgctcacatacacatatcctcacactaatacacttcttctctggagtatggtacatggaataacagtgctttttaatagcatgtagactttggattaaaagataactattgctaatttttctatttatctactatactatatattatatgctatatagcatatgctttatgtcatatattatatatcatatattacataatatggtatatattatattatataatctattatatataaaatatataaatagctaccatttatataagataatataattatatatttttatatgaccatcaaccatgagccatccttggttgatatctgaaggttggtatgtggagagaagttgccacgtttggatatatatacatatatttatatatctagtacatgtatatatgtacagtatatataatatattataatgtaatattatatatatcaccatgtaatatattattatattatatataatataatataaacacatatatacgtataaaaccatactaacaacacacaagtaaatgagtgtacatacttataaaacatcagcaagtatatcttgatgcctgcaaccaaactaaaggcaggaagatatctgtcactcacctccttattgccctgagttgctccctctgggcctggagttcggccaacagaaggaaagtccctgtgatattcccatttgcaccttggcctgaactcagcactgggattgcagttggcatgatcacaatcaatcttttactttcctgaagattgaaccttagtcttgaacatgttctcacccatggatccatccatctgaggcttttccctctattcttttttaaaaattatcaatcattttatttgtttacatttcaaatgatacctcccttcccagttatccctctacaagcctccatcccatctctccttcccctcccctttgcctctgtgaaggtgctctacccaccacacccccactcctgcctcaccactctagcatcccctacactggggcatcaagtctctgcaggactgaggtcctcccctcccattgaagccagataaggccatcctctacttcatatctatctggagccatgggtccctccatgtgtattctttggttggtagtttagtccctgggagctttgggtgggccggatagttgatattgttcttcctatggggttcctatccctttcaactccttcagtccttcccctagctcttccattgtggtgcccatgctcagtccgatgattgactgtgagtatctgcatctatattggtcaggtgttggcagagcctctcaggaacagccataccaggctcctgtcagcaaactctaacatcagcaatagtgtctgggttaggtgactgcaaatgggatgcatccctcttttttgttgttgtttttctaatagcaaagcagcctgagatagaatctgacatacatttcaacacaataccctcactgaagactcagatgctgctggtggaatgaaatctgttaggtcacactctggtcaaaattttcagctccatttttacaacaaagtactttcaataatactttcttatcaatatatttctttctcaatgtaaatgtgtttgccttggctttatttctgagctttaaacatttttctaggtgactaactttaatttcttgacattgagaatactctcttgcctggtagattgagacttccttccttgctcactttaaatgtttatgagctggctgtcatactactctgagtacttaacatccatgcacattgaccttttaagataggaaacatagtgtttgcatttaaccacaggctcactcaactgtgaagatgcaaatacaacttttgaaagaatgcttttttttcctgtggcttagaataaaaagtatgcctcatttacttcggagaacagctctcatttttatatatcttctgatggaattcagtatcccacatcctaatattcttagtaattgcaatgcttccgtctcattgtggatggaggttttcattgagacttgtttgtaaaacacagatctagttttatgatacgtaggtgggttgctatgattcaagaatgtcattctagattgtgcctttatcaattgtttgcaagttcccaagtggacaatggaagctttatggtcactctgtattcagccaagataattctagtaaaactttggcaagtctctctagaatgacatgaatgtaaagtattacttcttctccccccctctgccctgccctccccgcttgtttagttgtttcgttgtttcagtaagctccaatgcttactgaagagtcgttctctaaatgggattttttactgcttttcatgttacagattgaaaatgtcgatgtctgccttagctttctggcagcccgaggagtaaacgttcaaggcctatctgctgaaggtaagaaactgtactgtggtcacaagtggctttagttattttctgaaagaattttcatgttagaaatggagtgttgcagatccccttagttaatggcggaaatgtataggtgcataaagcaaacacgatgtcttgtagtgctggcatgtgctttaattatttaaatgttttgcaattttctaaaactgctttttatggcaatatatgggttggagaagaatcaaaatagcacttatatcttattgctaatacagagacttttaacttcttaaatagatgggtaggtgatcatgtcagtcctggtaatacatggataggaatgtggttaaacagtacaattcttgtacaaatattttaccaataattcttctatgatatgaccaagctaattacagacaaataagtatttgtaagtggcacaatgagttattaaatgcttagactgacagtactagtaagcactatttgtgaatatttttgcaagtcattacaggtcagattgacatttaattttagtgaaaatttaattacaataaattataatgtaacaacatgaaaaaataagattgagatgacttcctcatttatttctggttcagagactttcttgcacatagaaaggtaacattttcaaaacttgacctcatgtatagcccagtctttgcctgagttaaaatgaaacaatgtttctcttcctgtgtcctccctgccatcatttgtaaatatgctacacatttctttccttcattccatctgtttacttattaattctaacattaatatttaataaatgtatgtattatatttatttattggttcattatatttattaataaatcaaaataaaattaataatattagttatcatagttattaacaggtgataaaggttttatctaaatgaactgttggtgagatagctagtcctaagtaagtagtgattttaaagtattagtaaggaacatttacaaaatttccaaaactacaaaaatttgaaatagtaagtcctttgtgacctgcagttgtgacagtagttaggaagctaatatctttaaatttctaggaatacttgatactgctttagtattttaaactttcctgcaagtaatttgccttggaaacctttcctgtcatcaaaattacaaatattgaataatttaaagtttttaaatgttgtcatcactggaataaaataattgtgactttctttaatacgattgacatttaatagaattattttacttttctcagtttctccatattttaattgtctactatgcttttatatttacgtgaaataaacactatgatgtagaattcagttacattttcagtggctaacaagctgagattaaaatctaactgctggttctatttcttctgatagaattggaataaaattcatccctgactagactttgctgtataagaagccaaaagccagccagaaatatttccattgctcattttatatctcttacatatcacacgctaattttgatcatttaaatctactgattttggttcattctttaaaaatatattcattgtcaagaaacacattctaaattaggtatatatataataagactgcaatggaagaaccttttgaataaggttgcacaagtttgcaggaattgaaaacaatcacagttttctcacggtggcctcattgatcaaaatggctctcctagtttatggagattataaggaatgtctaaggtaggaaagcacacaaatcctaacgagagtttgatggactcaactgaaccgaatagtcagggttagcttataagtcatcaatgagtaaaacccacagagctcgttggtgcacctaaactctagaaggggacctgacacttcaggggaacctctttagtgacaaacaagttttatttaaaatataaccatacacagagcttcatttcaggcttaacttacattactcttcctagtaatagggttataacttcagaagaaagagggacctggccatggagacacagtggagatgttgtgtgagaagacttagaagaggagagtgggtgtggattatgttcaaaatacctggtgtacttgtataaaaatgtcaagcttatacatatatgtgttaaaaattaacttggtgttgtagctgaatttgggcatctagtttttgttacatagcatgggaaaatctcccacagcagccctatctgtttcaattggtatttatgaataaatgctttacagttatgtaagctaatcattagtatctagtagcatgtagcataaagcacaaggaacactaatgtatacaaaataagcatttcaactaaaataacgatatgatatatgctcttgaggacctgtgcatattttaaaaatgtacatccaaatatgtgaccagactggctcacggtgatttggaaagaatgttcatttctgtaaacccaatttgatcttatgagatgtgcccacaacaccattatttgtaactgcaaaatgatagatatttaagtggtagcatttctccctagccacgtctatgtgggcaacagctatgtacactggggagggaagcagtgtgcaaaatcaaatggttaccccaaggcagtgaacacatccttttccaagagtaaggaaaaccacaacccacagagcatctttgtttagtggtatttcttccttctgctcctcgctccccttctctcagtgtcatctcaagccactttgtaacggtggcagagttgagaaattcagattcaactgtaactgtgaataagaggacccacttgtattttcatcctcatagatctgctttaagaggattacgtctagacttttattcatacgggaaaataaaatcaacttaaatgtatgtgaccgtgttttacatcttttcatttgctacagagataagaaatggaaacctaaaagccatcctagggctcttttttagcttgtctcgctacaagcaacagcagcatcatcaacagcagtattaccagtccttggtggagcttcagcagcgagtgactcataccgcccctcagtccgaagccagccaggccaaaacccagcaagatatgcagtccaggtaaggaaaggaggcagggaatgcatttaaaatgagcttgtttaggcatggtttgacttttccaaattattatgagttcatagctgtgcttatgtgcttttatcttcatatgatccagatctatgacttgtggacgtcaggctcaaaaatgcttctccttggatctgacaggaacgacctattgttttcttagggcacacaattttattttctaatggtgacttttacatatctaatcatatatggtgtccttggtggaggcaatggcatatttctttctccagccaattagtttagtacatataacatgccttttgagtcctggtatcctgaggtctagttatcttttattgataatttgagttgattaaatccatcaaaagtcaaaggatatcatttgcggtatctttgactatttgagaacatattgattttaaagattatgtattgtttgtatatatttgtatgtatgtgcatgcatacatttatatagcctggattttggactgcgtaggtacagtctatttgaatagtagggttggctaggaagtgaaatctgaaaggtggcctagtaggagagacaggaaataccctcttgccgggaaagactcaaagttttcaaactgttcaactggctgaaatttatatcaagagtatgtaggacagatctggaaaaacaactcagtggttgtttatatgtcactgagtataagaggtccttttccaacacccatatcaggcagctccaacctgctcagttccagggatccaaaggcctttgccctttacctgcacctgcatgcatggggttctcataaaatcacacagacacgcacatacacacatgaataaataaggcataaatttcgtgggaataaaaggatcagctagagtggtttctcacttgtggttatcagatcatggacttcaaccacacctccaagtatcttcatgtagatgcagtcagtgttggattggctacctagtactacaaagggttacctctttggaaacatcagaaaatgatcaacagatctgatttgagctaacaacttccatgttcaactgatagatgtattcctgaagaaagataggatatgtggatcaattcgttctggtgcctaaatgggaatactatttccttaaagttggaaaatataaaaaaaatgttctttatgttagaaatataagatcaaacatatataagtatttaatttgtttctttcattgaaatcatgcttaaaatagtcttgattgtgaacattcagtgtttgagagaaaacaatttagaatttcaaatcagttttcaaacactgttccctacatactgttgcttgttcgactctagaaatgtcagccagctttgcagtggaacccccgcccaactttatgttttgattcccgtgtgtcatgcgtgggaaattctatcttctttatcagatatgcttagcaattgatttgtaaatgatggaaaagcttaattttaccaaaatgccatggatttcatccttcatggaatgataaggatagttttttttttattctgaattcagtaatatggatactcttctgactgttaggcagatcttggctttctgtgatgtctagtgaaattgcaccagagtgaatgggaaaacaaacaaatcaaaatcaaacaagacatggtcatgaaaattcctgggctttcttaattgtaaagaagaaacaggaaatctcatttattattatttgtgtttacatggttggcacagagaccaactgacaacagagatacctccttgagatgggatttaagtgatttgaatgggcagaaggcaagaacagtagcagaagggtaataaaaataccatgatttttctacaaagcatacagactctgaaagagaccaagcaccatttgtcctatttttccctcactctgttcttaagtcggctatgtggaatttcttgtctacaatttcttgatgcttttgaactttgtgggataaatatatttttgattctttgtggatatgcatgggttctttgaaattatatgttatttgcaaatgtaaattggctatactcatatcattctgggagagaaaaagtattttttggttgtaggagtttaataaaagtactctttcgattttcatttacgacaaaatgaacttttgatgtttattatgctaaattggatttaattagcttttattaaaactttattgtaaggtattgaggtaaaaaatatcatattaatcagatccaagtctatacagttcagtgaactatgaagttataatgggcattctgaagctatggagtatcatagtttttttttaattgatacttaatttaataaatatttagtgtacctgcttttgtatgtgtagtgttcatgaccctggtgtaacggtgttaaatgtcaatttgcaaatagtttgttaacacattttgaaaaacacattattatgcttcagtcatcaacatttatttctattcatatggatctaatgtccataagctataatttatatgaacttattataataatgctccttaaacatcttttatagccaatagatgtaacatagataagaaagcaatatagtatatttctgttaaaatcaagataatcagtacagaaaaatctacaatcacatttgcctttgttgctgaaggcatgagccttaaatatgatttatgacacctttgtattaatttcaaagttctttctaaccgcacggtttgaatgaaaatttaatgtactctgaatagttagcaaaagttatttttcttttcagattaatttaaaaagccacatggcacatccattcatgacgccccatggtttttgtgttattctctttatttaaaatcatcattattatatccacaatatacattaaggattttgttttcttcgccctcttgaaaataattcaaggttttctcatggcttcaacagcttttacttaagcagacacctgaagatttagtcattaaaagctcacctatagagttagggatgagattgggtcccaagcccactcattcccaactgtggaaactaagtagcctctgttttagttgttcttctcttgtaataataagtcccgattaaaaacagctcaaaggaggaagaacctattttggatcactgcctgaacttgattccatcatagcaaggaagtccaagatatcctcaagcaactgctcacacagtacttacagtcaggagttaagagagtgccgcatatcagtgcttacttagtacactatctccatttgacaccgtccagcagccctacccagagatttgccccaaccacagttaaaattggtcttcctacatatattaacccaaacaaggtcatcccttgcagacatgttctcgcactaaagaatccttgagagatttactgggagacccctgtgagtcccgttgcttttgacagatagcacttgacagccttacataacctcctttcttttagtctccttactagctaaaacaaaataaaatgtactgtcagaaaattgtgtaggaagtcatatggatgtgtatatatagcctggcatttgcttctcccctggtgtgaatcttatggacctcagaattggaggcttagtccacattagtaagtcactcctgctaaggctaatgtttctctgtggtatagcttggctatgatccttgggctctcctttaaatattacagactccccatccccacagagccttgatcttcacattactctttcctttgtccaaatgctaatcaccttttaacttatgatttatttgtctacaattcattgttcatcatctcacatgtcacacttggaaagtaaatacaacaaaatatttttctattttttgtttctaacattatgtttcgtggattctccgtatcaaagttttaatgaactataacaaatctgcataacttctatctccaaattaggtaggaaaatgttatatttatacttgccaaggcacagagagataattatcaggggttctagataatacacgaggctgtgaaagttgatgtcaaagaaattgagggaagagtagtcattgacaactcttggggaagtgtgagtgagtcagaaggaagtagagagagaacggttaatgacaaggcacagataggcaggagtaataatttccaatgttttatagcctacgggataactgattggcaacaactgattgaatatttcaaaatagctagtagagaggattttgcatgctcatagcacacaaaaatgattaatgtttaatgtggtaaatataccatgtgtcctaatgcaatcattacgaaaagtttgcaagtactaaaacctcatactgatcccacaaatgtacaaatttctatgtgtctaatttaaattgcaaattaagagggagcattgaaaaagattgatagttataatttcgacacctttaaaattaaaattttataaattcatcaatttagtataacatgttaattaaaatacattttgagttactcataacattcagaaatagtctcgatgtggcaattagaatgatcagagactattgagatgcatggatatcgttgtttcaactgcagtagaccttgcatcctgccttctttacctagtcactatagattatgaactaatcttttcttatgttatttatgataatcagctctactagtatcgctgcctatctccatagtccattttctgattctggatgtgatttctgcagtcaaaatataaggaattccaagatagtttccatctggggctttttaaaactaaatagcatgaatgaagttcatttgctttgtaatgtcactgacagctgaaggccattcatgactatcacttctttcctctgggatatgttttgcttagaagagccaaacaagataacagatctagtggtatttagaaaggacacagctaatttacagttaatagcacaatgtatttattcagtttaaactagagtctagtaaatatattgatagtatgactcacaaaagataaagaaaacaccacccttggagctggatacatagctatgcagtaaagagctctgtttactcttctaggggacctacatacatttcccagaatgtgaatgcaaccagtaataccaagataatgaatgggttagatttctggagaatgtcttgtaagatataataatcaagaagataataaaatatgtttattttgttggtatgagttgatttagcatacagggaagaaaatcttttgtttactagaaagttacaaaattattgtttttcataaaaatgggtttttttcacttaatttctgttgaaatgatcaaatgacttccagcactattattagacaagtgttggcattcaccacctaacacattcaatcatatggggaaataaattatgccttatagaactgacatgtaaaagcactggacatgaagtacataatgtgtcaagattaagaagttaatatggacgggatgacagatgtaataaagatgtgatcatcatacgtcttttaagtaggaaaaaaattactattttagaacatgagggattatcccctggtggtcaattgctattcttaactttatttttggagagcaaataacaaagccatcaacttcccatgtggatggagctgctcctgtagaacacacaggctgatagacacaatcgtgggtgagcactctgagttctccaggaggcctcccgggccccatgacccgagccacacatactgctctgagtgtcctctcccatcaggagatttgcctctcagggtttctcttccaggaatcattatttccttcagagagatgcactcccaaactgggatgcttttcagctttttggcctggggttataaatcctgaaatgtctctaaggagctttaatttaggatgacagaaaagctttggtgatggaagccctcgggaacctggcttcaattagttaatttattcagctctgtgttgtggtctgtggtgtgttctttcttaagctcaggactcaaagctttaagaaaagggaaatgaggaggaacatttatgaatcttaagaaaacaaacaaaaaaaaaagcatgatcttttcatccctaggtacacataaatgaagagaaaattttctcttatggaactgggaaaccaaggagatggatggtgttaatattaaaagcaaacctgcatatgtgtgtatgcgtgcacacactttcatatgtgcacatgcacagctgtttatgcaaatatctattatgcatatattttgtttgtgtttatataccaattctatttttttaaagaccaaacaaccattgacacttctgttgctttgaagacatgtctctgtggttttggttttaatgactgtgcccacgtgagtgttggatttgcctggcagttgctggtgtggtgacatggacgagagtttaagcttctcaatgactcgtgttctcacctctgaagttaaagttgtacaagagactatatgaattatgtaatgaacatccagaagtttgaatgccttacttatgtattttatagaaacagtttccaagtataaggacttttgttccgattatactttatttttgttctcaaatcataaacacatagacttgattatcatacttgcaatgttatgttttgtaaacttgttacatggttatcactctcctcatggacagtgattcccccaaattgcaacttattgacttaaaatggaaaatgcaactgacttcaacactataataatcctacctacgtgactgttgcctcatgctcatatcattaactgatatggaaaaatcaatctgtaatcagaggcctagttggtacatatagaatccagtctagagagacagactttagcaaccgaagccatctcagccatgaggatttaatcatccatgtctttacaaagccagatttcagtagtttcttcttcattctctcctctccacagctccctgttaccttgcccactgtttgtctccaaaccctctttgattaacctttgtattatacgttgcattttatactagccttcccttcctctaacactgagaggtagaactgacccaagatgttttgaaacccagacatgatctaatcacatcaattcacatgggttgatgatcatatatacttcacaataagttggaaatagcccaaggattaaaaactcaaaatgtagtttatgaaaattgatgtatactttagagatgtggacttaagcagttattttgtttgataatgaaggataatttacatgaacaaatagattaatgtatagtttataaacgtactctgtactgaactactgtgttttcagtctgtagaaatattaaccactttttcacttcccaggtggtctttgtcgaggttgccttaatttttgaattagaaaagtagcttagtccatttctagagtttaatttttttaaagatggttgtatttcagcaggttttcataattgagctctcaatgtatgggatgtaattttgctgtgcaccaaaaatatatagatgaaaaaatagctacggaatgacagagtatttttctcaaagctgtgtatggcagaaatcattgtggaaatataatgtatgatgacaaagaatgagaaatatgagcctagtttctgagcatcctatgtcttaaagttcaatattccaaaatagcaaaggcttgaagctgcaataatatccttacccagggatctctctccttagttactggtttaagatctcacaaaagtgggccaagcaggtgacctcattacctgcctacatatgtttcagtaaggctaaagttataatgagtgctcatgccatattctactagtagggtaagttatcactgtaacctgtcttacataccatgaggatgttatttcagccacccagctgctaaattgaaacatgtgtggtggaacctgagtttctgattcattgatggtttagtgaaatcttagcaaaccttaagcatgttgtagccatagaattttggcacatattctgaagtgcaaatactagcaaaatatcttatgtgggttttaaagaaatgtatactgcttgaagatacaaagatgtaattgttgaaactgttctttctgcaaactgttagtcaattatcattttataagagtttgcaaaggtcttacataggagaaacctttcatagtaaaggaagaattttgattttaaaataatctctaaatctttattttatttattaactttacatctgccaactgaaacactcctcccctcctccctcccctcccatgcccaccacacaaatccctcctccattaccctctcctgttctcctcagaaaagggtacccccacccttggtaccatcctgccctgggatatcaaattgcagaggactaagtgcatcctctcccactgaggtctaaccatgaagtctagctaggggaaggggaaccaatggtcagaggtagccccagctccagttgttagtggacccacatgaaaaccaagaatcgcatctgctacagaagtgtaggaggcctacatccagcccgtgcatgctctttggctggtggttcagtttctgtgaggccccctgaacccaggttagttgactctgtaggtgtccttgtggctcaattatattgatcttcatacacacatgtgatatgtttgatcaaatccactcctacttttcaaattttctatacccccctcttcattttccttcccagtgctcttaaaaactaacaaaacaaaacaaaacaaaacaaaacaaaacaaaacaagaaacaaaacaaacaaactaaagtgagtccagttaattctgcccttaagttcattggtgtaagatgatctgatgtcatacatcttttccacatccctgagaagagcttgccctccctcgcaagcatgatcagctgccaatagcttttcagctagggctagaacttctccctggaaggagtatcaagtgagtgttctactttggtccagagtatgaggatataagttaagctgaggaaggagagcaaacatcaccctatggttgttgggaattctatatctaataaactgagactttcgtctgaacattgaagggaattgctctggggccttttgaatcatggaaaaatgaacgctgggagtcataaacattagagagtaaggagtcaaaccagaggaatttatacaaggaacaaaaaaaaaaaaaaaaaaaaaaaccagaataatggataactcagcacagaagttggaggtcccaaatattaataaagaaagaaatataatggagagattattcctgtaatcattctttactagaacagggttttttttctacctatgtaaagcgaactgctctgccaagaaatgccttatcctttgaggtattttatcctagaactttcaactatttgtgaatattacaatatgtataaacataagacacttgttgaaatatactattttataaatgtgttttattttattacatatcactatattttcatttaatctgtatagcataaaataaaacagtgttgaaattacgacaccattggattttacatagattcgaggattactctggaagttttagttcttaggacatattgagtcagtgcttgctgattcattgtaggtgaaggcccttaaaaggttcacaggactgacttcaggaattaataagagtaaataatatcctgtaatgttggaagtggggtcactttaggtaccaagaaccatatttgaagcctcagacattaaacagaaaggactatacatgtgagctcttgagtaagactactataatatccaaagtgactggaataaaacaagggatgtagtttgggaagataatgaagcatcaggagacaggctcctgtttgagaaatagtgttatgttttacaggattcatcagaattttagaccctcctgggattcttcagtgtgaatatgaatttcatttcatgttgatttcagttattatatgatgtgtttgacctagacattcattctaaaggatgtgtaattaaggtctcataaaaaatttgtgtacataaggttatcagggtcataaagagatgaagaaacaggcagagagagtaggtaaatgaagagccagccatagtggtctaactccagcatctgagttatgaacaatgcactagctctttactcctagacttttagtttatgcactgagagtaaacatttcacacatcactctttgcccacctaccttttttatttatgtgtttgtatatataaccttgaagtaaatgtaatttcaattatatatccagctatacattttctgatgaaaacataaattaatatgcatggctttggggaatgtatttctgtaagtaaagtgccatttattgccatttaatcctaattttaataaattaaaccttttgagtgttgaatcaatacatgtccagtggtcactatgcacctttttaaataatccatacattgttttagtcagtgaatggacataatcttattataatgagagggacatagtactaagtcaattatcccaatagccatgtgtactttttttactttaaaaacttacaaatggaaagtttctatcttacttattcattactaagaagtaattttttctcaaagtatttatgcagttcataagagagtaattaaaatgagcatatattccactatggaagtaagttttactgtacagagaaaataatgagggccctgttgtaatgcaagttcagattcaaaatgtataggttgggacttgagactgtatgtcccttataagtcccaggtgatgccaatgtgattggttacctgtgtgttagaaaaacactgagggaatgagtcagttttaataaacatgaggattggagaacttaaggacaggttagttggtagtctaacagagtgactacatactgactcatcttcagggatttagtgggaaaggaaaaggccattcatgagcacacagtaaataatgattgtatgaataagaataaataaataaaaaaatgtattggaactttggaggtttatgaagacaaatcatgagttggttgtggtgggtgagcttgaagatgatgcagttgggcaagtcttttagatacctgatataaatgttaccatataaagatgttaatgcaggaaatttagatggactcttaatcagaagtgaagagatgacattgtttgaggaagcaggccatactctgtgttgagaaggccatgcctttaacagttgatggaaagatatggaatgaaagtaagagtgtttgtgtgtgggtcagttagccatgctgggaaaagatgtaacaaatagaaaacctgatagataccaagacattaaaaagtcctgaaatgaataaaaccccagtgatgtccacaataattgcctcacacatcttctcaataacttgtaaccccaatctttaggaccctgagagtacaggctcatgacttagaggccagcctgtgctacataccatgttccaggcctgcatgaactatgtagagtgaccatgactcagaaaaccaaacaggacaaaagaggagcggtacatataattggttagcaaaggcaagagataaatggaagatgccaagtatcaaggaattgaatgaattaagaggtattttttacaaaaacagtcatcatgtgaaatatactttcacagtccatcagaaatacagccatgaagccaaactgacttgggcaaagtcacttaatatttctggaacttgctgttgctttttcattattgaatggcagaattatgttatttcttttaacattattcatcgaaataatgtgctagcttttagttactggaaagcctgctgttttgttatcatgtttactggtcttgtctatgttcagtgcaggagtataagaataagtccctaaattgtaggtggtccttttcctgggggcagtcaagagatttcctcctcttgcttgcttttgaaattctatttttatttatttaacttctacatgattgtattgaaacagctttgttttacatttattctatgattttgttgacaccctagtagcttagcacttgtctcagttcatggtatagttaaaatgcagattgttttgtacataaatagcaatgtatcaaacaatggatgtgaaaaagatgcgctctatcatcatgaaaatgcctttcagatgagaatgagcgccctttattccaggctgcagtaagaccaggcatattcacaatgcgggcaggagcagacagagaacaaaacacactaccagaaaggaaaaaaaaaaaaaaagtttcttttgtctaaatcctccttgcttagcatcagagcagcatgtgattctgtagataaaatagttctcctaggaagttattctccatgacagcatctaccctcagctacaatgggtgtaccaacaggcagttggatctatagagtctacctttttttttctaaacaccatatcttcaacttttagcatgataaacatcaatttaaggtacaaatttgtgttttgcagatcaagtgttaatcttcaaatttggtttaaataatcatgccgtatgttcctttgggtgaagtatttaattaaaaaaaatggttgtggggctaatggggtgtatcagtgtgtataggcactagtatacagattggaagacctcctaagttcaaatccctgagcctatggggctagtggagtatatcaatagatatagtctctagtgtacagattgaaaacctcctaaattcaaaccccaggcttacaagcttacaagaaaaagtcaatcccagaattattctctgataccacatatattgtatggcataaatgaacctgtgaaatgcatgcatgcgcacacacacatactctaaaatagttaaatataaattaaaatgtttagtcattatcagaaacattaaggtttttctttttgttagaaattaattctatttattattaaatttttgaacacagctctctttcaataaaaatattgtaatttaaccttcttgtaaaaattatatgctattaggtattaaccatagcatatgggttatcaactcagtttttaatgaattgcttttcaaaacatttgctttaaaagagcaaattagagatttcatctcatcatctcttccttttactattctggaaataggaattttagcctgtaaatgaaactttagagtttttaaaaacgtttttaacagtcaaaggttaaggttctataagataaaataatattattaagtatttataatgtctaatatttctcagcataattttaaagtcagcacttttgccaagagaacggtggtgcattcatggggcattcataagtgaagctcatagcgtttgtgttgcattaccataattttctgattaatttgttcttcatatatgtttctgtgtgttccaattgcatttcattgactcataactttgttgtaagtttgtactttctctccatgttcaaagaattcctttaattccatttctctgtttctcctcatacagtctgacagccagatatgcagctcagtctaaacacagtggaattgcaaccagtcagaaaaagcctactaggtcagttcatgtctctaatctattgtttgttagtgatattcacgtgaatgccactgatactctgtccggtcactctaagatctagaaaacatgattacttctgagagccctaagtttagagcactcagtgcttccaagtggacttccagatggagactgtggggtgagtggattcggtggttaagtgggtttagaggtctggctttgcttgagatttaggaaatacacagtgatggtgggcagaggctgtgtccttcgtttagagcaagtgaggaacaaggaccttataagacctccctgatctttttcaaggtctcagaatctgaaagtttcacaacagaatttttaactattttgaaagaggcatatatggagaaattaacttaagatgagagtctatctaaaataacctaaaattctgcttttataacatatgtgtgtgtatatacatatatatgtatatatatacatatatatgtgtgtatgtatgtatgtatgtatatatatatatatatatatatatatatatgcttgcttgttgtttatgtaattgataaaaagggataatgggagttcaaaccagctgagcgaaaccaaaacaaggggttgcactctcctgtgtgctgctgtctatgttcccactcccagaggagctatgtagtggtggaatgttagccattgcttcagtcatgaatcaggctgctcaatgctcccttgtaagggattctgatagcttaagtccatgtgtgactttccctggctttgtttgttctgttgttgttgttttgttttgtttttttgtatgaatttccacaacggtaaaaacttattctggggagaaatatattttaaaattatttaataaaaatagcaataaatggcataagttgctctacttgaggacagtgacatgctaagcatatgtgaataataagcacatttatggctcctgtgcacacaggagttataaaacatatcctaagttctttgttctaatacagcttttctctgtcatgcattctctctctctctctctctctctctctctctctctctnnnnnnnnnnnnnnnnnnnnnnnnnnnnnnnnnnnnnnnnnnnnnnnnnnnnnnnnnnnnnnnnnnnnnnnnnnnnnnnnnnnnnnnnnnnnnnnnnnnnnnnnnnnnnnnnnnnnnnnnnnnnnnnnnnnnnnnnnnnnnnnnnnnnnnnnnnnnnnnnnnnnnnnnnnnnnnnnnnnnnnnnnnnnnnnnnnnnnnnnccctttttattgctctgatgaatgatcgggggggggggggggggctctggctgcctggtaaattagggtaatgagaagagcaaatgtatcttttaatttgttttaatttgttcttctgaggactgaagatcacttagcttcctgggtcacaggaaagattaaaatgcatcttaattgctttctagaagtgggtcaagtttcattgcaaccggggcaagttccaggacaaactgtttacacatgagtttggaatgaatttcaaagtctatggctatgtctacagaaattgctcttatatttattgggattgggacatttggcccaattaattacttgactgctttttgtggggagtagtcactggtactgtaaattcctaatgtgtctggttatgatgttgtagttacaaccccttgttgagctattggagaaaaaaaactaagagctggatccatttggaaaagattctaatcttgcgtatgacacaacctctaactagcaaaataggtgaagagcctatttgttagccatatgtgtttaaactctaaggtatattttaaaaattgaaacttttaactgtctgtaacatctgcccatttattatttgtattttcctgaagctcattgcattgtgtgattctcctgttataaaagatacctttgttttaagggtttgctattttaaagtcaggtagcatagtggagttgtgttgaaacctgtcctgttaaatagattgacattttggacataaaacatataaaaatatttaaaatttttcatttaaaaaaatctgtgaaaagctcagcactgtatttcttaggttttggatcgatccatctttctgttcaaacaagaatttccagtgcagtgtacaatcttgttcacacggtggcagcacatgcccacaaagcctttggtattcctatcacacatgtcaaaagctccggttttatttcctgtggattggcacaacagtaatgtaagctagaaaataggtacagttcatgaaataattgacacgtgaaattttgaagaaaagcataataaaatgtaaattgagccaaactgaaacttaatagtagcattaattaatcaaagtgtcaggtttcaagcatcaagctaccctgttgataatagaaatggggtgcctgtccacatgacttgtcctgcatgcatacaatgtcttgaaactgccttcagttcaggtatatttcaactgtgttctactaacagtgatttccttcctcagaggctaacatcctgttcttgtcctatgggaggaggtggccacaggtgaaaaaatctcagttgcctttttaaccagagaatggaagatttttgtgagacagctcagctacctatagtataatcatgactttgcttgtggcatcaagtatttattgtaacttagtagcttagctagtcagtaaaaaattgttgtttgccttttgttcaatagtgtttgttgccactaatttctaagtctttggaaaagctacagtagctgaaaatatgttccataaactgaaaggaaaaattaagcaactgcatatatctaagtaatatcacagaaactctataaggttaaatcttactgtttttccttgtcatataattttacggtgttttcagtataaacttatattcatttaagtaaggttatttttatagttaaagtctgctttattttatttttcctatttcgaggacattcttattgagaagtgttacaagatttttctgatcgtctcttactttgtgtccagccgtttatcactgtttatcattttctgttaagtacgtcatagttgatcctgtattgtgggttctgtaccaccgcttctcgctcactcgtcccttccccttaacttctggagtacacactaatgatgtaatgttttttatgctatttcaggcttccagggccctctagggtgccagctgcgagcagcagcaacaaggctcagggagcctccaatctcaataggagaagtcagagctttaacagcattgacaaaaacaagcctccaaattatgcaaatggaaatgaaaaaggtaagtgtgtacctgtcatgtcatcctgcccggagcccaatgcatgtctggtgaattggcacacaatgcttttaatagttgatcaatggagcagctcgggggctggaatgttatcagaagtttcccaatccccaccatcatgaattccagtttccttctggacctttctattctgcagaacattttaagggaatgagatctgtactttaaaatatattgttcactacagagccaagcctaaaatctgtttcacaaaaaaatagttaccccagatgcatataaatagcattttcttatgtctttcaagttttaaagaaatttcgtcctaaaatcaaaatgctatttctaattgacttgagtcctcatgtcacttatcatacatgacaaaatgtggggagctgttagggtggatgcatccaaagttgagacacaatgggcaggctatggtcctgatacctgtcatctctaaaccaggaggataaggcagacggctccttcacatttgaggccattgtgggcctatatagtaagtccctaattaggcaagatgatggagtatgaccatgatttaaaacaataagaactacaaatagcggatatatgtttgtgataaacaacttttatttgaaagtagcagttgttgtaaatgttatgacctcggctttccccaagcacaaaattgtctgtatccatgttttcttaaaaataaatacttaataaaaatataaaatcacaaaaatgaatatgtaaaaaagacaagagtatgggcacatgaatgctagcttatagatgatctgcatgccacacagttctctacgatgtgcaaaatatacattttaaaagatactggcttggacctgccccttttggactagggactaattgaatggatgtgtctcttgtaaaccaaatcctgggggaatcaagaagccgggctttgtaaatactgcggctactagagcagggtttctaagtcagtaaaattactatttctattcataggatcctgccttatgtaggagagtatattaaattaagaagtgattcctctgtctaatcaatacaactaccaggacgtttaatttgaatagttaaaccaagtgtgtgctactttgcacaggttagatggtcaccacttgattcagtatgtacataggctgggttctctccttcagacaacaacaggaagaggacagtgttggaggaggtgctttttgtgacaacctttccttttggctgaggcaaattttagaagattataatccctagagagcaaagtggcaaatccctgaaatcctcaccatttttacgtccagtggtgagacgggacgtggaagtatagtactgtgtattttggagtctaaggatttaaaattaagaataaagtctccttctgtagacaagtgtttgagcattcaatgattcgtaaggacttagcaagttcaaaagtttaatcgcaaagttaatgctggcatagcagtgagatcaattagctttcagactatgctgaaacccacttgctttttacattcctgatttgctatcgtgacccatacaggaatccaatgaacaatttgaaacaagggaaaaaatcgctgtagggatcaatccaaaagagatttggctttttttaaacgatactttatacaaatacaattactcttctcttacagactcagtaattttgaacattgatttttttcccttttcatttaaattaaggcataatcctaaaggttttactattttggtaagaaaggaaatggaaaataaaaacactacatggaaatattttccctcatttttgaccttagaatgtgttatacaggttcaagctaattttacaaatatattatatacagtttgtagaaggagcttacaaacagtggtgtacagagactactactatttatttaaaacactcatgctaatatacatatacatatgtacatatgccatataataaatgaataaatgcacatattgtgtgcatatatgtttatatatgtgtgtgttggtgataccatataaatactatattagtttcaacacatacacaaaactagttctagaaaagagatttataagtagtctagacattttgacaaagataagttgtgaagtggtggatttctgtaatttcaaagtctttttacttctagtatcttgaaataaaactccaagacagacaaaccattcatttcaaggatgttcaacttctacacaattctaacattagtgtgtagcaatatttctcatcaccacaagatggagacagatacaatgtagtaggtggccttgcttgtttaactgagaaagtcaaaggtgtgagaatgtagtatgttcacttttcgctttaaatagaagtaactgaaaatttcaaaccatttcgaagcataaatgaggcatgcatcacctgtcccctttgggttggaagggtatgggagaaggatgtgcagccataaactgaattgtgaaatatggaagctacattttacagatcattttacagatttgtagacatttgttacatataaaatatgggcacgaagtgtctatatattgccaataagtttaaataggctcacatgatacagtgcaggcatctggaaactgtttgactcatacagtgtccttatatttgaattatttatgtcattggatccaatgccattttataattatcttgtgctattttgtatttctaataaattatcttaaagtacaagaacaaaaatattataaatattacattggaataaattttaacacaccctgtctcctagttagggacacaagctttaagttaggatgtttggattcagtgctttgctattaggacattgtagtgtttacatgtcttagttgcctttctactgctgtggagaccatgaccaaggcaaagtatagaaagaagagtttactgagaacgtaaagttttacaaggttagagtccaaaaccaccatggcaaggggcctggcagcagcaggcaggcaggcaaggtgaagaagcaatagcttagagctcacaaattataggcaacaaccaataggcagagctagggcaggaaacactaagctaactgggaatggcatggctcttgaaacctcaaagtccaccccaagtaacatgtctcttccaacaaggacacatcttctaatcttctccaaacagttcctgcagctgagtaccaagccttcaaatggatgagccttggggattcaaaccaccatattaaaaaaaaggcaccaaccaaagagtacacttagagtgacccatggctgaagccgcatatgtagcagaagatgaccttgtcaggcatcaatgggaagagagatcctcggtcctgtgaaggctcagtgccccccgtctaggggaatgccagggaagggaggctggagtgggtttgttggtgagcaagggaaaggggagatgggatggggggtcctgagaaaataggaaaggagataacatttgaaatgtaaataaataaaatatccaaaaaaaaaagaaaaaaaggcatataaatatttaaaattattcaagtttttaaattgaaaatagattcttctctcaaactatactcccaaactactgtttccctccttctactcctcccagttctaccaccaacctccctctctctcagttctactctccttccatttcatcttcagaaaagagcagacctccaacagacaatggacaagcagcatcttaaaaataattttcaaaagaatagtccatcagctaataaattgttattgtgtgtccaagagagatggcaactgtaaaaaaaaattttataaatgttatagttttataatgaaggagtttaaggtatattatttaaatgttataaataagatggttatttcattgtagttattagatattgaaacatttacatttaatactttaaaatctttcacttagtacttaaagaaattgagtctgctaatttaaagaaattggtgatcaggtagcttgagacatgggattcattataatgttccatgaatgtttaacacgatccagttcagtgccaaggatatagattcataacagagcctggtgtgactgaaacttatggttgggtgccttccaatacttcaaaaaaatctcaaattaaaatatttcttttgtctgaagaattaaccaaataatttgagaaacctctagaatttgtagtgtgcaataaatatttatttattcaaagcatagtagcattagttgatgtgattgggggtggaagaatacaggaggaattctaaatggtgtgacccctaatggaatcagtagagaaacacaaacctcacttcaatatccaagagtattctaacacacattctgccaaatgtatgctcccttcaacacatgagttaaaatataagctcaccttgccataaggtattacttgtagagatgactgtgatagaagtgtcacagtagaatccagtgccttcactgctctattcaagtggagtgtcaggacaaatttctcagaacaaatggtgaaatgaagaaagtgtcttttgttaagcttcccagaatccttcactctcttctgatcacctgccattcaagagctaacaatgaaagacaagatgatatcagcgcttatctgagcctgtgcactctcaaagagcactgtagacaaatgcaacctctgaagaaaaccacctacctgatcactaggaattagacctcgtgagaaccacgttgtgactcatttggacatactctttatgtgtttagagaaatgttaacaaattagcttttgttttacaaaatctgggtgacacatttgaaagagaatactcggttattggaaatgtcaatttccctggttttgtgtgtgtcccagttgtgagctacatatctgagttctgagctataaacctaggtcacctggcacagttccttagagaggaatttttccttgttgctaagagatttgtcacagtaccagagggaatgccagagccttctccctgtttttcccagatggctcatactctaaggaggacagaatcaagcaccttctagtgtggagccttctgacttttagttatacccaacctggattagtagggttgatgtcagagatctagcaacacattgactcaatgttgtaagccattacaattaccgtgagatttgcactgttttttttgttgaaattcagatacctattctcagctaggcataatacattcctcttaagtacgttttctgcttggttcttttttcctcttaattcttgtaaaatgaataataaagaactaaactttcctagataatgcatatgttttaatacttatttattttaatatttatttgtttttgttttatgaatatgagtatttgccaacatggggacacatatatcacgtgcatatccttgtgcctatggaggccaaaagaagccattggaaccaccagaagtggaattacagatagctttgcatagccatgtgggtcctgggaacctaacctgggtcgtctacaaaaatggaaagtactcttaactacttcagtgcatagcttttaattattattattttgaattactaagaatttcattgtggttatcatggttttttttcctctttactataaaatatatcaataccataatctctgaaatctgtgttttctagtactatattagctcaactatgagcatataagaaataataaatattattgggcagccctggtcaaatgcattgctgtttatgtgcacatgcacacatactgaggaatttcattccttactgcaaatagtaaaagctggctggtaagtagaaacatcccaaatatcatatcccttcacaaagtcggtctctgtctttgcaagtggtactggtgagcataggcagaaaggacagcatccagggtttctgttgagtcattatgaaacaatggctgaaacatttcacaaaccggtaattccattgtttctttccttctacaaattactgtgcttaggtgtcctgtatctgagctaatgttaccatcaacatgttgcctgctccacagggagcatgttccaaataaaacactagctttcttttaactaactaagaaacgtagcagtgaaaaatagatgtacaagtctagaatattttctgtggttttgtgtgtgtgtgtgtgtttgtgtgtgtgtgaagatatagcagtccacaatgtagaacaaagctctaaaccactgaagttcaccaatggatctattcctaatctccccatgtctgttgcaaccaccatatttatttcaatggatcaagtttaagagtagattggaattactcctgacttagtgatactggtatggttaggaagccagatgttgatgtgttaagtttagatcatttgtagtcatgaatttagtatatagtgtcattttatatatgagtgatatgtggagcaaactttcagagtagagttgtagactgggcaatgtctccaaagttatttatatttaaattctgcttagtggtgaagaaggcaaatatgattcaaatgaatactcatttagttccctggtgagaaatatcatcaaaatttcagggtttatagaaaaagtatagcacagagaagtagagaattcctctacctattggggcagaatatgtctaatccaatgttttgggctgccctgagttcttgctatgtgtgttactgagagcaacatgctttgtttcataaaacttcagttttctcattctggcaaaggaacttatgtaacatgaatgattgttatgggttttaatgcaagggcatgtttacaaaacaatttcacaaaattcttagaatactaaattaagaagtatttagtgattagagttggtgatggttgttggtatctagatggtagaagaggaagattaaaagaaaagttgtcatttggagaccagagataagaggtatcaatcactataaacagaaaaaggccataaacatgcaaggcacaatcagattgtttgaaggactttacatggtcatattttcctatatcaagatatatttatagttaggagctaacttatttaccttcagaatcatatcactgaatgcaggatacttacttactattgaatatataattggcagaaccaaaggttcccacttgaatgactctggagaagtgacagacactgccttttcagctgtgttgttatgtactctaccatgaggagtcctgggagatttccttgcccaggcatctgcctgatactcagtgacctgtgctttgtccttttaaagaatcccaaggctccttatcgctgctgtataaagacagactggggacaggctgagagctgagcactgcagagtgtcttagatgtgtgtactcaactgaagccaattttacagctgttgccatgactgttgctgtgctgtgtgaatgtcataacctacagtctcctgggtctcattctgaggtgtcgtgatgttgaagttcctcttctgtacttggccgtctatggtctacttagttaatgcccttagcttgttttggttttttctaagaaaggaacagcatcacttctcttgtctatcagctgtttcaaaagcattctgacatactctttctgatttttatccttatcactactcccacctcctcaaattcaggacacttttgacttgtaaacaaagttgcaaatatatagtagacccaactagtttcatggctaaaatgaagagaaaggggactagaatctatggtgtgctttatgtgttcttattgaatctttgccacaaacatcttaatccccagatgagctcagagatgagtaaggttttctcagacttcaatgaaaccaaacatattaatactgtgtaattatgaaacattacctaatttgaccaacataggtgtcatcataataagaagcagggaaataaattaattcaattctatctactccaaacatggtctgtgacctgtagcaattatattatctggaagcttaaatctatagtctattcaatctcatgaaagacctgttgaatcacagtacacatgcactaatatgtccagaaagcaatggatcccattaaactaggaggtccactgtgctatacacatcagtcactcaaatgaagaaacagggtcccacagtgcaggagcccttgtttgtggtaaactactgactgtgttacttaaactcaccaagtgtgctgaactagaaacataagctcttctcaccttatagggctgttgtgaaagaatagatttaaatacggttatttagaaatgttaccgttactttccttgtagaatggaaagtgccacaaatagcttttgatggcaaggtgttagagtttgatgaagtcagggtgatgttttcatgatcctctaaactgtctttcaagaagagcgtgcttggattttgggtgactgtatttccccacaaatttattttctagcatatgtatataagtctttataaatggaagtaaatggaaaaatatgtacttcctaaatgtttcatgagaagtcctcttgccttgagcacttatatatcttccttgtgtcgtctgtcctggctttattgggcacctccatgtaagctcaggcaactctcattatctctaccatgacttccacataccctgctcttatgatgcttgacctatgtcaccatatagtgaggtttgccttatgtccgttttctttgctctaacatgattatactaagagtgccttaaatccagaagccactcagtaaatactagcagatgatatgattagactaggttctgtagataggagaaatgaaatcaaattggttaatattcctagaaaaagcagaatagaatgacagtaattttgtaaaatcagtaaacatgtaaatgtatgctgagagacagataatagaaggtctttggggatctctaaagtgtggatgatagtagatacccttgtctcaggattatcatgaataaaaacagaaatagagtttaaatctggggaggtatctcagtgtataaagcactcacaatgcaattccaaggacctgaatttcatactggagcccattcaaaaagccaaatgcacgagtacacatctgcaatcctaacttttctacatctagaagaaaggtagaagggagtcagagatgggaaaaccacctaacagctcaccctggctagctaaaactataccatgaagaagtagaaacattaagatcctgtctcagaacaaattaggtaagaaagcaactgcaaaagttatctttatgtgtgcatgcatgagcaggcatatagacacacatatacataaacacacaccacaaaatataattttagtgtttagtttatgttaataaatacagttaatttaaaggctacatcataaaccatatctagtcagataacaagtagcgaatattgttgcaacttagaaaaaaatctccatttcacaagcaatgcaatacacttcacttattagaataaactggatagcaaagaatttcttagaagtgggagactgtcttatttatcttcaaatatataaatacttagagctaataaatttcatttgttgttttttgcttgttttgttttgttttgttttgttttgttttgttttgttttgtttttcgacagggtttctctgtatgcctctggctgtcctggaactcactctgtagaccaggctggtctcaaacttagaaatccatctgcctttgcctccccaagtgctgggattaaaggcatgcaccaccactgcccagcctaaattgtatttggtaagagtaacttgagtatgtatttagtttgctccctgaaattaatgccttccaaagagtaaccaaattataaagagtgaaaatcataacacagaagtaattaatgctacataatataccatttttcagttcagaagaaatatgtatgtgattaggaaatacgtgtgattggagagatggcttggtggccaagaatatatgacgctttcacagaagacatgaatccgagtacacatattggctggttcacaaccaccggcaactccagtgccagggaacctgattcccttttctggcctctgctggtacttgtacacacatatacataccccggcccccacacacacacagatacctgtctttttgaaggaaaggggaaaaaaagtgcaatggtgatttataaatgagtaagacaaattaatatttctaattttttttcttatccatgtgcagattcccccaaaggacctcaaccatcttcaggtataaatggaaacacacagcctcccagcacttctgggcaacccccagcctcagccatcccttccccgagtgccagcaagccctggcgcagcaagtccatgaatgtcaagcacagtgccacctctaccatgctgacagtgaagcagccaagcccagccacttctcccacaccatcttcagacagactgaagccccctgtcacagaaggggtcaaaagcgctccttcgggacagaaatctatgcttgaaaaattcaagctggttaatgcccggacagcactacgcccccctcaggctcccagttctggacctaacgatggtggaagagaagatgatgccttttctgaatcaggggaaatggaaggttttaacagtggtctgaatagtggcggctcgacaaacagcagccccaaagtgtcacctaaattaacccctccgaaagcgggaagcaaaaatttcagcaataaaaagtctttgctgcagccaaaagaaaaagaggaaaagaccagggacaagaataaagcctgcgctgagaagtcgggaaaagaagagaaggaccaggtgacgacggaggcagctccgaaaaagacttctaaaattgcaagcttgatcccaaagggcagcaagactgcagcggccaagaaagaaagcttaattccatcgtccagtggaattccaaagccaggctcaaaggtgcccacgccaaagcaaactatttcacctggcagcgcagcaagtaaagagtctgagaaattcaggactagcaagggaagctcttctcaggccttcccaaaggccatcacagcggagaaagcaagcacgcccagcctctctacccctctggatgggcgggaagctgggcaagcgtctccctccagctcctgtgttatgcaggtcacacacagcagtggacagagccctggcaatggagctgtccagcttcctcagcagcagcagcatagccatcccaacacagccacggtggctccgttcatttataggtgaggtggcctctgtgggcctgtgttcacagatctgcatatctagacaagtaacattaagttaaatgggcattggacaatgtttctctttgaagctacagactagagtttggcacaaaagcttagtctgcagaaaccttaccatgtgtcaggccttattttgttggaagctgagggccttcaaaacttaacttccatcctgctgagggcaggatggaatccaggcggcatacatttctcatgattagttgttcatcatactactctgttatgactggcaactggggactgctattagtgcaaactgtctcctaaaataatctcagacttaaggcagtgacaatttttttgttgtcatgtttgggataaaatataatgattaaaatagttgtccccaagagcatacacatatacactgaattcccagctgtaccatttgacagctcctgactttaaacaagtcacttaaaactttcctagtttcatttccttcagctgttagtagagtttaaaataataacaaaggtaatggatatatttgctctactacagtacaatgtaagtcactaaatgtttttataaggtatagcattcacaaagtaaatgttatgttaaattcctactactaaatataagtttgtagatgaaaacaattctataagtagtacattcatattttgcagttttggggtatgcattctaaagtgtatacatcaaacacgattatgtattatatctaaaatatgtacatattactacatagttaccaaagaagctgatttttcttgtgctgtgacttgcctcatcaatcagcattctgtcagccacttgtataagcctaatttagttcactctctggttagtaaagaccttaccaggggaagaataatgtctgctctggtcccatccttttgagaggttgtcagacttaaaggatatgagatatttttaggaacaggaagcaagacttcctataattatcccggagccaagactgcagtgaaatatttattaatgtacaggatatatggcttgtaaaattaaaaccaagaattgtaacttgcttatttttctcttgaaagaaccaatttttttccaagttcctatacactcattaaggataatttctaattgttacatttgttaaatttgattggggtggggcatatgacagcccttgtatttattgctattctgactccactagcagtgcatttaagcctttgtacctggatcaggagagtcatttggttctcattccaaagtctgcaactggctaatcaaaaatgaggatgccacagtcaaaatccnnnnnnnnnnnnnnnnnnnnnnnnnnnnnnnnnnnnnnnnnnnnnnnnnnnnnnnnnnnnnnnnnnnnnnnnnnnnnnnnnnnnnnnnnnnnnnnnnnnnnnnnnnnnnnnnnnnnnnnnnnnnnnnnnnnnnnnnnnnnnnnnnnnnnnnnnnnnnnnnnnnnnnnnnnnnnnnnnnnnnnnnnnnnnnnnnnnnnnnnnnnnnnnnnnnnnnnnnnnnnnnnnnnnnnnnnnnnnnnnnnnnnnnnnnnnnnnnnnnnnnnnnnnnnnnnnnnnnnnnnnnnnnnnnnnnnnnnnnnnnnnnnnnnnnnnnnnnnnnnnnnnnnnnnnnnnnnnnnnnnnnnnnnnnnnnnnnnnnnnnnnnnnnnnnnnnnnnnnnnnnnnnnnnnnnnnnnnnnnnnnnnnnnnnnnnnnnnnnnnnnnnnnnnnnnnnnnnnnnnnnnnnnnnnnnnnnnnnnnnnnnnnnnnnnnnnnnnnnnnnnnnnnnnnnnnnnnnnnnnnnnnnnnnnnnnnnnnnnnnnnnnnnnnnnnnnnnnnnnnnnnnnnnnnnnnnnnnnnnnnnnnnnnnnnccttctccttctccttctccttctccttctccttctccttctccttctccttctccttctccttcttcttcttcttcttcttcttcttcttcttcttcttcttcttcttcttcttcttcctttccaagacagggtttctctgtatatccctgtctgtcctagaactcactctgcagatcaggctgggattagtggtgcatttgtgatcagagccagtgtgattcagtactcttaatcttgattagcatttgagataactctgtattgcaattgtgtatttggggcatgcattctaaactatttatatcaaacatacaatatagatataatttcagatattatgtatatctgaaatatacatacaactagacagttaccaaagtagtctctctttactctatatttctactgaatttatctacataagacacagaactctttggtggtaattcttcaatttttaaaatagatacataaagttaaatacagttaccacatatatcatcattttgcatatgaaatgaataagaataactaatcaacatgctttcacacacagttaccatttgtgtcatgagcatacttcataccccttctatagaatttgtgtgcattctattattactgcaaggaatcaccatcttgtactaaactttagatttcctaagcttattatctcctattaaaaacaaattttgtgtccctgaacaatatttcccaaaactatcccttccaataacatatgactaatctctagttctctgagatcagatttccccaccccacccctcttttgtttaacctcaaatgcaggaaagaaaatggtttgctttttgcatcttcttgccctccagatacatcccttatgcatcaaatgacaggctttctcctctcttaaatttgaataatatcccatttcacttgtatacagttatgagaaaggagcacagcttagctggtagtacttgtgggtgtgccatatagcccaaacagattctccatacactttgaaactttcatttctccctttaaagaaaattttatagatgtgtggtgtcatggcccactggctaggaacacagagagtagacacagtcttgcattgctgttgatagaaacatggcccaacagacttgaggccatggatcttagagccatgttggttgccaccaatgattggtcatgtgacttctagtaacatacttaaggattttgaacttcagttttccagtctgtaaaatggagatgaaataatcaaagctaccttatatgactctactcaagattgggttgatattcatgctgtgttgataacatttttcatgcattacacagccttctacaaaactttcagtgattgatgtaggttagcttttttaaaagattgaaggaagcagttccatgtaaaaccaccattattaatgttaatgattatactcaggttattattaataacataaaatagttaaaataaataaaatgaaaaaactcattgtatagtagtactccatacatgacagaactatgaaatattatcacaaaattgataaataataaaattatatcctctaaatactcatgctttcctgccatgagagagagagatgcttatattcctgactcatgacattttgagtgtggaactacgtgtcctttctcattttaactattcctatttatgtaagaacactccctgaagccctttgacatggtttataggagatgttaattttagatatgataatacttacgatttatgattttataatggtagtatcatcttgtaaaatatcatctgtaaagtgcttgcttactgaattcatccacattacaagattgatattcacttcttgacataaacttcagcacaaatccatgagtatgtgacagtatccctatttatcagaaatggaggagcggtgatttaaattcagaaaagtaatgatctcagaaattcacagagcctgcaaaatttgcctctgaaacagattccgactggctgcccacattttatgttcagtgagcctgaacgtgaggacacgttctcctctgcttgtcagttctttctgcaatgtgggaaaaaccgagcatttattaccaggatattcatactgggaaaatgtcagtaatacattttcagatttctcaatcacttgtccgtggagcatggtagtgaatatctgtggatcccaacactacggtgggaagttaggggaactggatgactgtgagcagcctggcctagaagaaagtatacacctcaaaaaatcatttataatgaataagcatgaattttatttttaaattagtacaaattggcataatacacacctttcatatgaatgaaaatgtacaaatatataatatttatatacttaagtaacctatatagaattggaaaattattgtgctgagggtgatttaaattccttttctcttcttgatgtaggcttttcttactgtctgagttatgttaaaatcgctaggataagtctccatgatcaaaaccaattagagaggagagagctcatttcatgtttcatttccaggtaacagtctatccctgagaaattcagatcaaggagtcaaggaatataggaccttgcaggcaggaactgaagcacaaactatggagggacactccttactgactagctcgtcatgccttgcttagtctggtttcttatacaactcggaatcatctggcaataaggcgcacttcccccatgcgatgggcccttccaagtcaatcattaatcaaaaatcacaggcttgcctatactccaatctgaagggagtctgcattgtctcactgatgtttcctcttcctggcttatgccacagtgacaaaagctaccaggacactttttaaattgcagtggaacaccaatacatgcttcataataccctctctaacccaactgtacattcagagttccatgaatacaatattaggttcgatagttaaaggattttgtacaatctaattgctaatctggtaccacgtatttcacatatcatttgtaattcgactatcctcacaaaggtgtgaatattttaatgttattataatctttactcacatgatgggcagaaaaatactaatattaagaggtagagaatttaacctagttgctaagttcaacagaaaatgttctcaaccatcacagctattcaaaagtgaaataacctcccttagaccagcaggtagcacatgactaatgaagaaaggagaatcactaaatgttgcaaatctacctattaaatatacattgtatcctctgcaacgctctatatttataaaatgctgtcaatggaatattattgcaagcatttttttcttatgatgtaagtgagtatcactcttgaaacagcatcataggctgatatatgaaatttgggttgtaagatatccagtccagattctcctaggaagttctatggggaatggtcatttggatatgctggattctgaaaggcaaagaatgaaaaacactggtttctaaagtgctcacaatgttgaagctcaggttatttgttgaacggcgagttgtgtgtgtaggaggagctgtgagtttacaaagattgaaatgtggcgcacataactgtctttcagagaaagcattgtacgtcctcagaccaaccgctgcagattcgactgcggtggtagatttatgtgaatggggcataattggtcatcagcacacactaaagacgattgaattcttgtctcgaaagcctgtcttttgcttggctttttatatttttctgcactggggagtagtctaaatgcccttaccctgcagtgttttaaagatgaaatacagacctgctactagaagatgtactattgtattgaaccctgctgtaagctcacgttttctaagcatagaggggtatgggcatttcttgtatttcttgtattcttgtatttggcttttgagttttactttcagataatctggaaaaaatttaaatctttaggaaacttaaggtaatgtcaataccttctctcctctctctctctctctctctctctctctctctctctctctctctctctctctctttgtgtgtgtgtgtttgctgtatttaaaataactaaaaatactctttaattgtattaatcatccccaaggcactacttaaaacaatttaaaaattaatgttctacacggtagtcgtgtcttccttggagcctgttctacatgcactctgtccttgatttttctgacactgatattttaaagaatattccaatattcttccttcatctggctctgtctaatatttacccatctttagacaaatggacttattttcctccagtgtcagtcacacaatcaaagctatgttcatcctattgcttgctctaaaggcgctacgtgattacttatatttgctatgattctgacagaaggtttgtttgcttctttaaggtcatattccctatagttttctattttaaaattaattccatttacatttaataaacatttgtggaggaagttattttgaaacttttgaaaaaaaattgttcttaatctccattatctcaaagcttacagcatcctttgaagttttgtgtctgaattaaaattatattctaataattataaattattttataattctatttttcatctgtatgtatttcatgtttaagaaaatggtttctctctgttatctgttcatccatactatagggactcatagagtcctattttatttcatgagatataatacattgccaacataatctactttgatgtttaaaatctccctatttatgacactgggaaatctctcaggctgctctgtatgactttttcacaagcatttccacttttccacactcttttttgtgtggtttaatgttcgtttgactcgttttgtgcattccctaaattagcttcatctgttattcagtgagccctagtttcttttcatggagaattatatttaaaaccgtgttactgcttctaggttgtttaagtggtcaaatatacatatgcatttacatcacaaattatgcactattatatttaggtcaatataaaagtactctctttcacaaaagatcaaattcgatagcatgtaacatgagttatcaaattgcttaaatggccagtaaaatgtaacatttagaatacataaattgacactgtcacattcaatactgtctcttttagactgatgtgctagcagagggaagttgaagtaaaatactgcatgtccagtaaggactaatagagtctgattttatttcatgcattatgaatgcattaaaattgtcagactagtgattaacagtcacaatttacaggcagtcaagtttgagcattggttaaacacacacgaggttatcttggtcaatggtcagacagctagaaattgtaatatgttttcttgtagcacccgccttgtagaattggaatgaagttgggtgttgttgcatagatattacacaagaccaatacttgttgcatagaaaatacataaaaatggaattttagttttgggctaatcattgttgagaataagatttcttatttctacaacgtctagtaacatctttttagacctgggaaactaggactttacataaggtaaacagtattttccaagcttccggtcatagtttcagtaggtacatgtaatattcactgttgtcatgtcagattgtgttgtgtggaccagcaagggatactctgcagtactcactatgcaaagtgttcctgtgaaattttgaagtcctcatcaatagtttcatgataagacccaaatgtttttattccaccggtatataatggttcccaaaatagagaacatttggaaattgtcaagatccttggctaatttctttgattatttgtataaaaggcaaaactttagtaattagtgttgattacatcccaatagatcagagctaaaatctaattccagtactattgtaaatagagaaaggactagatatttttcagttttataaaattcatggaacagagatatctgaggtgacccacttctgaaaataaaccgaggaaggcttccaagttctttgaaaatgatgtggagtttagtatcttatgttcttttttaacaattaatctatttccatataataatttctgtaaatgactcgtgtggagaatgccagggcatagccaccaaagaggaacaatataaacaatattctctcgtgtcttaaactaaaaggacaccaaaaggtaatcaactggcatcccatcctaacacaataaatcggaaagtctgtaagtagaaatgtgaagactctttataagtgtctcagataagggacaatagaggcatagccaacagctgaataactaattcgtgaggtgagcaagcgagccacagtcatcagctcagacatgctttctaagatctgctttgggtacagcaaaatctctgctagcacgacattctaaatattctcatgttccatacagactttcccagagcgatgctgaatttttagaagttattacgatcacaccttctgcctccccgtgacagctatttgtgttgatctaataggaaacaactagcattgggctttatagacagtcatttcagtcaacacataaggtaactcagctgctgggagacaagtccctgcatagtgaacctgcagggtttttaagccagtgttgagtcaaggccagcttgccaagctgggtgtctgtttgacactgcttggatagcagccaggtagctttcttcagtgactttagcgcacctccacactcactatttaaatttgttcaacgtggaagcagaaaccctagaaaacatgagaggccttttgccttcttattcagacaaaatagactaatatgtcaggaggatacaactctggctttgtttctcttttgatttttacttcctatatatgacacatctatccaaggataaaacagctttaaatcatttcttaagaaccatagcaagcatcaatttttacatctgccaactaaatatcagtgatatatttcatgcatgtgtatatgtatacatgcacatgtattgtatctgtgtgaaacataagcacatgttcatccattgtgtacataattgcatgtggatgccttagaatggaggccagaggttaacatcaggttcttggttactagccactttattttttgagacagaatcttcaacagaacatggcagtcctttaatacagctgtattggcaggccagtgagctccagggagctgcctacctctgccttcttcactcagagattacagacatataacgacatctagatagttatgtagacgatggggatgcaaacacaggtcacggttgtgtggcaagcactttaaagactgagccatctccccatttattccttcctctctgatcttttcctccccctcttcctgccatcctctgctggcctcggcctgtgtcccagtttagctttagactcctgatgttcctgtacctctgacgtgctgtgcgggctgacctcgccccaaggtgttgcctaaatgtgagctagttttaaagatcagcagtcacatttgatttttcccacaactacgatgtaggataatagccatagattagttaaaacgtgactcagaggtatcctggcattttagttcacagacaagtgtttctataggtgttctaaagctacaa

SEQ ID NO: 1303 - DNA, 1317 bp, Mus musculus
aaaatgactttacaactgtttccttcggagctatgacttctttagctggaatgcgatccagaacagtttccctttgagcctcacatttgcctcgcggggttttcttgtctctccttcccccacgcccttctcacttcttctctccctgtctcccaacagatttacactgactgggccaaccactacctggcaaaatccggccacaagcggctgatcaaggacttgcagcaggacattgcggacggggtccttctggcagacatcatccagatcattgcaaatgagaaagtcgaagatatcaatggatgtccgagaagtcagtctcagatgattgaaaatgtcgatgtctgccttagctttctggcagcccgaggagtaaacgttcaaggcctatctgctgaagagataagaaatggaaacctaaaagccatcctagggctcttttttagcttgtctcgctacaagcaacagcagcatcatcaacagcagtattaccagtccttggtggagcttcagcagcgagtgactcataccgcccctcagtccgaagccagccaggccaaaacccagcaagatatgcagtccaggcttccagggccctctagggtgccagctgcgagcagcagcaacaaggctcagggagcctccaatctcaataggagaagtcagagctttaacagcattgacaaaaacaagcctccaaattatgcaaatggaaatgaaaaagattcccccaaaggacctcaaccatcttcaggtataaatggaaacacacagcctcccagcacttctgggcaacccccagcctcagccatcccttccccgagtgccagcaagccctggcgcagcaagtccatgaatgtcaagcacagtgccacctctaccatgctgacagtgaagcagccaagcccagccacttctcccacaccatcttcagacagactgaagccccctgtcacagaaggggtcaaaagcgctccttcgggacagaaatctatgcttgaaaaattcaagctggttaatgcccggacagcactacgcccccctcaggctcccagttctggacctaacgatggtggaagagaagatgatgccttttctgaatcaggggaaatggaaggttttaacagtggtctgaatagtggcggctcgacaaacagcagccccaaagtgtcacctaaattaacccctccgaaagcgggaagcaaaaatttcagcaataaaaagtctttgctgcagccaaaagaaaaagaggaaaagaccagggacaagaataaagcctgcgctgagaagtcgggaaaagaagagaaggaccag

SEQ ID NO: 1304 - protein, 418 aa, Mus musculus
LECDPEQFPFEPHICLAGFSCLSFPHALLTSSLPVSQQIYTDWANHYLAKSGHKRLIKDLQQDIADGVLLADIIQIIANEKVEDINGCPRSQSQMIENVDVCLSFLARVNVQGLSAEEIRNGNLKAILGLFFSLSRYKQQQHHQQQYYQSLVELQQRVTHTAPQSEASQAKTQQDMQSRLPGPSRVPAASSSNKAQGNLNRRSQSFNSIDKNKPPNYANGNEKDSPKGPQPSSGINGNTQPPSTSGQPPASAIPSPSASKPWRSKSMNVKHSATSTMLTVKQPSPATSPTPSSDRLKPPVTEGVKSAPSGQKSMLEKFKLVNARTALRPPQAPSSGPNDGGREDDAFSESGEMEGFNSQSGGSTNSSPKVSPKLTPPKAGSKNFSNKKSLLQPKEKEEKTRDKNKACAEKSGKEEKDQ

SEQ ID NO: 1305 - DNA, 107534 bp, Homo sapiens
tcactcaagaactcagactaatgaaaacacacattttcattatgtggcctcattgttttacctggatatatcccaggtggcccatgggcaaaacgaagaataggttagagtatatttttgtgggctagagtaggaagagatgcataatactttagctcttattacattggtgatatctagtccatttttatccacctaaatgcaaggagaggagagctggaaatgaagtccttggtgagaagctgctttctagagaatattttatgctatggaaggtggagcacaaattttggtgaacagtgaaaatgtaataggttctctcatgaggggtggcagtagggggacttccaggcatgaggcagctggaagtgtatccccgcttgggtcaactcttcacaaaaagtagtttttgcacagtcattaattttcaacatagatatctaaagtataatgttccttgtaatatatcaggtaatacatcagatatggacaaagaagaaattcaagataaggatattctatgaaagtaaattagtttctgtgtctcaatgcaattaaaaagaaagtagtcgatctaaatattgacatgtgcaatggttatttgaaattactacacatttgtttggggagaatatgtttttaaatgtaaatcatgagtaagcatattccattgattataataatgatgacttatagtgtatagctcattttacttttgcacatgttttctattacagttaatcctcacaataatcctacgagataggcagggtagataaggatatgatcctagcatgaaagacaagactcaagatccagtagttagtggtggaacttggaagaaagcccagaatttctgactccaggctccatactttccacttctgaaacccttcaaaaatttaactttacttttttgaagggtgggggaatgatggggagggtgaaaggttgggaaaaaaaacaagattgacttatgtctgcttctctaactagtgagaatttttactttttgtgtcttgcatgttgaatgaatgttttagaccatatttcacatatattttgaaggtcaactttaatcataggaataggtttataagaagggaaattttctaaaatttggtttagaggcttgaatttgaaatttggggctaatttaaaatctttgacttttattcattatcttatatttgtatataaaccgtataagttcatatagtgagcagtctgcatgttttctgtttttatttttattttcctttagctaatatattccaataatttgtaagagattcaaatggaatccttagcattttaacaattgtgcattccagcaattgtggtgcattacaaatgaaaggattttaggatgaaaaggggggggaggtttagggtggctgttaatgctatgacttctaagtctccatgctctcttagtggtcatgtggttggctcattatttgagcagcatcgctttgcggtttgacaaggctacgcagcagcagccactgttagccgatggtcttgcaggtatgtggatctagctcctacccgtggtgatgtggagctacagcatgtcactggagagacaccaactgcagaaagctgatacataattgtgtatgagtggaatacaaaatgaaaccatcaaagtgtccttagcaaatagcaaactagatgacagatctcaccaatatgttttgctataatttattgtagttttaaaattttcaggtatttatgaaaataggatgccctctagtggggatcaacagaatcttccaagtagtctaatatttgcttagagttgatgtaaaaagaaggaaagaaagttgttgaaaaaacaaatattttttgaaagttgcttactttttcctggaaatttctctattgctccctgtcaactgatggctggattagtactccctgtgcactgcatttttatttccattacttttcacagaggctcttaaacacagcaggcagagtgttctctctcagcttccaagttctatgtttttagcctaagtgaacgtaaacaatcccttggccacttctttctaaattaattaattaattaattataacctatcttgaaacacctttgaggtagatatctatctttgtcactaacaatttaaagtatttaaaacataggaatgaatgctttgcaaggaggattgttgtaggcaatgcttaccttaccttatgcatcttaccttcccttacctcccaagcttctttttacaaagcatttcttcctagcaagagaggcttgggaggtaagggaagatatagatagatagatacatacatacatagatagatacatagatagatatagatatagatatgccatggctgttttattacttttcacttacattaaaatactatattctttacattgaaagacagtttaaggtattagaattaaatctcttgtaatttgtgaacagcattccatccacgccagaggttctcaaacattaacacagttcagaatcacctggcagactttttaaaattcatttgttgggccccactaccagtctcggattcaatagatctaggatggggcctggtaagttgcatttgtaacaagttcctagatgattctgatgcattggtcaagaacctgcattttgagaactacggtctacgctaaaccaatctttccatcagtcaatttttctctgttaattgttggaaagtaaggagaaatgctcaggtcagaagcctggaaactctgaactgctaaggcttaaacggaatttattctcttttaactttgtgttttattaacagtattttcttatgcatatttatagcatgttacttggtctttggaggatggtagctgattttactttgaatgtacttgcacaatttacatcaatttatcagactgatacaagaagaagttaaaagaatctcaagtattctcacttgttttcttagaaaagggtagagatggactgttttcataactgttttttaaaacatactgtgtggtattaatatttagattttagctaatattgtcaccagcattattagacttcacagactgttaagatgaattccccatggagctctctgttagtactagatgttgcagcagtcaaataaaggagacttttctccatattttgagatggacataagatgtaacagaaataaggtagaaggctggagttaagaaaggctcataaataaaacatttccttttgtacgagctgagagtataaatcttgagacagaaagtatgggttctatgtagcacttactgttgccaccttgggaaaatacttcacttctctgttttagaatcttcatctttaaaaacggaatagtggtaccttcctcttagggagctttaaggattgaatgagttaaactatttaaagtatttaaaatagtgcttactctcaacactgttattagtagacactacatcttggagaaagaatgttatgtagccctttcttgtcatactgctggtagcagtggaaatgcaattaaagtgaaataaaatttaagttaccaccagattgtgccttataattataatagccaactcctttttcaaaaatgtatatcatatcattttttgtagaagaaaagatcattagtcaggccccatgcatttaagaccgggtagctggttcttcattatgtattttatttctgccagagtgtttgattgactgtctgtattgaccatgaggttgcccagtatgactgcatcactaaaggttagagaaggaaaatgctggaagtgcacggtgactcatacctgtaatcccagcactttgggaggctgaggtgagcatattgcctgaagtctggagttcgagaccagtctggccaacatggtgaaaccccatctctactaaaaatacacaaaaattagccagacgtggtggtgtgcgcctgtaatcccagctactcgggagactgaggggagggaattgcttgaatcagggaggtagaggttgtagtgagccgagactgcgccactgcactccagcttgggtgacagggctaggctccgcctcaaaaaaaaaaaaaaaaaaaaagagagagagggaaggaaaatgctgactcagtttccaaagtattcagtacatttggaacagcaagaaagattagagaacaacacatatggctttaaatgaatgccgaggggttctcacaatgatgatctggacacgaactaggtagctagaatgccaaaggataagggagatggaggaaagatgaggcagtcatcattgcagagaacccctactaggatttcaaaattgtctgacctgttcccgaccccctccctcccttcctcattaacgaaaaacttatgtgccttatccttgttggtactgcccatggtgccaagcacagtactgctcaataaatgttggcaggtttgatttgactatgaatgacatggtttgtgttatggcctcagcttttttctctattaaaaaactgcatgtaaagaaaaatcagaacatactgtagttagcatagtaaatcctaccctttcttttcctatcaacttacctgtatttctgttcatctaaaaatttcctatttccaatctaataatagagatatgtaactagattctaagctagtgaattgtggctacaattttaaacagataaatgcagttgcaaatgaaaatattaatgtaatttcagctctgataaaatctgaaattgagttaaagggtgcacttgatatctgcataacaaagtgtcactgggatgggtaggggtaggtgccagagagttcaggaggtcaatgttgattatttgtccatctggctttatggtcaaaagaagtacagtagcctgctgtggtgaattctctgtttgggtaggaaataactctcagagtacttgaaaagttaaatgctgtaataatgatatttatgcatatcaatgtagtttattcattttgtctgaagacagctaatctcttcatatgaaatatatcattagtaatatgttagatataccaggattttaatatattaattaaggacttgtattctttgcaactaaaatcaaaccgttttaaaaaataattaggagatatgtatattttcttaaaacctaaaaaccaatttttagagttccatttttagagttccattccattagcctgtcaaagccaccacattgcatagctctggctgcgtcacggacagggacatgtcattgaccctataagctataagccagtctttattgagtgtctactaagtgggagacaccagtatctagctaatccaaaccagaaatttgaatttatccaccttgagtcaaatctgtttcactttcaagtcttgctgattctactccgtaaatacggcttttctatatccccacacctttggttttctgtatccctacctcatcatctttcgctcagactctttttataaccttatttttatttatttatttacttatttatttttattttcttttaagatggagtcttttaagatggtgcagcagcatgatctcggctcattgcaacctctgcctccctggttcaagcgattctcctgctgcagcctcccaagtagctgagattacaggcacccgccaccacggccagctattttttttttttttttttttttgtatttttagtagcaatgaggtttcaccattttggccaggctggtcttgaactcctgacctcaagttatatgcctgcctcggcctcccaaagtgctgggattacaggcatgagccaccatgcctggtctataaactttatttttaaatgaatgattttcattgttattagactattaaaataaaataacatgtaaagttctacaggtaaacaaacaagagcagtcctatccctagctcctctccaacaaaaagaatgaatttctacccatttagcaatttcttatggtgattatttttgtatttccaagtaatatgctttaatatcctactttatgaaatttagagactattgactttttgggatggtatataaggactttgcttctttataacccccttcttctctgcactacccccaatatacttacactataattttcagtgaaatctatattgttttcattgttcccatgtaaatattattcactaccagactaatactagcctaggattaaagtctctttcttaaacagagtttgttgttttttttctatagagctaataattgcctcacttttttattgtataatttatgttgactttatggctacatttaccttttttttttaacagtttccaacagatctgtaaaatccatccgtatacaattttccttataatccaattctcacacagtgcatcagatttattatttccctagtgttaacaattctagaatcatttctctttgttccaatgtaaaatgattgctctctagatctgttacatagcagttacactgaactttccttatcatcagctgaaaatgtctttgcctctctcttacatttggtcacctgtttgttggattccattattttcacttctgatagcctccttacaagggatgtatgaaaatatttttttctcttagaatgtttttgtataatatatccttattttattatcccaactgttggaaagtttgtctaggcatagaatttgagattgaaaatcaatttcctccagaatttcataggaatttctctgtatcttctagttgcaatgtcactgtagagacttgtgatgtcattataatttctgatcctttgaaggtaacttgaacttttaaaatttgtttctttgtgccccaccctcctgaagcttttagaatattctttttatccctgatattgttatcaatttttatcttcttaatagtgatgaacactttgaaaattctttcctataatttttttcctatcttattttttggaactagtatttttttgacacttgacttactgaatcctctaatatgactatatttttctattattgctcatctttttcaattttgatctcccttccaataaaccttctcaatttatccttccagcctttcagctttaaaaagtcaatcatatttttaatttacaaaacttctacttaatccctagatcttcaaatatatgtgtgtgtatttgtgtgtgtgtgggtgtaagtgtgcatgtgtgcatatgtgtgtatgtatcattcattttcttctgcatccgctgaggaatgcaacttctcatttctagggtattaattttaatttccctgaagttctcttatgcttcagctttgtctgtattttattctggcttctttttatctgtctattttggtatctccattttatttcagagaattttatcaaacccctggtaaacctcaattctctgtatcaagcatgagacaataaaaatctacttggaagcggccaggtgcggtggctcactcctgtaatcccagcactttgggaggcccaggcaggcggatcacaaggtcaggagatcgagaccatcctggctaacacgatgaaaccctatctctactaaaaaatacaaaaaattagccgggtgtggtggcgggtgtctgtagtcccagctactcgggaggctgaggccggagaatggcgtgaacccgggaggaggagcttgcagtgagccgagatcgcgccactgcacgccagcctgggtgacagagcaagactccatctcaaataataataataatctacttggaagctatttgtgcgtgtgtgtttgtgtgtgtgtgtgtgtgtgatgcacatagttgttaatgtcttttgtgattcattataggccatcctataatgatggccagctcattgattcactgggtaccatgagtgtcagtatctgttgatcttagggatgatcattgttgtcaaagacagattttttaaatctgactggagtgagggtggaggatatgaaatcctatattcctgaaggagagggtgccagggaagcaaaaatcagttgctggggtctcaacataagtatatataattttacttaatccttttgttttcatttccatgcctttaccttttgtcttcctgataaccctaagtccggattttccctaaagtatgtcctggcttttgatgggagaatggataggccggcaacaatataactcttgaatttgcttcatcctaccttccatttgatctgatgctcatactttctgagccattctgggggtctgtgggaaaatctgtttgcattactctgtctccctctgcaggcttctgtgggtccatcttcctttactactctgctacatgtgtatcattctttcatctgccttccacactcatatattgtgttcatggaagatagaatttgagttaagattttttgttcttgctgtcctgtgggcaatttcttagtaaatacagggcagaaaactattttatcatctagaatacagaagtcttgtaagtaatctgtctttactttcttgactctaaacttgactctaaactccatagctgcactcaagttcaagtttagtaacaggagcatggctgtcattttcatgttccctacatgaaaataaactttcacctaaaaatcttaataaagccttcttagcttcagatattattgctttttgcccaacccttacctgattcctggcctcttcctttagtgtttccatgtgccccttccccatgttctggccaaatagaactatacaaaattctctgaaatcatgaggctatttcatagctctgttcctctgtagatgtaattatttatgcatattctgcatggaatatgctttccccttccttctgattgtcaaatctcatccttttatgtgtcatttctcaatcatcattcttctgtaaccttcatagttatgttttactctttttgctatttttatttaaactaattttctcttaaaaatggaataaattgacttcataagggacattttttttgaagttaagtgggagctattttgtgatttttactaacacgttaaattacttgatcagatttgcattttaaagcaatcactatctgtagtgtatagaatagtataatgcttagcctgcctgcactcagaaagtgtttatatgactgttagagtgattgggtgagagatgatgagaagcgacccagggcaatgatagtagcaatggaggagtggaagggtgaagagatgttagggagataaaattaacagcactaggtcagagattgaaagagaatgacagaaaaaaagtaaaaggaaattatcagacttcaatttatgtttactttataatttacttgccttcatagaccatccaccgatcttatggggtagtcaactcattaatattcacttttaaatcaaactccaaagttgagatttttgaaaaacttcatacagtgtgagctttcattttaatgtgaatattgaggtgaactatctgtacagactgaggtgaactagctagatggtgaatgtattacatatattgtgacaatatgatgttacccaaaacttttaatggattcgtttcataattataccacatgagctattgagatttctagaaggcctacaagagtcatgagattggactcattcacagatcttttggtcatatcagttctgtaacaacaactgcagatccagtctgtgatcaacttttcaaaacatctaaaaatagtatgtattgtgtcttaatcccacactgtgattttgcaaccttctttgtccaatgttgcctaccatttttgaatttttgagtcttaaaactgtggtgtacaaaattatatctttgaaaaaatatataacttcaccttttaagcctctttctctgtatagtaggagaaaatgtatttatctcagttcaaagtaacataatcactttcagtttaaaactcagtgtttgagggccaggctcattcagttccagattcttccttttctttctgcagtgatgggctggggagggttgttgattgtggttccttattatcatggcaccaggggtgacacagcttgttcattgccattgctacccaccaaggctgctgtctgatgagtgcccgaaggtaggattcctgtcatacataacttgacttattttaacctatcctcacatcttctgtgccctttttgcttttctgtgccagctctatacatccttcctgtcctgatttcaagtgctctctaggatcacttctttcttccagaaaattccatatggctcttgggaaattataaaaaaaaagtatgctttcctatactgttgtggtcaatgttgtccttttgtgattccattctcaggtccaaatgctactttgaaactcagtccagagaggtaacctcttaaatctgttctagggctccttttccttccaattctcttccctatactagtttttctttttgtgggaaaaacacttacttcactgatcacctttccctaagatatgatttctggttgcactttatatgcttagtcttttgctgctttttaagatgtagaagtccagttattatcatagaaacccttggtcttcaacacaattcctgttatgtcttagaagaacccatttaactttacaaagccagtaatttgaacataccagggagcagtgcttatagaaatgtaatgctactgcttgaatgttgaaggaaaacaataatgttttaaataagtacagggttaaaattagctcagctaatatttttaaatcctctgattatattcataatatcttctaatcaggttacagattagtgtgtttttattcaaacagacttttaacttcaatgaagaggcagtctttcccctatcacttctccctacttcttcgattatttaggattccttaaaaataagttactttatcccattgaaacacatatacctctatgtagtgtatggaataacaaaaatagttataatcatttttatataactgagtggtaggttacttataaaatactaaccaaatgctaaaataaataatttttaaaaatgtaggagcagcttgctgtgacagacaaagatagtatgtaatactgtcagtagtaaaaaaaaatcacaaatgtttaggacttcaaggaaaatcagagtagatctttttctgatgttgtttcttcatagcaggttcacttctcaaaagaaatatggtatcatatatgttgccttctatttcatcctcatatttatagtgaataatgagcactgtaagagaaatatcatagaggcaaatgatgaagctacaaggtcattacaacttcctgcaattttccttaattagttaggtaaactatatttggatgaatatatatgatttaagagtttaacaataataatggtttacaatatttctcatggttaatggaaatgtatttcatattaaagcagtgagctactaataacaatatttaacatagtgaaagtccatattccaaagtagaaattcattaaatcctcacaataattccattggttgaggtattagtctgttttcacactgctataaagacatccctgagactgggtaacttgtaaggaaaagaggtttaatagactcacagttctgcaggctccaaaggtagcatggctggggaggcctcaggaaacttacagtcatggtggaaggtgaaggagaagcaagatcatcttacgtggtgggagccagaggaagagagagagccaagggggatgtgctacgcactttcagaaaaaccagatctcatgagaactctatcagaacagcaagggaagaagtctgcccccatgattcagtcacctcccaccaggcccctcctccaatactgggaattacaattcaacatgagatttgggtggggacacagagctaaaccgtatcagtaggttataatattattgccattttacagatgagaatactggggaatttagagaaaagaaatgttcaatcaaagtctgcacaaatattaagtggcagagcagacattccaacaatgtgaattgttcctcaaagaatacatgctattgcataataggccccaaaattcatactgataaatgtaaaatataccatgatacctttgatttttatcacttttaattatggttaatgaatgattatgcatgcaattgtactagaatttctaagtagccctcttgtaaacgcaatctcagtaattcttctgaattccttgagataaaattattagatgggatgatatttatattcatcacgttgaagttcatcaaaacagtcgaagaagactggcttcagatttccagagataaatcgtattggaagctttagccagaacattcatgattaaaatcttcaatgacccttttacaaaaattaccaaacactgaattatgattagtttgatattgttcccaattataccaatttcttcactaaaaaaactataattaattcatagcataagcctgcaaaatacattactgcacattttgtaactcattcagctgaaactaaaatgttaaatactgtgattattatttttgtgataatgaactgagggcaattttggagttcaaatccaatttcaggacctgatttcaccatcctgttgtatttatttaaagatcacattctaatgacagttgacaaggttgtttgtattctctctcatcacggcattacagtacatttattgatgagttttaaatacatttttataccatgtgtcctttgctcgaagtctccttaaagacacaactcatttttccacctttgtattcaacttacacatatacaattttgaaagagagaagtatgtttgtatataatattttaaaatatatttacatgttactttgtaatttttgaaatatttcaccatctagattataatatccttttggaaggcactggttttccctctcttgtcatttccttggagggtctcaagtatcttttaagtatggaagacacagctgtttattagaaggaacaaataaagtgtactacaattatttttaaatttgcattaaatttctttatatagccattgctctcactgattgcagctgaagttagaaatacggcctgagcaaagtttcagatattagagatgctggacatatcaaagcccttaagcttgggattcctctggaagaaattctggatcaaacaaaaaatgatttgtgagctaaaacacaggtattaccaacaaggtatcttgaagccaactagctggcctcccatttgttttctcacctaagtcccaggatgaatttggataaaggctaaggaactgttgacatgcatttggagaatgaaagtattcttattttcactttccattcatatcattttgttttttatttaaacaaatgtttttgtataattaatgttatcataaaacaaaaccaacgaaatacagtttgatggaagtggtgccacaatagagacattacaggtctgaatgagaatatgacagccttaatctgttatttagatttccctgagttcagatggcagacagattcacaacacctgtgaagtggaaggcaggcagaattagtgataggagtagtgtcagaagcaattactacaatttctttagtcttctgatgccagccttctcaattttcttaacatttgtgaaattataactttaacaagtatttgttggaaagctatcacagcaaaataaaactagatgccatgtgatgataataatagcaagcatgttttttcatgactagctttgtgacagatgctttacaagtgctatcttatttagtcctggcacaatcctataatgtaagtattatttttctccttgttttacaacaagacttttttttacaagaggaatctgaaggttaagtaacttgtccagggttccactggtagtaagtggtctcaagtcagatctgtctgactccagaactcattctcctcacccttgtgaatcctttttcaacccatggccccagtctttgcctatggacagatcggcacaactcaagtctgacttaacctgaagtttctactagaaggccaaaacaattctatcatttaaatgaagtgttaagaaggggagtgtgctcaatgttttaaattctaaacagtataaaatccttccaaaaaatgtatgatcatacaaatataatcaaatcttaactgagaaaaattattaccaaataaaagcatccacctaaaaatcatgtatttgtgtgctaattcaggagacagttatgcaagtaatttttcttacccttcaatatcttcaacatagagatcatggatattaataaaaggagatgcaattttgctctcacatatatttttcttatgcaatgggatgcttccagttgtttacatctttcaagaaacttaatcaccaccagatatgtactagtcttatgatgccagtaggactactttgtattttctaatagaaaggaacactttttcttctgtgttgtaatcttgtgatatttagacccaagattcattcaaaacacttagcagccccatttctaggtttttgacatataacaatactagcatatgagttcaggaaggtacatatgtcaggctgtctcttgcaactttagatataatagaaacacatttaaacaagtcaaatatctatcaactgggggattgatatatataatgcaatattaaaaatagatgaacatacatgaaatggctcttagaaaagctgttaaaatattgttacttataaatttgaaactgcaaaataatatgtaaaatttgagccaaatttggtttaaaatgtgatctcgtgtgtgtgtgtgtgtgtgtgtgtgtgtgtgttctgtggcatggtgtgaagtgcggtgtagatacatcaattctagaactcttcataccaaattattcaaaaatggacagggttgaaagttgtggggagactttcattttttagtttctatacttctggtttattattattacttttttaaatgtgaatttgctttgttagaaatgtttaaaaagtttttaacatgcttggcatttagtgttcataactataaaatgcaacttaccttttcagcctaattttccctaattttagacattctgcctcaattacagtttttactgctgtgtcctagatttctttgcctgtcggcttttctatatgttatacccactgcaaggaaggtccttctcctcacttctcaggcctaggttctatgttatttccagttctaattccagtgcttctaacaataattttaacaagcgtatttcttactttctttcttctattctcatttcaaatattttgtttttctgttacaccacatcatagagtgccttgtaataaatccactaatatatgcatatgtaccacccataaagctgaaatcttcatgcttatttttcccttacaattagtaagtattctattcaattgaaaaaattaacaatgttttatttttgtgaaatttttgtagagtttcagcttttctgtatatcatgatctgctgttgaagagacacctctattttatgtcaaattgtcaattttgtgccttataatccacttctgaattctacattgtaatttctgtgtaataactccatttgctgcctctattctctcatataaacacatttcaagaggcttaaatggaagacgacaatccaaatcaaatttcttagacaggaaggtatttgtaattatctcataaaatgatgccaaaatcttgtcacatacagtatctcacatgacaaattcaatagtgttctcagagaaacacaattttttatagtaatgtttctatgtaaatcagtccaggtgggtttcttttacatgaacaagcaagattgttttcaaaatgatagaaacaataaagagagagaaaacccaaactgatttgcaatgggagtttcctcagtagtcatcccagagggaagttttgctttgtcacaagtgactagcccttaattttgagagtgaatcatcccctttgaaatgagagataagttggggaaagagctgtttaaaaattactttacaactatttcctttagagctatgacttcttaaactggaatgtgatccagaatagcttccctttgaatccaacatttgtcttcagcattttattgtctctgttttccctcaccccatctcactttttccttctctctgttcaacagatttacactgactgggccaaccactacctagcaaaatcaggccacaagcggctgatcaaggacttgcaacaagacattgcagatggagtactcctagcagaaatcatccagattattggtaagcccttccttctgaaagaaagcatgaaagtctctgctcccatctctttggtaaagcacaacttaagttaagcgccttactgaactggtccatgtgtctctgagattcatgtagctctcccctgatttaattaaaatgtttatatgaggatgtttgaaaaaggcagtttggccatacttttaaataactagaactgtatctttatatacataaacttgctaacctttattgaatcatttgaattgaactgtcagaaatgaatgcttcattaaaccatatgtctcccatgtgtgtatttcgttagctggagcaactcatacactctgagatgccttgaaactgtatcctgatccagcagggacaattgtgaaaggtttcatgtcagcaatcatttggcacaggctaaagaattagcagcaacttccttctcactcatttttttttttgcctgatttgtgcatatagaattggcagctgctaataagtgtgtcttcttgtacactgcttggaagacagaatatatgtagcaggagcatttttgcttggtattttttttttcctgttttcgtgtgtgtgtttcacttcattgcttaagcatgtcgttctttttttctctcttttattttatctcttggctttagcaaatgaaaaagttgaagatatcaatggatgtcctagaagtcagtctcagatggtaagaatcatatttattctcaatatataatgctgatcttcacttccagaattaattgcatttgtaaatggatattattttttttctgcatgtcttcctgcttaagaaaccatttgatcccattctctcatatgtatttgtgtgggttcaatttaggcacatcaacatcattaagtgactcctatatacacatgacatatttccagatgtcttattagatccttgacttttttttgttctgctgttctgtataatttaacactggtcttaatggtagtaaatttcatttctacttttaagtggattatttttgtctgaacaactggcttaaagaacaggctttgccatgggcattttaaaatatataaatagtattttctttgttcataacaaagtccagtgtaaacacatggactcttcaacacttctggaaatagttctcaaggcatgctgctgtcagtttggtgagcagtgactgattttgagatatgattcgtagtctcttccagaaagccttcagcctggatatctgcctctttcccagctatctcttatctttatcaaccaataaaaacttcaagttttataataaagtcaaagagtaataaactatagagataaaaatatgtttcttaattaaaaagccacaacttagttttataggaaaacctgaaatataaaatgccttaactaaagttacatcaagcagatataatcaggaatgacagccgaaatccacaagatgaagctttctccaaaactcttcagcacagaataggcattttaaatgaatttaatgagttcttagttgtcagaaacttggaagaataaaaaaatctatgaacttttaaaatatactgacctactttacttaatgtcagaaaactgaaatccaaaataataaacataatttatttctaaaagtgattaactatcatgtatatttttaaaataattggccagatgtggtggctcacacctgtaatcccagcactttgggatgccaaggcgggtggatgacctgaggtcgggagttcgagaccagcctgaccaacatggagaaatcctgtctctactaaaattacaaaattagccaggtgtggtggcgcatgcctataatcccagctactcgggaggctgaggcaggagaatcgcttgaaccagggaggcggaggttatggtgagcgaggattgtgccattgcactccggcctgggcaatacgagcaaaactctgtctcgaaaaaataaataaataaataaataataaaatcaaataataaaataaataaataaaaaataattactcccaggacctattatgatgtcatgaactctgtgtatatggttgtgaaaaaaatcactgtaaaagaaaggatttctatacaatccttcagttttaaggaaacttcctgatctaattactctaagtgactctgtgggaattaattacagttgttttctgaggttttactgtgaacaagccaaatcagaagacatttagaccttgatacagtaataagctgtgtgatgttgagaaaaatatgtaacttctttgagccttagctttctcatctgtaaaatgaaccttaattagaatgtgacaatgagatatgtatgtgaacatcctttattaacacaactaaaatgcaatgcagaatagtattgctacaaactttgtaaaggacacatgcgtggattaacacctgttaaaagatttttaaggctttcagttaaaaagctcaacagtcccctgaaaccataattatgtttcttaaacccaacatggttgcttttgctttcattatttttaccatgaggaggtgttgaataatataaaacattttaagtctagaaactcttacctacttggctatcattccaatttgattctgggattacagagaattcaataaacaggcaagcttatactcagtgatggaaaaacaattccaaagctcataacaatggttaatagagatgctgtttttacctatttatctgaaacagctgttcctagagattctacaaatctgtgaagagtctcttgagtttcagactctgttaatttttttattacttcttattcctgttaactgcaaaatatcatgttacagatattatgcaagttatgttgatatttccacttctgattaaaacaaaatagaaagaccacagtctaagaaatgcaaatgctataaaaaaggtagtttattcagccaaaaagcattagttggaatcatatcgaatattgactaagaatgacttagatcctcatttctttaagatgtggttgaattttgaatctgaagttggcatgccttcaatttcttgattcagaaaaatacatatgaaataaatgtaacttttttggctgaattatttttgcctctgttcttaagaatttgtgtaagcactattagtgaataaaaattccagactttaattgagacaagaatgaaaaggaaagataattatgatagcatgactaggcttatgaatttcatgtatctactccaaacaggatgttgcctgttccttgattgcataacactgggaggtgctacattagtaagagtgagtggtatacttgctcataggactactttggccacctctttttgtatacctggtctcttgtggcctttggttgctgttggtgcttaataacaaaagataaagtaaaattaggtctgctgctatttttaatcacgaattgtttttatttaaatgttaaacttgctaccctttattgaatcattttaagcctttaagaatagaagatcccttttgttgtatgaatctacaatgtattgataaatttccatagtagccaggtaattcacatgtaatcaatatttactaagcactgagtacaaagtataataacatttggatgaactacacttgagaattggaggagcaaatgtttagataaataacagcaacagttacataggcgagaacaaaaacgactgagaatggagtaagtttggtgcattccacaaacaaatagaagagcaccgtggattaggcacaaggagagttgtttgaagggaacaaggaagcctgatagtgtagggccaaagtaaggagttggtatggtattctaactcaggaagactttggaagatgtttaaagctgggctgtggtatgatccaatataaatactttaaaagatcaccctagatgctttatggggattataaagtaagtaagtgttggtgtccagttgaatgtgggtgacggagagtacagggagcttaaaatggccccaattttttagcctgaatgggtaagtaattaccattaaacaagattattattatagaagcagaaaaaaatttcttaaaaaggtggagggaggaaggtgatgaattcatattttaacatgtggaacttgatgtatctattaaaacatcaatttggaggaaacttaaggctattagacatgtgtttctgaaggtcagaaaagagtattggttagaatatactgaaaaaataggtaatatttgaaaccatggacaagaatggaatcttacaggaggtctgcatgaagtcacaggagaagaaacctgaggtttttcactctaggaaatataaatatttctgtgatagaggtataggagtcaggaaagggaaagagtgttgagagagtgagactattgttgaggaacagaatcacagatgtggactgctaatccttagggaagatgcagtagctgaagctctaatacgtggactaccccagcaagtcagggcaaagtaagatgagcagaatgtgtaacatgctgtcaaatgttatgcagctaaatagctggtatactggaatgtggtatttctttttggtaattggataggcattgattacctgtatgtgaacatattctgtagagtgaataacgtgttaaaaagtaactcagaagtgccaatatccattgagtcatgaataatttttctaagagtgtcctgttaagacactgttagagaaaaaaaaaaaataaatagcttgagaagaagacagagttgaggggagtttttgcaaggggggaagaaagcatagaaggaggaagcagtagagggaaaggaaagggttcagaggaatgaagtggtaagtaactataccaagtcctaaaggaagtagaagaggaggaaattttggtctgtgtggaagatttgatattggaaaacaatagggatacatttgtttctgtatcatgtcataaaaggttatgatggggtgaagatacggatacttgaaaaaagtatgtatgtaacatatttgtataaacacaaatctctacatagcagctaccactgaaaggattatggccggaacagggaagaaacacataaatagaggcaagttatttgaaggattctagttctgtagggtataatgtactatattattctgcttttacaacttacataagtgttacatgtattattttatgtacatcaaatatactaaataatttcaaagtagaaaagaaagtatattaaatagaaactagaggaatttaaattaatataacaacttcagaattttagataatattaatgtgcttgcttttcatgtgattttctaatggtttaatggttactttatttattattattattattttttgagacgaagtctcgctgtgtcgcccaagctggagtaaaatggtgtgatcgtggctcactgcaacctccacctcccgagttcaagcaattctccctgcctcagcctcctgagtagctgggattacaggtgcccaccaccacacctggctaatattttttaatttttttaatttttagtagagacgggttttgccatgttggccaggctggttttgaactcctgacctcaggtgatccacccatctcggcctcccaaagtactgggattacaggcatgagccaccatgcctggccatggataccttataataaagaaaaattcaccatatatatatatgtatatatatatatatatattgtgtaaatatacacatatatgtacatatatacatatatatataatgatagcactatgactcaaaggagtggaatattgctatatacatacacatatatgtgtaaatatatgtgcgtatgtgtgtgtgtgtgtgtgtgcgcgtgcaccttataaagaaaatttaactctctatataatatgtgtatgtgtgtggatatatataatacatgtatatataatcccaacaacaattcttttgaatagcatagtccaaagagcacatatttaagaaaaatatgaatttgtccttttagcactttattaatataattactgagatattgtggttcatatttatcttaagtttcaaagtcatggttatttttctttgatgagcttgagactaaactggtcctggaaaacagaacttagtttgttggagcttagtcaacactaaatttaaccttatccaaagatgaagttactaatgtggatggcacctgttgagtaattcctaggtgggcggcatcaggattcaaaatatatactgcatgtcccaactttggtgagcttacatgaggaaataaattagtaaactataaataccaggaatgtcccaaatgcccagcaaattaaaaatagcaaaaatatgtccaacatttacttagaatgcagagacacaagtgcaagtttcttagacaaaaatgttagacatgtagggtaaaagttgtttcaatgacatttaaaacattttttaaatagaccattatatttaaggatcttcaaaaatgcacagaagaatgaggacatctgattatgtgaaatagttacaaaccaagtattaggctatgtaagacagctaaggatctggcaaatgtatttcacagcttgtccttcctctttcttggctctgttttgtcgtaataattcaattgttttccagccacaaccttcaacctaaggttttagtataacatgtatgttgtttacaatttgctgatatgaatatttttggcttcttattcctttttaaatcctagtagctggaaaattagatttaggtctttactgcctatctgattccatgtccgatagggttatggctcccagaatcattactgttatggaattcacatctttatcccatttgggatagaaatttcttgatcctatttctattgcttatatttatctggaaagtgaaactattcttaatagtaaaaaaaaagcccatgcttttatcagtagcctgtcctttaaagttttatttttttcagctactgcttgtaatcactcttcttttaaaggatttttttttttttttaggtaagatgagaagatgaggttcttaaccaaatagggaagagataaaatactggaatgctcttaaaggtttaataaaatcttatatatggcatactgcaaaattgtagcactatgactcagaggagtggaatattgctaagttagtccagtcacatgatcccttgactttgaaaatattcatcttctggaatggctagaaaaagatagcttaatgaagacaaatgctttattacaagtagagttctgatctataaagaaatactaaatgaaaatctttactttgtatttttcttaatgatttcattatttttatacaaacttcgcaaaaatatgtataaactactagtatcagggaatttatatgtaagttattagaatatcacctaaatgatttttaaatctgcctgtctctagaggttgctccacacactagtcaagttcaaatgaagtaattgacataacatggaggcattaagaggcagtgtgttttgttaaaagaacaaaggtgactggaattccaattttgtatgtatgacccaggaaaaggcattcagtaaattctcaaggcctctgctcatttctgcaatgaggaaattggacagataaactctaaagtcaattggaactctgatttgctaccttgattaaaaaaaatgccaaagatgatgatttctcttcagttttagtaagtctaatttacaaagaaaaacagcaacatgaaatcatttcgttgtgggaattctttggtctgccatttagaaattaaataaaagttaaaaatacaagaacgccttgttgcattaactttatattatagaatgaatagcttaaatgttgttcttattgttgtcaatatttatacttgtttgtgtaattaatatgataaatagaaattggaataaagtaacggtttgaattacagattttttctttgcttttgaagagaagaaataatttttaaggacattaaatttatatatgcatatataactattgcaaaatgtagttgatatttctactatatctttgaatattgaccactttaataaataattggcatatttttatcctgattttttttgtacttaaaatgctacaaattgttttttattggtagcccagtattactgtaaacacaaaatacaatcattgtatttgaagacatatttcgtaagaatccttttataattttagctttttatatttaatagttggtgtttttaaggaacttattgctccttctttttcaattgcccccccaccactgccaaacttaataaaattatcacttacaataatcagtggaaaaatattaacagtaggataattttaacaatcttagtttaggaaacaaaatattaagatatttggccattttcaatatgaattgtaatactcctatctgaaaaaaatctgtgatagtttatatatttaaattttttcaataataagaaaaaagagtaaataaaatagggaaactcttgttcacttaacctctgtgtaatcatatgcaaaatttatctttgatcagataagtattttgaaatgtagtagatatgccaaagctagttgcttcatgaaattatatttaaattattttaatatgaattcagttaaaaactgaattgtgtggatagacacagaaaatatattgacattccttgttacactctgaaaaatcgtatttcacacctgccttctattagccatgtttcaaacataacaagaaatactgggaaatcattacataaaaacatacaaatttagagaaagatctgatagttcaatgatgtaattatcacttatttattgaacatcaatggtatatacctagtgctgtgctaggtgttttgcttatgcttttcatttagccatcacggcaaacctataatggaactgcgtctcattgaggcgatctgtgtcctttatttagtaaagtggaaaaattatggtttggactcatgtttatttagtctaggccaaattatctttagacttattaacaaataaatttaacaaaataaggtctggaattcaggtctttggatcttccgctatttttttccttctcctcctcctccacttcctccccctctttatttttttaaaaactactttttttatagcaaatttaagttcacagcaaaattgggagaaaagtacagatttcctatctacccctttccctcacacatgcatagcctcccccaatatcatcatcacccaacagagtagtatatttgttataattaataaacatatattgaaacatcagtatcacccagaatccatgattcatattaaagtttactcttggtattgtacattagacaaatatataatgacctgtgttaccattatagtattatacagagaagttttactgccctacacatcctctgtgctccaacccctgggaaccagtgattgttttactgtccctgtggttttgccttttctagaatgttatattgttggagtcatacagcatgtagacttttcaggttggcttctttcacttagtaatatggatttaagtttcttacatgtcttttcatggcttgatggctcatttcttttaagtgctgaatagcattccattgtctgaatgtaccacagtttatccattcagctactgatgaacatcttagttgcttccaagttttggcagttatgaagaaaactgctatacatttccatgggtagattcttgtgtgaacttaagttttcaactcctttgggtaaatactaataagtgtgattgatggatcatatgacatttgtttagttttataagaaaccaccaaactgtcttccaaagtgttttattttgcattcccaccagaaatgagtgagagttcctgctgcttcacatcctcactagcatttggtgttgtcaatgttctggattttggccgtcctaatagatttgtagtggcatttcattgtaactataatttgaattcccctgatgacatatgatgtggaaatatgcatcttttcatatgcttatatgtcttcagtatatctgttttggtgaggtatctgttaaggtctttgaccccagttttaaaaaccagattcaatgccatccccatcaagctaccaatgactttcttcacagaattggaaataactactttaaagttcatatggaaccaaaaaagggcctgcattgccaagacaatcctaagccaaaagaacaaagctggaggcatcacactacctgactacaagctatactacaaggctacagtaaccaaaacagcatggtactggtacaaaaacagagatatagaccaatggaacagaacagagccctcagaaataataccacacatctacaaccatgtgatctttgacaaacctgacaaaaacaagaaatggggaaaggattgcctatttaataaatagtgctgggaaaactggctagccatatgtagaaagctgaaactggatccctttcttacaccttatacaaaaattaattcaagatggattaaagactgacatgttagacctaaaactgtaaaaaccctagaagaaaacctaggcaataccattcaggacataggcatggacaaggacttcatgtcgaaaacaccaaaagcaatggcaacaaaagccaaaattggcaagtgggatctaattaaactaaagagcttctgcacagcaaaagaaatctaccatcagagtgaacaggcaacctacaaaatgggagaaaagttttgcaatctactcatctgacaaagggctaatatccagaatctacaaagaactcaaacaaatttacaagaaaaaaacaaataaccccatcaacaagtgggcgaaggatatgaacagacacttctcaaaagaagatatttatgcagccaacaggcacatgaaaaaatgttcatcgtcactggccatcagagaaatgcaaaccaaaaccgcaatgagataccatctcacaccagttagaatggcgatcattaaaaagtcaggaaacagcagtgctggagaggatgtggagaaatgggaacacttttacactgttggtgggactgtaaactagttcaacaattgtggaagacggtgcggcggttgctcaaggatctggaactagaaataccatttgacccagccatcctgttacttggtatatacccaaaggattataaatcatgctgctataaagacacatgcacacgtatgttcattgcggcactattcacaatagcaaagacttggaaccaacccaaatgtccatcaatgatagactggattaagaaaatgtggcacatatacaccatggaatactatgcagccataaaaaagggtgagttcatgtcctttgtagggacatggatgaagctggaaaccatcattctcagcaaactatctcaaggacaaaaaaccaaattctgcatattctcactcacaggtgggaattgaacatgagaacacttggacacaggaaggagaacatcacacaccagggtctgtcgtggggcagggggagaggggagggatagcatcaggagatacacctcatgtaaatgatgagttaatgggtgcagcacaccaacatggcacatgtatacatatgtaacaaacctgcacgttgtgcacaggtaccctagatcttaaagtataattaaaaaaaaaaaaaaaacaggttgtttgttttcttgttgagttttaagagttctttgtaaacttcggatgatgattgtgtcttctgtaaatatttctgctagtctgtggtttgtcttctcactcttttgacactgctttacagggcagaagtttttaatttttatgaagtccagcttatcaattatttattttatacatcatgtctttagtgttgtgtctatttttatttatatatttgttgcatgtagatgtccagctcgtctcgcactatttgttgaaaagttgatctttgcttcattgtattgcctttgcttcttcaacagatatcaattgactatattagtatgggtctacttctgggctctctattctgttccactgattattttcccattttttcaccaaccccacactgtcttgattactgttttgattacatgacttacttcatgtaggtcataaagctgtgttgtgtcagtcctccaattttgtacttcttcaatattctgttggcaatttaggtcttttgactcttcatataaagtttaaaattagtttgttgatatccacaaaataacttcctggattttgattgagattgctctttctaaaaaaaattatttggctcctctgcttctcccttccctatgcccaaacttgcaatataaataagaattattcttcaatattacacttgtttcttctatctgtggcagggatataaactctcgtgaaactgggagagggagtggtcttgtgaaacaaataatgatttataaattttatggtaaaattatgaatttggcaaataataagttgttatatgtaacttgagctctttatatacatacatgtttttaggtttagaagagtttaataactttataataaaacaataaattcccttgtttggttttgttttctggaacaaacttaaaagcagaaatttattaaaaaacaaaagaatatatcttcaggtcaatgaatactgatgtaatttttaataaattatatttataacacttttgccaattatagcttataatgaagatttaatatcatctataactgatacaaaatattaaacgatgctcataattctccaattatcaagtaaattaaagaagaatagcagggttttgaacaaaatattttatctgattatatcctcgggaactttccatatctatgtctatacagctagtcacagacacacacaactctgttctagcatacatgtgtttatagagcttagctccatattaggaagagtatgtttacatataaataattgaatatacccttctccatttctagtgtggatatatgtgtgtgtatacatacacacacacccacacatgcctagaaacttctcagtttcttacattgtgtaaattgtaataccatgatgcaaatccagtttaactgcaaaatttttaattacaccataggacctaattaataaacgtactccttgtatctaatcacagaccaactaaacaaataaacaaaaaccgaagagcaaaacccaattactgtcccctattcctctccctattttgcaacacaaacacatttgagatgggaaaggaaagcccgcaaggcgttcctttgcaatgacacaggagtaactaattaaactgcacctctcatcctctctgcccccagcactaagactcaacaaatcacagttcgaggaaaaggcctggaattacgcatgctcacaatgatccctgctcagctttgggcttgccaaagttttgatttctactactttactgagtagatccttgtattagtttcctgtggcttctgtaacaaattaccacaaatttggtggcttaaaacaatagaaatttaacttctcacagtactggagggcagaaatctctatcattgggctggaatcaaggtgtcagcagtactgtacgtcttccagaggctgtagggatatccattcctttccttttctagcttatggtggatgccagcattctttcttttgcttgaggccacatcaaccattctgtatgttaatctaccaccatgtaaaatgcattggatatttgagaagtaatatacaagtagttaaacttgtgaacttatgaaatgtgtggaacaagtggatttttgcatacccatttctgtctttacctttacactacacagttttcattcttacattcaaccatatatttattgagcccctactttgtttgtacctggcactatttcctagccatctgccagttgtgtagtaagcctgagtcagaggctgcgaatagcttagtgagaatgtttaaattatagtggtagtaagcataatgaggcagaagagcaagctcattgcagaaagacaggtttaagttttagttctggctctgctcctcattaattgtgtaagcttatataaactatgctatctctctgagcctctactgaataagaaaaataatactgactttactaaaacttacagtgaagatgaaaagagttttgtatatggagtaaatagcatacttgcttatgactctgtgtaaacttccttcctgtgcttggttgttgagtggtggaggagaacatagagaagctccaaatcattttccctgcttccattctttacatgcacagtaggatttttaaaactgcaaattgctcacatagtatcttatgagttagtgtattacaactgaatttaaaaatgaaatatactaaaataggattttttaaaaaattggagtgtatttcagatatgagtaaaaattgatttgtgaaatttttattactatctgttaataaatctatgtatgtactgtgtggtcatttaaatggatgtattcattgcaatactgatcatttcccttttttgattaaagcacacgtttagatctctgatctttaagatcaagcttgacccttaacaaggcatggaggatgttcctcattgagcccttacttatttctgtggccttgtctcctgccactgcctttctccagatttcaggatttgtgctctggagctccttctgcctgatgccttctacccatgttcttcaaactgatttgaaggctactaaccttttgagcagtttcacagtgataaacaatgggaagttgtggagaaagatttaaatgagagtcaattcaacattcctggctattctgatctcttaaagatccctcaacctacgctgtttctcaaccatgcccagttcacatatagctccttcccgcgttcacctcgtaccacatcccctccttcagcaaaaccttcctaacctctcagggactaactcaggcttcccttaaagcagcaaaatgtgggggttaggaacatgggctctgagtgaccttgggcatagcaattcagttctgtgatcaacacttttataataaattggtatagtaatgacaacttcaaaataacatatctttgttactatgttaggtaggtcttagttactaataactttctcctttcctagtctttttggcctctgatcagaaatagacccttctggacagctgcagtggctcacacctataatcccagcactttgagaggccaagcatggtagatcacttgaggtcaggagtccaagaccagcctggccaatatggtgaaaccacatctctactaaaaatacaaaaattaacctagcatggtggtgcacacctgtagtcctagttacccaggaggctgaggcaggaggatcgtttgagcccaggaggtggaggttgtaatgagccaagattgtgctactgcatgccagcctgggcaatgggagtaaaaccctgtctcgaaaaaagaaaagaaaagaaagaaaaaagaaatagacccttctgcattcttttctaggagtctgtgtttctgtgtcataatatttattgcattaaattggaattacctcccttgcctgtaaaactatatactttttagggcttggaaatgtcttgatgaaccaataattgttaaatgaatgaaggaaaacaagcatcctacaaattttaaccaaagcaaaaatattactgtattttactttaactctccagaaaaaatttatgtctagttaaaatcttaggataaattctatgtaattacttgaattcagtgttaggattggcatttgctgaaactaaaacatcttatctattttttaattgaaaatttattaatttaatttatgtaatggcgctagtattacatgtttaatgtgaaaaatgagaagtatagttcatgaaaaatagcacaagtcacaaaagaatctaccttcccgaaatatccaaagttaggattggtttacgtttttctagacattctctatgtatgattggcaacagcaatatctagcactttagccattttctaacttggatgcatttcttatggagagagaaataaatctttgaggtattatacctgctatctggtttatgattatttaactttttacattgtagcagggtttgagtccaatgggcaacacagtgttttaaatccaaggtcaaagtcagctctataagcataactgcagaaggtaaggactggagcgatcacttctcaagcatccttgtgaacagttttccttatagttgctctggttggtatgccctgttcctccttctgatgcttgtctaaccttatataaaatccaacttatttatttatttatttatttatttatttgagacagagtctcactctgtcacccaggctggagggcagttgtgtgatctcggctcactgcaacctcctcctcccgggttcaagccgaatctcctgcctcagcctccagagtagctgggattacaggcacatgcgaccacacccagctgatttttgtatttttagtagagacagggtttcaccatgttggccaggctggtctcagactcctgacctcaggtgatctgcccacctcagcctcccaaggtgctgggattacaggcgtgagccaccacacccaggcccaacttagcttttaagtctaaatgacacttttatgaagctttctctgtatctgtagtggaaattaataactccattctcctcgctgctctacagagttgtttataattctctttggaatttatcatgttatgccttgcattatgacaatttataaatcttttctgtctcctcagctattttacaagctcacaaaggcaaagatcttatcattcatttttatatcccttcaccattgagcagagctctttgaccataataaacagtctatagttgctgaatgaattaatcacttagtgttaagtgttgtgccatggtttagatttaatcacaaactataaggaggttattaatcatatcttggtatttagtaccaaactgtaatgttcattaactatccataagtgtaaaaaaatgtgaatagacaagatattactttgttgatattgtgatagattcttccaattacatgtcctgaaacatgttatatttgcagtaaaaaatgctaaaaggctggctgtaataaaacacacagcttaaaatgtatgagttcaataaagagctatgctaattaaaagcactacatttttagaatagtttattcatcactgaaatgaataactatcagtatttttttttttgagacagagtcttgctctgtccccctggctggagtgtagtggggtgatctcggctcgctgcaacctttgcctcgcaggttcaagtgattctcgtgccttagcctccctggagtagctgggattacagaagcctgccaccatgtctggctaatttttgtatttttagtagagacagactttgccatgttggccaggctggtttcgaactccttacctcaggttgtctgcccgccttggcctccctaagtgctgggattacaggcgtgagccacgtgccctgccaatatcagtgtttctaatacacactctatggttgatatgtcaagaacacgtgttaactctcaggtttaacaaaataattgtagttaaaaatacactggtaagtgtcttgagttttcatatgtgaaggtgatgaaaattcttcctcttctcatctgaaacccaatttgtaatttagcaatcagacatgtttatatttagcaagtatgtaagggtcagtataaatatacagctatgaaaatagacaatcagaaaaattctgccttgaaaaatttctgttccatttttcatgtgagtagttgaaataattcagtgctctttagaatatatgaaaatagtggctgtgtctcgaaattgatctctgtagcacagagcacattttcaggcataaaataagtttaataaatgtgtgatgagtgaataaataaatagtgtgtttgatagaacatgaaacaatggtagtgttacaggatgctaatattaagtatataggtagaaactactcaattctaaaaatatggaccaatttctattacatttgtttagtttctataataaagaaaataacagtccatttgaagaattactctaacaaaactgtttttctttagggcattatgataagattaagtattttgatgaaatcccaaaacctcaaggctcaatgtatccatgcatttggatacttctgaaaataatgactagatctagctctcagaaacttttcattttattttcattacacagccaacatttttatagttatcaagccatgcttaaatttaacatgaaaaagagagagaaagtaggtgttccatgccaataaaagataaaccacaagtagaaaagaagggcccaagaaattgtgcttgacattaaattgtgcctgacataataatagcaagtaaatgtcctgaggtgactgtccataagctacagatttgactgttacctgagccaaatgagaaatgtggtgtccgttgaaatcataatgaatttctttgtattactgctataaaggaatacgtgttttaatatcacaggaataacacatgaattatatagtattatggtccaaataagaaaaatataatgtattactctagtgtgaacagtgcaattccagcaacgacatggtattaaactgaaattatctgcagttagtttctttgaagaacatagttggaagttgtaatttacaagttttgctacaaattggaatcacctgcagatttgtaatgtataatgaaactggcttctatctgctgacattctgattaaacttttgagttcgtaaatgtaaattgggctctatgggtttaaaagatcctcggttaattcttaagtgtagtagagtttaagaaatactagattaaaaatttgggaactgagtttactgggatacagataattctcaggaaactctgtgtaataccaaaagtgaaaggggctatgatgtgaaatggcatcatttataccattatagcattgttaccctccattaatattaaaaactgttataataacaaaaggtattttttgttgttgtgagttattgaatccctactatgtacattgtattgtgctaagtgttttacatgtaaaatttaactgactcttctaagtaattatacatattatctgcttttaatttttcttaaattgaaaaaatcagctaaaatgattattatgggccccaccatcatggaatttttttgaaatcatttatttctattaatcccaaaatataatggtaacaaattttccccacacatcatttcaatttttatggactattgatttttctaaatgttaattaaaagctcaaaacttgactaaccccttggcacttccatttctcactcatttgcctgttgtgatcgtgttttggttttctattctcatcaacatcttttctactccagagtagtatattcctccctgacccgacaaaaaaaaaaaaaaaaaaaaaaaaaaagaccaaaaactaagttttggacatatagcaggccaaatgctattacagattataactgatgctatgtctaaatttattaattcattcagatagtcaacagtaatgcattaagcattgattgtgcctggccatggtgtgaggtcctgggggtaggagggtaaatgtgagaagagagacatcagctcccaccagcagacatgagttcatgtatatcagaggagaggcttaggatgccatagaagtaagtcagctcatcagggtcaatgttcaggagacataattaatttgactactaatattatttccaattagggtttaattatttctcttttttatttgactgcttcaagcatgaaaacactattttattcttgctgtagttcatttgtttcctcagcaattgtttatagatcacctaagtcatacatttagactggggagagagcagtagccaaaattaaaaagaatcaatagggagtatacattctggccagtcatatatatatatatacacacacacacacacacacatatacataaatacatatatatataacacattaaagtatatatcatgatgtatactgtaatatatgtaacacatatgatatagactttaataacacatagcatatattacctataatatataacatatatgtaatgtatgtaatatactattatatatactttaacaatgtttatacatattagcattacatatacgattatattacatatatagtaatatataattaaagtatatgctatatattatatatcatacacatatgtatcatgtatataatatatgcatatatatgatatatacatatgcagtatataaatatacaatacatatatgtaataaaaatgcatacatgtatggtatgtgtaatatacacatatgtatatattacacacatataataatatattgatatttaatatgaacatatcatatattcaatatacatgtgtttaatatattatgtgtatacatgcctatgtcttatgcatgtaatatatgtatatatgtatatgttacatgtatacgcatatatgtatatatgtatatgttacatgtatacgcatatatgtatatatgtatatgttgcatgtatacgcatatatgtatatatgtatatgttacatgtatacgcatatatgtaatataataaatatatactttaataatatattactatatacatatgtctatattacatgcataagacatatttgcaatatataatatatattttaataacaggtattactatatatgtaataatatattattaaagtattaaagtatatgtcatatattacatatctgtatgacatatgcaatatacacatatgtatatattacacatatacatatatgtaatataataaatattacacatatacatatatgtaatataataaatacatatacatatatgtaatataataaatatattaatataaatacattatatatttagtataaatgtttactatattatgtatatacatatgtctcatacatgtaatatatgtatatatacatatgtatctattacatgtatgagacatatatgtaatatattaaatatataatatatactttaataatatataactgtatatgtaatatatattattaaagtaaatattatatattatgtatctgtaatatatatatttgaatatatattactatatatgtaatatatattatgcaatatattattacattatatatattacatacatgtaatatatgtaatatatgttatataatataagtaatgtatgttacatatatgtaatatatgattaaagtagactggggagagagtgtagacaaaataaaaaccatcatgaaggttacattctggctggtcctctatgtatacattacacacatacaaacacacacatgtaatatgtaacatatactttaatatttagttcatgtgtgtataatgttatgatatatactttaatatttaatttagatatttgagcatttgctatttgataagcactattatgagcacctttcatgaatttatttatttaattctaaatctaatagtcaactcttagctcttgtcgtacatgacttgttagcagcttttgatagagctcatctttcccttgtgcttaaaatactttcttcaggtggttttctgtaccccatcctctcctgattttcctcatacttcccggtggctttgttcactcttctctgttggttcctcctcttcttcccaaggataatctcctaaggctcaatgtttgttcctcttcttttatgtctacacacttttgttgataatccaccctcaagacttcattcacattaccaaaaaatttgaatttagatctccaccccaacctctcaattgaactccagattgtgtgtcctactgcctacgaaccatctacttttgaatgtttgatggaccagccaacatgtcgaaaaagaaacttccgacttccattcatgatcttttccatctcattggatacagacttcatccttcttgtgattaaagcccaaaaccttggagttattcttgactcttctctttctctcaaatgccatatcttcccatcaatttctctcagaaaacatctggaatctgaccatttctcatcaccttcactgtctcttcactaaccttgttgctacccttgaatatgccccgtactgcataccacctgccacgaaccccaccagaaaagaggcaatgtaggcatggcaatgctctggtcttcttagggcagtgttttacatattgtggattaccatccattaatggaccctgaaatccatctagtagattttaagcaacatctaaatagattaaacagaagacagtacagtgcactaggaagcatcacagtaacctgaatttagtaaggtaaagtattattccgtgaaactttgactccattataattatgtatgtgcatattgggttgtgctattcaatttatttcttgctgtgggtcacagtcaatattttagaaaatattaaggtacatgaagttattctaattaaaatttcacccaaatttttggtgttaaaatatgatttgaattttgttagtttgtttgatatccgattcaaataataatgaaggaaaataaaacagattacaattatttggctcaatttgatggtaaaataacttttatctgtttgtaagttaccaaaaagttttagaggtttttagttaaaaaaattgacattaaatatggaaaaaagcaattaaaacagtgtttgtactaggtctatttataataactgagagatgtttaagggaaatccatattaaaaacaggaatgataaaatctttacaatttcttgaaataaaattcttaaccagagaatatcattttatcattaaaaaatccactcaaattatcttaaagtatgcctctggtgagaaagtgaccatataaatggcatttaacaagatatcttaaaaccacttctttttactgtaaaatgtatagcctagtatatactaacaaatgttattgaatttacagaaggactagaattaagtggggaaaaggtattattttcttgaaagtcatgtttattatgctgatacattgtgagaaaataaattttggtaaactgttaattttaacaataaatgttgaataaataaatgcactttaatgaactagcctttaatagtcatattggaaactgtattcaggtacttattctgtcgctaacttagctactcaggcaataatggggaacataactaactatcttaaattgctggtcctcataatgaattactataaaagaatagtaaaaatggttgaatgctcctgataaatacatttgaaaataaaaaagaatgtattatcgatcatttgttgttgttgttctccttccccttccttccttccttccttccctccctccctccctccctccttccttccttctccttccttctccttctccttccccttccttcttctcctccttctgctcctcctcctccttcctcctccttcaccctccccttcctcctccctcctcctccctcctccctcctcctccctcctcttccctcctcctcctttttctccttctccttcttctttctttccttatccttctccttttcttcttcttctcttttgcattccccttctgattgtggtgcaagttgagagagagagttgtgtctaacactcaatttagaaatcagtttattttatatgctggttaaatggtaggcaaaaatttatcttacaaacttagttacagactcaatgagccttttctggattttcagtgagctaatctgttcatgtataatatgagtaactaaactttaggtaataatatcctattaacattttgtagcaaatcacatttgggtcagaaatcttccttctttctataaaaggcatataattgcattgaaatcaagaactttaggactgctcttgcaaacatttaaaaatattccatcacattatctttcttaatattaggccacaataattatttggcatctttcttttactaatttttaatggatcttaaagaaatacatttacaagaatactgtggatggatagagaacatcaaatttacctcatttcttgttattgttcctcctcttttccttccttatataatcttatagctagcggcagaatgaaatatgaagaaaggaaagaattaatatatatttcagcactgtcgcctcattggatattcagatggtgatctgcagaacaataagatttattatgttatgttgtattcagcatcttcaactctattatttattcattagaataatttcagtaaaacttactttgaagttaattaatataaatttttttttcctcaaaataaatgagtatatcttggctgtggtcatttttaagcaaacagcatatcattgtatattatcaatttttgtataaaattactattttaaaggaacataaatagtttctctattttataaggatagattcttgaatctatttttttcttttcattttctttaagagacattttgaccttgctatgaagctaagctagggaggacattggcagaactctgtgtgtcctcatgcatagctttcgatgagaatttagtaagacagacaataggaccttgccaagttattaattttaaatctcttctttattgtagaatctaaagatttatagaatacccccaaatccagggagatggatcacaaagaattggaactttttagctttctatgctcttacgaatcttagctgtgtcactgctatataatgtcatgatcaaatttttatttttttatttttttgcttttcaccctaaatgaatataaactggtaatcatattgaaaccaatcatttaaaatccatggggcctggcatggtggctcacgcctgtaatcctaaaactttgggaggccaaggcgggtggatcacttgaggtcagtggttcgagaccagtctggccaacatggcaaaacccctctctataaaaatataaaaaattagcggggcgtggtggcgtgcgcctgtagtcccagctacttgggagagggaggccggagaatcgcttgaacccgagagagggaggttgcagtgagccaagatcgtgccactgcactccagcctgtgtgacggagcaacattctgtctcaaaatcaaaaacacaaacaaacaaacaaaaagtgccttgggaatcacccttttaaaatatcaaacaaaatacctgtatttaatcagcagattattcacctctagaaatacaaatataatttttaaaataagtatttgctatgtttaggatgaaaatatgcttcattttcatgttgtttcaaacctgtctccatctatctatcttttgacgtacttgacaaacactgctggttgaatctaaattacccacatcctaacattctaagactcacacatgcaacaatctcagtctgtatggatgctttcactgggacttatttgcaaaatacaagatccagttttatgttaagtaggtgggttgctaatctgcaagaatgccattctttatcaggcctttatgaattgtttgtaagtaccagctgtacaatgaaagctttatattcattctgcaattagccaaaataattctagttaaactctggttaagacttctagtatgaaatgaatgtaaactattcattctttatcgttctttctggtttcattttggcacatgtatttgttaaaatataatcctctaagttgctttttcactgcttttcatgttgcagattgaaaatgttgatgtctgccttagttttctagcagccagaggggtaaatgttcaaggtctatctgctgaaggtaagaaaaagaatgactgaattgtcacaaatggcatcaatgtttttaaattattttttataatgtaagaaatgtaacattggagtatacgtctccttaatatgataaaggaaattggtgaagtcttcaagacaaccgaaacataaacataatggttattaatatgtgctctaagtatttaaatgttttccatattttgccagaactgttcttttcttaaccaactatatgggagaggagtgaatcaaaaaaatatctttatgttattactagtttatagtataattagatttcttaagtagatgaatagataattagataaatgttggatggacataaatacaggtaaaatattttaattaaggcttaaaatattattttatcaataacatttctataatatattcaagttggtagaaatagtcaaaatagttggtaagtttaagtcactatgaagtcttaaataattagaactaacagcgttaatcactgttatatataaatgttttaaatcattaaagattcaaaagatcatcactaaaattgaaagagagcaaaatggggaaaacttgaacaaattttgacattgatcttttttctgagtttattttactttcacttataaaggtggcaaaagtttgcaaaagcttgctacacttaagataaaatttgccatacttgagaacactgatacttaaatttcttttatatttgcatgttatgatatataattaaattacacatttaatgaccaagaagcttaggttcaaacctaactggtagttctgtaacttcgaataacatttgagtaaaattccccaggataatatgttgctaagtagttacaggctagaaatgctgccatttattcactttttatgtctcttccttatgaaaacctttattaatatcagcctattgattttcattcatctttaaaatatacatgaatgctcaaaatttactctctaaattagttaaacatgcaaaataataaaacaataattttttaaagactctttaaacaaaatctttcaggtttataggagaaaattaacactctctcactgtagcctcagattgatgaagccaactcttcaatatgacgaaaactatgagaaatgtttgggggaaaaatagaacaactcagagggtcattttatattaattattttactgcatagtttgagttatatgataaaccatcagagagcaagaaatccaaacagttggttaattttcctaaactccaaaaggggacataaaaccttaatctcagaggaggatgcattttattgccaacatcaagttttatttaaaatatgattacaggttgtgtagcttattttcaagctttacatccttctcttttcctatttttttaagttataactacaggagaaaaatgtaggcttatgtgtaccctacattgtgaattgaatttttttattcaatatttgaaaatcttacacagcaacttcatctgttagaacaaggatttctgcttattcaattatgttatctgacgtaagctaatcctccttatttattaatatatagcataaattaaaaataaaagaattggaacattaaaaattgatatgtctgcttttggaagatatacctacacatacattttgatatatatggatatatatttggaggatatatacatacataaatatgtataaatgagttggtgagtgggtgatttagaaagaaagttgattgcaacaaatccagttggtattaggaggtgcacccacatcatcaatatttataaatgcaggacaaccaacatttaagtggctttctttctccagttcgtagccactgctatgctggcaacagctgtgtatatttgtgagggaatcaacatgctaaatcaaatggttagcacaagagagagctcatttatttctaagaagcagctaactcgagaaaaattgtagttcaaggtcagcaaagaatatcacttctgagtgtgctttgttctttttaccctctatccttttattctctccctgaaattccaagttatttggaaatgttaacatgtttcagaaattcaggtttgtttgtgattcaactgtgactgagagaattaagttgtatctctgtcttcatagatttatttcaagagaaatgcatctagaatttgttaaaaaggacattaaatacatatgattctttttttgtatttttcatttcatacagaaataagaaatggaaacttaaaagccattctagggctgtttttcagtttatctcgctacaagcagcaacaacaccatcaacaacagtactatcagtccttggtggaacttcagcagcgagttactcacgcttcccctccatcggaagccagccaggccaaaacccagcaagatatgcagtccaggtaaggaaaggaagtagggaatgtgtttccaattagtttgtgtagatacaacttgtttttaacaaattattgtccatgagtttgaaaaacgtactcatgtgcttgtatcagtgtgatgggattatttgacttgtgtaatagaaactaaaaccactcttgttttgcttggacaagcaacatctatcatcttttgggtgacgtattttgtttgttttctaaagattgttgttctgtatcacagtgtgaaatgtctttggtgtaagtaatgtggcatgactactttcttctacaaatgactttagtatttagaatgtgctattgagtcctagtctcctgtcatgtagttatctttcattgatatttttgattaattaagtctgtcagaaatttcaggtctgttaaacataggagtttgaagtttgggaacatagtgtttttgatgtgtgtgtgtgtgtgtgtgtgtgtgcatgagtgtgtgtgtgtatgtgtgtatgcacatacatgtattatttgtctggcttgagtcttttggcatatgtagacacagcctggtggagtgctcccaaatcatggcaacttccttttctcttccattattattatttttttccaatatagaattatatcaatcagtgttcaactagaggagtcaagcaagtaaatgatatataacaagagatttattgtgaagaattggtttagcatgattgagcatactggttaggcaagtatgaaatctgaagggcagcccagctggaagggcaggctagaaatctcatcatgagttgaaattgcagtacgcaggtagaatttctcctctgaaggaagcctcagttctgcttttgaaaagccaaactttcggccaggcacgatggctcaagcctgtattcccagcactttgggaggccgaggtggatgtatcacaaggtcaggagttcaagaccagcctggccaagatggtgaaaccccatctctatgaaaaatacaaaaagcagccaggtgtggtgacaggtgcgtgtaatcccagctactctggaggctgaggcagagaattgcttgaaccagggaggcagaggttgcggtgagccaagatccagcctgggtgacagagcgagactctgtctaaagtaaacaaacaaacaaaagaactttctttcaactagttgaatcaagatcacccagattatctaaagtaaactttactgaaagtcaattgattatagacttttattacatccttaaaatatctacatagcaacaactagactagtatttgaaggaataatttagactatagtctaacatagtttacatatcaaaataaatgatcacagaatgaagtttcacttaacaactttcatacaagctactatatttgttcctgaacaatgactggggtattggttagttagctctattacataaatagttatgattatttttcttgaggagagaggatatgaaaatccctttcatcgtctttgaaaatataaacacttgtcaacaaatgtaaatatttaactttgtccaccttagaagtcaagcttgaaacctactaacattcagttaaccttgagtttggtaattagaaatgactcaaacaattaaaataatgttccaaagtacatttatggaccacctcccacttactgtcagttgttcaactgttcagaaatcacttctctttcatctaccaaccaaccctcatatggattttgtttgttactccataataaacaatatttatttctctatacaaccatgtaaatttggttccctttggaagattttcactcatcagtgaatttttaaataaattttaaaaagctatagttttactaaaaacatagcataaaatataaagcttatgaagtgatgggggatattttttattataaaataatgcagatatttgactgttctttaagctcatcttggcttttggttatatcaagtgagattgtataagactcatagtggaaaataaatctctataggctaagtttcttggatgtttgtaagcatatagaagaacaaagtggatgacatcgtgttttatgtgttattattttttgtgtggatgtttgcaacaaagagatggattctgaaaagtgccagaaataatatttactagagtttggtttaagcaatttaaataaagaagacacaagaatagtagctgaaaaaataaaggaaataaaattattttacgtaaagcatgttgactctggaagtgatacggaatatcatttgacattgctttacctcactctttttctgtatcttccatgtgaaatttattgtctagaatttcttgcccagaatttcttggtagttatgacccttttaggaaattgtttattttcctattcttcttgctggatatacatggctgttgtgaaactatggggtagtttaaaatataaagccatgtataatactcatggtttttatactcttttgtggaaggatgtctcgatttttcattacaagtttatgaaaagtattcttttcaacagtgtcctttaaagcctttaaggctgtggtagacttttagcaaaattttctctgctaaattggatttaattactttttgaattgatatataatttaataaatgtttatagagtaacagctttaataaaagtagtattcaggacccgaatatagaagagttcaagtcttacttccattagtcttacttttagagaatttttacatggtttaaaggatatgatatttaagacattaatacttatttttatttatatagatttagtgtatcacattaatatgtaaattagaatttatgtggacttacctgtagcaatcaatattttaaagcatttttcaaaaggccacaatgataatatacataggaacataatgtagtatctatgggttagaaccaagataattaatgcagaaaaattcctagtgacaaatttatcttcatttgctggaggtgtgagtcataaatcatgatttatgatgcctttctattgatttcaaagttctttccaagtaaatagtttaaatctcaacttgctatacttctctgggtatttggccagaaaatgttcttatatttttctctgtagactaataaacatttcttagggcacattgtttcagttcagtgaaagtgtttctgttttattctctttgtttaaagtaaattggcataattctacatatttccacaacatttattttatacattaataatttttaatttgattttgctattttgaaaaaaactccagatgtttttcctcaagttgaatagctttcatttaaacagaaatttggatttaaaggttaacaagtgaaatatacaggagaaaaaataaaacatggaccaagaggaaagaatagagtaagaaattctgctctcctgctctctcagctccctctccacctttgagtgtatgtatctataggtgcatgggtcatgtgctatatgtgagcttgagtgtgtgtgtgtgcacaagtgtgcatgcatgtgtgtcctgctcaagtggcacctagagttctaattattaagagtttacctcaggaatcagactgccaggacctggatctgtattaaagtaaaggtgggattcagattttaagtttcttaaattcattacagggtattatttggcttatttggagtgataaagacttgattaaccaagtaatcaattctttaaaatttaaatatatttgatatgaaaattagattttatctatgtcagtatttttttgatggactttatgtgggtaaagattcaatatcttgctatattccgaaatattaagcatcttatttgcatttatttaatatatgaaataaaactagttcattcagtatttcttaattttctttttattttgaaaaaggtagataaaaattctcctctccagccaaaaggggaaatatgagaagtgttttaatataaaatgctaaaaaaaatcgtatataaatgttggtatcatagttattttccacaggtattcattgggagatgaaggaaatcctatttcttattctaagaaacaatgtaaaaataaatcctacaattttaaaattcataaaattcattttcatcctaggctatttctgtgaaccttactttttcatatgttgcattttgacaattagagttctagttggcaggaaagctaaaagaaaattctatttcaaccctaagcagtacctagcacataccagacaacaacactcagtaaatgaatgcatgattttcctaagaatacctggaaaaacattacagtaaaaaaaaaataaaatgaaacttaatttttcttatgtactgacctggttatatacaaggtgttaggatgatagtacatgtaaaggatacatttttttatttgctaaaagcttttttaaaagacgtgatttttcttaaaatacatacttttatcttaatttttgaacagattattaaatgattttccttcctgttatcaaatagttgatgaattttaccaactcacagatagtggttattaaatcacatgaatagtttatgtagtatacaattaaaacatgtaaaaagaagaaaattgaatgtgaaagtagaggtaagagattacatagatagatgatagaggtggcaaaaccagtggtgataaatctttctgaattaaaaaaaaatatattgggaacttgaaagtttatgatctctgcagatgatcatatgcccttttgcttttgattttatgggagcaaatcaagaatgtgtccactttcaaagatgaacgtgctcctacaggattcacaagttaaactgtgaaatccccgggtacacgttttctgaacggcttggctgttcccttgcagcccctttccaaggttcccgtgacccctaccacacacattgcttttggaaccctcttaccatagaggacatttgccttccagggtatcttttccaggaaacattatttccttctgggagattcactctgaaactgggacagtttacagctttttggccaaaggttataaatcttgagaagtatataaggaagtttaatttaagatgacaggtaggctttagtaatttaagcccttgtgaacctggcttcaattagttgcctaactcagttctgtgttgtggccatagtgtgccctttaaaaaaaaagtcagttaatcgattaaactttaaataaaacaaaaacagaaaagaagagggatatttataaaatcattacttaaagcaggatttttttatctctagagagaaataattgaagagaaagaagttattcttaactgactgcatttggaaaccaagagtatgtaatattaagagaaagtttgtgtgtgcacgtgcacacacttttgttacgttctaacactggtgtttcggttgttatagatgaagattatattatagtaaaggtgggactcagattttaagtttcttaaattcattacaagaaaatatttggctatatttggagtgataaagacttggttaacccagtaatcaatttttaaaaatttaaatatatgtaatataaaataagattttatctatatcagtatttttgttgttttgttttgttttgttttgagatagaatcttgctctgtcacccaggctggagtgcagtggctcagtatcagctcactgcaaactctgcctcccgagttcaagccattctcctgcctcagcctccctagtagctgggattacaggtgcccaccaccacggccagctgtttattattattttttttttttgtaatttttgtggagacatggtttcaccatgttggccatggtggtctcaagctcctagcctcagatgatctgcccgcctcagcctcccaaagtgctgggattataggcctgagccatcattcccagatgctatgtcagtattcttggatgtattttatgtgggtaaagattaaacatcttgctatattggttatttcagagtcaagcaagtatgggttggagtcctgcttgccaattcccagcgcagtggcatggtcaagtgattttaacctgctcaaattccagtgttcttcctctaatattggaatggtgtcaactttctcataagggttttgaagagaccagatgaaatggtttatgtataaaatgcttacttagcataacacagcatataatagacactcaaaccagctatttccatcttcccttctttcacttgaagatcatatcacatgtgtaataaaatacgttgacccacattaaaaaccttaagtcaacctcattactgttctcccttttctctctttctctaatcaagtctgcccattccactaagtttaattaaatatatgaaaataatttaaagtaataatatttccaataaaatagcttaataatgctcagtcctttgtatgcccagtctaaataagcagaataacccctttaattagtttagatttttttaattagttacttccatatagctaaatagaatgctcctaccactagtttctattcatcaatttgaccattttcattggattcacacatctctatttctctccaccctcattaattgattctacaaacttttattaagcacgtagtatgttctagacaatcttctagtcactggagatatgcagaagacaaaagagattaaaaaatctttgctttcttgaagctttcattctagtaattggagataacacaaacttaattaaaatatttaccagtaatttgacagctgatgacggagaaaaataaatcagaaaaaggcaaatcagatgtgtgggaacaattttttgctaatttaaatttaatgaggaccgaggaaagtcctcattcagatgatgagactaaacaaagaaaatgacagaatgttgtcggtgaatatctcagggcagtgtttcaggctgagagaagaaatgctcttagaccttgaattaagagcctgtctgcttctcttcaagaagagaaaacatctatcccagttgcgctggatcagagggaaagaggcagaagaagagtagatataattcaaagaaacataagaataagtatggccctgttgccattgtaaagactttgacttttattcctggagagaggggaagatactatgtgccatgaggaacataaacaggcacataaatgaagtggtcatattggctgctgtgttgaaaatagagtgtagtagggaaaaggtggtagcaagaagtcatggaaaaagcttgggctatcatgttgaaagtgcagagaggaagttaaatgccaaatgtgttttgaaggtagtgtcagaagaaactgatagacttgtaatgaaattggtaaacagaaaggaaactctagcatggataaggaggctataaaggtgagactgtacgttatcgatatagtattagctgttggaaagatggcgtttccatttgctgaaatgaagaaaaaaatatgaggaaaggtttggtagggagaaggtcagatattcacttattgccatgtgagctttgaaatatatatgagatatatccaaaatactgaggaggccattggaattgcaaaactggggtttaagggacagatggagcctatagataaaaatcatggaaaaataagcagatagcaacaataaaaagctataaggctagacatgattaagtcaccaaaatctgtacatagttgaagaagagaactgaggccttggatcaggagcttaccaatatttagagatcaaggagatggcaagacctgatagaggagaccaaaaagagttagcctgtaacgtaggaagaaaagtagaacttgatgtcctggaaagcaggtgcagaaagcgttcaatggagagacagatcaatagtcataacttatatggagccctttctgaaccattctaaatagtttatacatacatttactgtctcaatcctcacggcaatcctatgatgtgtatactgtattctttctttctttctttctttctttttttcttttttttttttttttttgagacggagtcttactctgtcaccaggctggagtgcagaggcgtgatctcagcttggctcactgcaaccttcccctcccgggttcaagtgattctcctgcctcagcctcccgagtagctgggactacaggcacacgccaccacatctggctaatttttgtatttttagtagagacagggtttcaccatgttggcaaggatggtctcgatcttgacctcatgatctgcctgcctcggcctcccaaagttctgggattacaggcgtgagccaccacacccggcctgtactgtattctcaatattaattttgacataaggaaacagaaaatggaaagatcaattaaattgcacagtttcacagagactaggctgtatattggatcaaggcaatctagtacagagtttgtgtttctatccattatttacagaatgtcaactacatgaaatgttgcatgtaagtaggatgaggactgataactgacttaccgcttttgcactggagactttgatgagagctctttcagtgaagtagttgctatgataacttgattggaatctgtacaaaagagaatgagagggaggaattacagagagagatgtacaatttgtatgtgtcaattaaaaaaagagatagcaaatataggcaggtctttctaggagtgttactaacatagttacactccactatctttagttcttttattggttaactttgtacctttatataatggaataacatctttatttctttttcaatcacctgtagagtatcttttggtattcgattttgtaaaacctggatattaaaactacggtttggttctcctccatccactaacaatttccaatctctgttatcggcacttttatttttttgttaccaatgttcatatgattaatctattttgtacaggtagctgattcttccatgcttttagtataggttgattccaaaagttgaaaatcaataagagtgtttagataggagatatatatatacacacacacacacacacacgcgcacacacacacacacacacacacacacactctcttcagaatcaagtaatatactctgattcttccctagttaaggcctatctgaaaatctgaaagtctggtaaaagttgatacttgtttgaattgatgcataaaatagtagataatttgaattagggccagagctcattttatgatagtttggggagatcagtccaagtaaacaaaggatcactgtatgccagttagtaaaaaatgccttttttacgggattatccagttattatagtttaaaatgctttttatgttcagatcgttggttttggtttagttttgtttgtaaaaaaaaaattcttagttttacttttcttaactaagtcagaatcagttaaacttgattttctaggtataaaataaaaacgtcataattgtcttttatctttccaaaagaactgtgagaatataaatacatttgaaagtatgagattaactcttaatttaagaacttaagacacactttttgccataaatatgtagataacaacaatggtgagccattatttgtcctatgaaatattttttaagatgtgaagtgttattataatacagctgtgactcatgataactaatttgtgattaatttatttaaaattttataacaggacattttgacggcctagttagatattttctatcaaacactagaaatttgattctaaccacaggtactacgtatttgacatgtatgagccactttcttctcaaatagagcactgattatatatgtaattatttcatttgccattttatactatatgaaattatttattaatcttttctactaaagactaacatcaaaaagttaacatttattaaaaattttcaaaaattttcaaaacttattaaagtcaatagctattgaatttattcatctgttttctactaaaaactaacctcatctcaattttttgaggttagtctttataaaaaagcagattaataaagtcaatatttataattttgaataaatttttaaaattataattaataaagtcagtaactattaacttttcataatcccttttctatgcttctacttctgaccatcccaaatgcccctgtctttctgattgatctctcagtctaataagatataaaacaaaataacgattgactgtattcattacaattttcaatatggagtaaaattacatctcaatacattcagagcttcagcctcaaaatgttgaggttagttttcactagaaaacatattaataattatggaccttttttccattataagtcagtaatttttcaaattacttataatttttcaaatttcaaatttgaaaaattactgacataataaaaactgcaactgtctcaaaaatcataattgtctgggcatgatagctcatgcctgtaatcccagaactttgagaggccaaggcaggagatcacctgaggtcaggagttccagaccagcctggtcaacactgtgagacctactctctacaaaaaatacaatacaaaaaaaaaaaaaaaagttagccagaagtggtggtgtgtgcctgctgtcctggttacttgggaggttgaggtgggaggatggcttgaaactaagacgtcaaggctgcagtgagccataattgcaccactacattccagcctggtcacagagattcctcctctgaaatatatatatagaaaaaaatacactaaaaataaaaaagctataatgattatgtcagaatgatcattagattatttttctgtagccaagtctacatggaaaatcaggagataacttggtgagcatggaattagatttaggggatttgcatgtttcagtaacttatcttgcttatgagactttaaccattagtcaagggcacactttcaacatacacctctttatgtgcccttttctatgcttctacttctgaccaccccaagtgcctccctctttctgactgatctctcagtctcataagatgtgaaacgaaaaaaaaaaaagaaaaaaaaaaaaaagccttctctttctgctgtgtggcaggctctagaacaacgctcacccatcagagatgttttgtgaccccagtcactgcttactaatattgttactgaaatgccagagatttggtctaggtcctgctgtgtgctacacagaaagccacttactgagagaacgagtattgccagagaaaaaggctttaactgggtgctgcagctgaggagaagggataccagtctcaaatccaactaaaattaggggtttatatggcaaggaagaaatgtaactatgtgtgggaaaacaggaatgagggagggataaggaagaggagttggtcaacaggaagcaggtggtcagttaagcaatcatgacagatgaggggcttggcgtcttattgtccagatataattatctgataagtttcagttccttgacactatttgggttgcctgatggttggtttcccaagaaaaaaacccagataagacaaccgtaagtttctcaagttttaagactggaggggtcaatttctatgtttattcaaaagaaaccataaacgtcagttctatgggacaattgggctggtttgattatgattgtattgatgattatattttctttgcattaaatggagagcagcccaattataaggacttgatagactagattttctcacaaatcttcacatactttatagatattcatcttttaaatgtaataaaagttattttcctgaacatatgtattaagaaataatttaacatattttatgatgactacaatgctttttaagtatttagaagtattaaataatctgatttttcactgatctgtgtggtctttgcctaagttagtttaaatttttagtttgacaaaataactttttctaccagtattcaagttccaatttttttaaggtggttgcattcaaatgaacttttggaatgaagctctgaatgtattgagatgtaattttactccaaactaaaaattgaaaatgggaaacatccacagaacagcattgtagcgtagtactttgagctatgtgtaagtaacagcattgtggaaaatctaatttatggtgatattgtaaaagaaatatgagcctcatttcctgaattctcctttatcttgaagtttgacattcctaaaagagcaagagactttgatgctgtaatatcttacacaggcctctccctctttagttactgttttgagatcccacaaaagcagaccatgcaggtggccttattaactgcctgtggaaatttaagataagacagaggttataacatattttcataccgtatttcactaaaaggataagttatcacagtaacctgtcccaaatgcaattcagatgatatttcagccacccggttactaaaaagaaacacatgtggataaaagctgtttctgacttatttatggattaggcaataactgttttcagtgaactcttagcaaaaggagaacgtattttatgatatactctgcagtgaggacactttttgcaaaatgcctttaatattttttaaggaccacatatagttttgaggtactaaagatatatttgcagaagtggctaaatatctctctctttcttagtgctaatagcatgttagttatcattttatagcagttcacaaggatcctgcagaagtctttatactaaagaaagaatttggtttaaggagctctttaaatcttaattctgaatatatggtttcatttctatcccaagcaatcataggacacataaagaaatttatttccatctatctcagtcttaaaaacccttagtgaatgtatttaactgtctttaaagtttgttcttttgtctaaaattccttagcattaaactttaaaaaatatatttaattatagtatatcttgggtactttattcccgattttttttctcaagccattttcagtgaatttgaaaggaaataatttctgtctttttaacataatactgtattatagaagaaaaaattgggaggtaaaaattgcctactaaaactcaaacccaagaaatgccttattttatactctgagttttgtttctttatattcctctttgtttccttgtgaatggtgcttttagaagaaacaaatgtgatatcataattaggcatgcttttttctttctttgggaatcaagagtactacatgtctcactatatacggattctgaatagggatttcttctcttgtgatatgtttatgtgactccaagactgagggtaaatagatagggccagaaacaaggatgattctaaaatgattttctataaaatttcttaatatagatgaagagttataaaaactgatgtaatgtcaaagattgtctttacattctgttttgctttgataaatatagtttattcaactacttttatatcaaatacatctatttaaaaattactgttttctacttgatttttatgttttgatgaaccagccactgtctacttgggcagagccaatgcataacatatggcttatagagtactcttatagagtacctaaatatttaagcagatggcttaatagacatgttaattaattcaacaaagcacaagttgctcagtgatcaaagttagagggaagggcacatatgaagggactgacgaaggaaatgccatttcacattcaggaaatgagttatttggctgaggagaaagttaaagtagaaatgggttctgggtatctattgctgctttacaaaagcatcccacaatctaatggcacaaaacagtaaccattttacgatgctcatggattttgtaagccaaagaatcagacgaggcataaagagaatggcttgtccttgttccactatgtccagggcatgcaatggagaaggatggaatggcggggatgtcacaaactggtgagagacagaatatctgtggttaaagaatccacttccaagatgacttcttcactcacaggtctagcagcttaactgaaattcacacggccactccagcatggcagccttagtggtatcatacttctcacatggtagctctagtggttaaagcagcttcaagcccactcagactctaagagatgggtggatagcacaaagatctcacttctcaatggaaggatgatcaatgaatttatcgtatccctgtgttaaaattgtcatagcatataatgagagagaagactggagaaataggcagaggtcagtttgtggaagttgtgaactctatgcctaggagctgggacttatttgctaaatgtaaagtaaaattgctttgagaaatttttaccagaggaaaaatgagactatttataacttagaaatattgccctggtgacagggtagagaaagatgtgctttgggcaggggaatagggatggaccctgctctggtggcaagagaatgaacagtttaatgcttgcagatctgaaagttggactggaacaatgaatttggtgactgattggaagtaagggtaaaagacaatcatcacgtctctactttcattgatgaattgaaatatcatgtatttcagtaagacagaaaatataatatgatagtggaaacagatgggaggaaggaggcagagagaaaaaaagtttagctttggccttcgtaggtttaagattttaatggaactttggtgactagtatgtggctccggagcctaggagagaagccagagccagagatatggacctgggaacattagcttagctatgttttattgattgaaacaatagaaatggaagaaatagctcaggaaaaaagtataaaagtaggggaaagaaaggagagctcaacacaaaactctggggaccacaaacaattacaggtgaagtgaggaaacaaggagaatgagagaatgttctttttgttttgcaatgtactgagttatggtaactttttgctaagttcttaagtgtaaattgtttttctattgagaagtacttcgtcttctgagacattttgttcttgtctttcaaattattcctggaatctagatacaaatgaaatacaaaactctggttgaaatattaaattaactatattgaacatatattcatctaatcactgcaacacaaaacaaaacactaagtcctgaacttaagacacttttggattctgtgcagtgttgagatttatgttttgaaaggctcaccctgtgtgtgttgttttgggaatgctggttctttggtgtcttattgggacagtttctaatgatttcttactgggctaagtcctgtgggacttatgttgttgactttgggaaacaagaataatgaataatatccataaaattttgaaggagaataagacctaattgtatttgatttcaaggaatcacagtcccaaagtaattttaaactgagagaccaagagccacagttaaaagctcagccattgtcctgaaagagccatgcttatgtgctttcaagtaagaataacgtaacatcaaaagtggtaagtgagaaccaagggatgtggtattaggaagacttccaagtgcaggtgtgcagggtaatagcggctaaaattcacacaggattcattagaatatttacagtgcctccagagactgtcaagtatgcattttttttttttttttacctgttatagcacttatctttaccagacacccttctaagtgatctgcaatttggtcctcataaaagcctttaggtagatgtcatcctcatttaacagatgagaaactaggcacagaaagcagttgagctgagatgtgggtagggcagctggctgtagattccttgctattaaccaatgtattcgatgtttactactggcatttcaacatattaattcacagaagataaataatgtcatctatcatttcttcacatctgcaaaatgcttttgtttctctttccaaacttgaatttgatttccattaaatataaaattataggttttttgttttttttttcgagacggagtctcgctctgtcacccatgctggagtgcagaggtgtgatctcagctcactgcaactcccacctcctgggttcaagcgattctcctgcctcagcctcccaagtagctgggattactggcacatgccaccacgttcagctaattttttgtatttttagtacagacagggtttcaacgtgttagccaggatggtcttaatctcctgacctcgtgatccagccacctaggcctcccaaagtgctgggattacaggcgtgagccaccgcgcccagcctatactttttatgaagaatattagttagtatacatggttttaggggttataattctccgaatgaaacagtaacctctgtgggctttaaccaaatttttccaaattaaatctttctgacacagtgccagtacatcggaggtggtcaataaaagtcttttcaatgattaattaattggacaattgcataaatcaatcttcatgtttgtcagaataacgagaacactgaactaagtttagtttctcaatatctatgtctatgtgccactttgaaaaccttaggaatgtgaagctgctttcttatttattcattaattcagtatccaaaagtatttatatactttataagttaatctttagaataacatcagtgatggctcttcactgtcaatactctaaaggtgggattagtcacttctgaatatccattttcccagggtttctatttctttctctactttttttttttgtatgtagacataattgaattggaattttcttttcatacactacacgagcgatgttcaacctcattttcccacactcctttctatgtaactttattgtacgtagaacaactcaaattagaggcccaggatttgtcttagattcttccctttctttcaattcctgtgtccactattttaacttattttaatcatttacttctatttcctgtgcctctgtcttcattcaggcctatataaaatcctgcctgaattttagccatgatttcctatttgatctgttttcagccttgttaacatctcccaacctcatttcttcctcactcttacatatctaaggaaagatctatctaatctgagaaattagtatttcttccgaaattaaatttttttggtagtctcccatgcaatcagaataaataccaaattccttagcaaattgttgtggctttctagattctcacttggaaaaaaactagatgttaaaatattatttttagggctgggcgcggtggctcatgcctgtaatcccagcactttgggaggccaaggcgggtggatcacttgaggtcaggagtttgagactagtctagccaacatggtaaaaccccatctctactaaaaatacaaaagtcagccaggtgtggtggcacgcacccgtaatctaagctacttgggaggctgaggcaggagaatcgcttgaacctgagaggtggaggttgcagtgagccgagatcgtgccactgcactcctgcctgggcgacagagcaaaactccatctcaaataataataataatatttgtagaatgaataagaaaattaaaaatatttataattaccacaataaataagcataagttgaaacaattcaaataccaacttcctcagttgagattttttggaagaagcttgatagaatccaaagagctaaagtcgatacattatatgaggttgaggtattaggttttggtgatttatagaattctgtatgtgtattatgttgaagcaaatttgattcttgaggttgaaaactaaaactaaggaatgaggtcatatatacatatatatgaccacattttgcatggaagtctgctgttaaaataactataacataaatagaatagtctacaaacatcttacatgaaattattaaaattttcttagctgtgtattgatgaaggcatagagaggagatacaaatacattttaactctcattctaattcctgttgaacaataagggctgtttgaatcctttgcaaggattatgaggctaccataggaattagtagaaaaaaaatgttccatgattgattagtgatgtctgtaatggatgtgggagtggctaattataaattatgttccacatttattagccctgaataaaacattgctaaaaattttaaatgataatatttgcttgtaagactatgagaatagttgcttaaatactataattattttaacctttaaaattgttttgtttactcttgatttctatgtaaagtagattgaagtttttaaatattatttctctgtcaaatggtatattttgaaattagatttgtttgatacttgaagagatcatattctgtatacagattctataatatcttggaaatcttcacaaatctatggagcaataaaaatacttcaattgatatttgatacagacaatatggtacaagagaacggagtacagcttatggaatgttaacaaatttaagttcaaatttcagcactttaatttacaaaatgtataaaatgcacatgagttaacattaaaagacttaattttcatatttgtcagttggttgtatagtataacctttgcaggactgttgtgaggattgagtaagataaattgctgccagttattaaggatgtaataatgactagtgtctttctgttccctcctttaacatacttctgataattctattcttggaacaatttcccttgtttagaaggtagagatataacatgccatcatttgaaaatgccacccagtaaatgtcaatcaattgtttagttactgaacacataccagccccattataggaactaagaatgaaaaaaaaaattaacataacataattcctgccctggagaacaacgcagtctgtttaggagacagatacttaacctgattaattactgcaccatcaagatacagtattcaagacatatcgagatattcagagaggggattctgaagtttaggattgagattggggtttgaaatatacatttgctatacaagaaggaaggagtcgattatatctgggattataatttttagaatatttatggtaacagcgtaaaattttgtgggtggtgacagtgagtgaacctgtatttgggaagcagtagtaatagctgcagatgtggctgttgtgtcaggaacgctaaaatgatgaagtctgtaagaaggaggctgctgacatctaaagaggcatggcttgagattttggaatatgctgtttgactttagaaactgtgagtattctccttccaaggagacatctgtggatattctgtagcacacagtatctccaatgttattatgcataggaatcacctgcggattctgtttaaatgaagattcaaattcagtaagtctgagatgggatctgaggttctatatttctaacaagccccaggtgatgtcagtgttgttggtctacagaccacattttgagtagtgaggctgtagtgattagtaaaaatgtgtaaccacagattcggccctgtttaccttaaaaagctttctttccttacaataaatggattttataactccacatgaggatttacactgaagctgaaataggaagctctggcagtttggatcctgctgtgttttgatcaccagatgaattccatactttaaaaatagttgactgtgtatagttttctcttcttcccttccatgcttgagaaaaataaaaagcagccccttgatattccagtttactagaaagatgatcacatacttcttttagtaggatccacaatgagcctcaaaatgtttacttcttttgtgcttctgtttctgacatcttttgcccaccataaacagtaggagcctgatcatacaggatttcagaaaaaaatgcactcttcaattcagacatctaaaaacccttattttactgcttttctgactcagtttattttcccccattgcctgagagctgtgtctacatgtcacctgtgtctgttttactaggactcggcaagttggctgtgcttactcacctggtttgttactaatatgttataaacttgaaacctgggaaatggtattacaagcactgtggaggataaaatgcttttctgctgtccagtgaggcatagacaataatgttaagaaaaataaaggagctattgagaaagattttgagttacatcaaacaagtaatgagagaaatggggagagattgatcatgtgaaaatttgaaagaaaaataatgagagaaaagtagaggcatattgaaccacaagatttgatatttctgtcctccctctattactagtgatttttaagattacagtaatagcttattttttagataacattgcaaacgttcaactaagcctttcttgctctcttttagacctcttttcaggtgaaaagacaaaaacaaggagaggcaacagacgtttaagagtagtagaaggacataaaaacgggatggcagtaatactataattagaaccagcaattaacaaatgtctcactaacttacacatacatacgtgtgtacagtgcctttacctttgcatggtatttcataaacattaggtattaggccaaaccaaactgtttgcccattgggcttcctatggaagctaaagagctagctaaaaccaaccaaccaaccaaacaaacaaacaaacaaaaataaattggtcttccaaggagtccaagttcttgatctataaacatctgagagtggtagacacttatgtagcaacaggccagtgacttttgactaggtgcctcttagaaatgcagctggtacaatgtattctgttagtagttgagatcatgaaaaataaaggacaaaaatcatgaaattgataagaccagtgggttaattggtgaaataacatttattctctatactggaaaatagatccatggaatggtgaagttgccttataaataaatcaaacataaagaatattctttttgacatactaagcatttgtggcagttatacttggcagataaattactttctaaagggtaatataaataagaatagttcttattctgcttttttaaaacatactaaattccatttaaatttctcatggacccatcaatctgacttaagcattatcacctcacaatttaccttttttaaaatgagtatccaaccattccaagctcctaattccactattgattatttcaaatcagctattcacctcaatttatttaaaacaaattaagtatatatctgtgaaagatagagtttatttttaatatgcttccaatgttattcaaacaccaggggtttagtctaggtcctgctctctgttgcacagaaagccaatcactaaaataacaagaattgcctagggagaaggctttactcagttgctgcagctgacaagaatgggagatcagtctcaaattcacctccccaattaactaaaactgggggtttatatagtggggaaggcatgtggctacatgcagaaaagcaggaattagggaaaggtaaggaagaaaagttggtcaacaggaaataggtcatctgttaggaaaacaggaattagcaatgagtaagaaagtaatcctgacaaatgaaggacctggcatctcattgtctagttgtggcaatctggtaagtttcagttcattgatactatctaagaggcctgatggtcagtttcctgagaaaaggaactcagataaaacaaatgtaagtttctcagattttaaaactgtgaggatcaatttctatgtttattcaaaagaaactataacatcagttttatgggacatttaggccagtttcaacaattcaaaataattatcacactttaaaaattaatattaattgcttagtttcatttaacatccttgtgttaaaattttctcattttctcataaagtttaacagttgtttatttgagtcagaattcaaataagcttctgtacattacaattggttttaagttcttataagactctataggttttcccttcataatttttcttgcaatttatttgttaaagaaattgggtcatttgtcctattgagtgctccactgtctgtttttattattgtatttctgtaatatagatctttgaaaaattgtctctattaattgtgttaataatacacttgctgttacaacacttatggtgctggtttggtgacacatgacatattacattttcaaaatgtattagttttattgtttatttatttttttattttttctgagagagtctcactctgtcgcccaggctggagtgcaatggtgctatcttggctcactgcaacctccgcctcctgggttcaagcaattctcctgcctcagcctccaaagtagctgggattacaggcacgcaccaccaggtctggctaatttttgtatttttagtagagatggggtttcaccatgttggccaggctggtctcaaaatcctgaccacgtgatctacctgcctcagactcccaaagtgctgtgattaccgatgtgagccactgcgcccagcctagttttattttttaagagacaagagtaggcaaatttccaatatctatgatagtattggtacatttgatgaagagattgctttgaagaaatttcattatgtttatacatttaaataactaaagttaaattaaatgttttcattacataaaagggtacaaagcatagttatgaaagcttagagatttaatatgtgtctagaaggtgataaaatgttgcatagacttggtgtaatttaaggtgatacttgaaaaatggttagaatttggtataatagacacaggtagggggtattcccataggagttatagcatgagtaaaggcacagaaaaatagaaaagtacaagtgagataaaaacccctcttgtcttttatcctgtgacaaagatagtagaacataaacacagaaacataagaatattttataaggcttggtgcagtgtctcacacttgtaatcccagcactttgggaggccgaggtgagcggatcaagaggtcaggagtttgagaccatcttggccaacatggcgaaacactgcctctactaaaaatacaaaaagtagccagatgtggtggcgggtgcctgtaatcccagctacttgggaggctgaggcaagagaactgcttgaacccaggaggtggaggttgcagtgagccgagattacgccactgcactgggtgacagcaagactccatctcaaaaaaaaaaacgaatattttataaaggatcttgaatatcaaaatttactttgagtcttcactaatcagctgcatgttttagaaaatttattgtatgtctttgacctttgcttccttcacctataatttcacttatctatttgagaataatatcaagacacaagcctagatacattcatttcaattcaaatattcgattctgaagtatgaattagataagcaatacaacatttgaatttctctaggtcagaggtatcgtgggaagtattcaaggcttgagttagcatgataaacatcggaattgatggaaaacataggtacaaatggaattatagatatttaattagtatgactaggtattgatttctcctctgtaataattgaaagggaaatggaaagagtcagctgttgagattttcagcctatattattaggaaaattgtggtcctctggatagaaataaagaaatttaagtaaggagtttattgagagctggagaataaaagaaggagaatggagagtttgatgtggtgagtttgaagctcacgtaaatggacaagtctttcattcagttggtgccgatggatgggaatatgaacagaggttaatttaaggagtagaatattagtttaaatcttagtagcaagtgaattactaagtaaacaatgcataaaatatttgaggaaagaggatatactcttgagggaaaaataccatgcctttaagagatgtggaaacaagcaccccaaaaaggaaagagaaaatgggacaaaaatgatggtgaactaattgggtcagcttactggaatgccataatgcctggtctatgaataggagaggctcaaaaagaggcagggaccaacatggtcaaatacaaagactttagaacacagtgagcattgaagaaaacaagatagcagcttcaccagtgcaagaaagcagaacagaagctgcctttcaagggattacagtgagagggtttggtgtaagaattcaggttcaaagtacagtatccttatataataattcagaaaacacacatggaccataaaatgaaattgattttggccaaatcattcaaactttatggactttgttgtttatccagttctgtgctaagatttatattatggcacgtctttaaaataatgaggtggggggaccagtaaggtggcttcaactcactaaaagaaaatatattgtttcattgtcatctattttgctaatatttgtgttcaatttagagaaagtagggtagacatagtggtaaacagttctcttactcttgaattgacaagtagactgagaatttcacaaaaggcttttcctcactttgagtgtttttattctttaattttcaaaatgctatttcactgaattgagacagtttggtttttatttctgaattactttctgatattattattactgaggtagtttagctagttgtggccagttgttttggtgctcagtgtagttagaatacagattgcattatacacaaataacaatttatcacatgccaaatgtgctctgtgaatctgaaaagctccctctatatgagggtatatttccctcaagccaggcaattttaaggacctgcaagctcccaccaccaactagctcagtgtagtaaaagttaatttagtaaacacatcatcatcctaagtaatcctttccttgactaaaataccctctgcttggcagagaagcaattggatcaactacatcaggactccaagtgatcccaccctgattccaacacccccatgttgttcttgtttccttggaggccttgaaaactgtgcatgcacagcaaccggattcatgtcgagccattccaattcatctgagaagcgattctccacttaggcatcaacccatgaccatcacagggtgtgtgcacatgtcctgggtttatcaggtctaactatatctttcagaatactgattccagaactcttaggtaacgcagagatcagttgaacttaatgtataaatgtgcattttatatataaaatattgctcttcaaaatttggcttaaatcatgctttcttgtgtgcctttgaacaaagattttgatttaaaaaatcattgagaaatgtaattcaagaatgcccagaaattgtcattagtatttgttaagttgtttatgaagaacttaagcccactttaatttctgtttttatatagatcttccccaagacaaaacatcttttattgacttccttgaaaacaatttagtactagagatcagcaataacttattagacagaaaccagattatttaatcatttggctttcgaaataatatttagattgaaaaaagcaaattagaagagtttactaaaggaactaatgactgtcatctcatactcttcttttacattttaaactttttaagaaaatgatctttcatcatgtcagtgaaactttagtttccctgaagtttcacagtcatttacaaggttgaatttttttatatgatgaaataatagtatttttaaaatattaataatattacatggccataattgtaaagtcagtgataacacattttatgacaaggtgtgcactgcattatttcatagtacattcataatcaaaggtcatgttggacatacaacattaccataattttctaattaatttgttctttatacatgtttatacgtgttccaattgcatttcattaattcatagttttcttgtaagtttgtgctttccttccatgttcaaagaatctctttaattcaatttctctgtttctcctcatacagtctggcagccagatatgcaactcagtctaatcacagtggaattgcaaccagtcaaaaaaagcctactaggtcagttaatattctctaatttattgcttattagtgatatgcaaataaatacccagtgatattttgtcctatcttttttttttaatgatgcacttctgaatgagaagtttagagcactaaatttttccaggaagattttcacacatagcctcagggatgagcatgtttgtactagataattaaatgggttttggcatcttttttagttttgtgatatgtagtgctataactgggcttaagtctaggttctaggtttagaatcaatcaaggaaaccattactttgaatgcccaattccttccaagtcacataatctggaagttatacaacaaaattgtaattgctttttgagatgggcatgcattaattattgcacattttaatggagatttgaaaaacattggcagattttagtggggaagttagtaccaggtcagtctggactgttcttctatctataatagtttaatttttttgcttctttatgacacaggtataataaagacagcctgttatagtaaatgatagtgcgttatatactgtttggaaaataatgacctataaaaatgttttgaaagagtttgattttttaaaagtgttaagttgctgaaggcatgatggtagcatggaacagctgaataaaaccacagcaaaagagttttatacctctgattagtatgtgatcctttgtgtcatctcactcactggggaagtatccagcagtggtttattcattactgttccattgatgaatcatattatgaagtgtttgaccacaaagactgcgtctgatgctttgacttgaggtaggtgtctttccccttgccttggctttctaagttatattcatttccagagtagccaaaataattctcgaaagacaaattttaaaaggtatttaattaaaaactagaataaatgatataaattatgatgggtaaggaacagtcacctgccatgcacaatgagcatttttattactccttctaagacttgggcatgtaaaatatttttaagtactgtattttgatagatctctctccctctctctctctcctctctgcttcatctcatttccctttttattactttgatgaataatctgaaggcctgctctgcctgcctgtcaaattagggtaatgagaagagcaaatgtatttttacatttgttttaatttgttcttctaaggactgaagatcatttgacttcatgggttgcagtaaagattaaaatgtattttaattattttctgaaactggtcaatttgcattacaagcagggcaagttttgtgataaaatttgtttatgtgtgtgagtttggaatgaactttctaagtctatgcctatgtctacagaaatagttctcagatttattatgattaggacacttggccaaattcattagttgggttccttcaacagagtgcaatcactggtcctgtaaattcctagcatctgtcgttattatgctgtacttacaaacccttgtagattctcttaagcaaaagttaaatgctggaatcatttggaaaatattctaatattttgtatgacacaatgtccaattagcaaaatagctaaagggaccaattatcagccatatatatttaaacattaaaatataattcacattttgaagctattaaccgttctaagaaatcaacagttttgtttttaagttagtatttgttttttttcctgatattcactctattttataatgactgttactattataaaagcacttatatttcctgaaggtggtttgattttctaatattctgtgaaaatgatatagtctagtagtattataaaggtgaattaaatgttgagcatgtaacaactggattgtgaaattttggtatatcggatactaatatgagagacattaataatctttgctttaaaattttataagatgattataaaaaatagtgctatatttgtagattttgaattcttgttttcctttcaaataaaaaatttcagagtagtacacagtgacattcacatggtggcagcaaatactaaacaaaactttcaatatcatattttctaaatagatcttagactgtcagtattagttcttggccagacacggtggctcacgcctgtaatcccaacactttgggaggctgaggtgggatcacttgaggtcaggagttcaagaccagcctagccaacacagggaaaccccgtctctatcaaaatacaaagatgagccgggcatgatagcaagtgcctgtaattgtagctactcagaggctgaggcaggagaatcgcttgaaccctggaggcaaaggttgcagtgggctgagattgtgccactgcactctagcctgggcgacagagtgacaccctgtctcaaaaaaaaaaaaaaaaaaaaaaaagaatgtcaatattagttcttcacttctagttcttaatttatagattaaatatacctatagaatatatgtcagtagtataaaatcaaaatctagtaattgcacattttaggcacaatccattacataatcggtcattgaaattttaaagtggaaattgtttaagagtgaaatgaatgatcgaaactgatattttagttcaaataaagcagcagtaagttactacctccagtcaaaccacctctaattataagatagtctgttcatatttcctcatatcctgtccttcatacacaaagagtagctaaagctattgtcactacatgtaagcatattttaaattgtcatccagctaacagtgattttcttctgagatctgcatcctttcttgtcacgtctcctctgtgatcagttggccaaacttgtgagacaaccagctaagtctggatgcttatttttggcaagaaaatgaaaaaggttttttgtggggcagaccagtgaaatataatttaactcatgacctgggtcttggtaccatgttttcattagtgtagctaagtaacttagatactcagtgagcattagctattccttcttgttcagtaactttcttgtgattaatatccaagcaaacttactatataactacctacaataaaaacaaatgccttacacattgaaaagaacagcttaataactgaaatagctgaggaatatgctgagaacataaagttaagtgttattgtttcctttacttttcacataattgttacagtacttttaaggcaaagttttattcatcagggatggggtgagtatgacttttttagttaagatttattttaattattgtatattattacaattttggagggacatgttcattgaaaagggaaacaagatttttctgaagatctgcaacattgtgcttagctatttatttgtcacatctatcaccattttctgctaaatagattttagaacatcatatgttgtaaatttctgactttcagcacctcctgcttcttacctttttgtaatgtacaataatgatgtaatttttcttatactatttcaggcttccagggccctctagggtgcctgctgcaggaagcagcagcaaggtccagggagcctctaatttaaataggagaagtcagagctttaacagcattgacaaaaacaagcctccaaattatgcaaatggaaacgaaaaaggtaagtgtttgttacatcattatgacacaagtccaacatgagtcttgtgaattgcatgctaaatctaatatttgagcagcgtaacaactttgggcctagagatgttatcagtggagtttctttatgtttcctaactgtcccctcctgactgccagctttcttatctgaagaacattttaaacaaataaactcattcattttaaagtagttagttatatatgcaagtacaaatactgtttctcaaaaacaggtccttccaaatgcatgtaaatcacattttcttatgtctttttatgtttttgaaaatgtatcctgaaatcataaagccatattgaatttatctgaatccttaacttcagttaaggtaagagccataagtgtttttgacaattaaggttggagcatcaaaatttgaaacataattacagtaggtttttatctttgcaagcagcagatcccagagatattatgacctcagttttccccaaaagacaaattattcatatttgttttgttttcttgaattagtgcataatataaatatcaaatcacaaaatcaaggacattaaatgaaagtgtctgttaaaggcatattataaatgaatcataagccacacagttctctgtgatgtacgaagtgggcatttaaagaggtgctgatttgatgcttgtcactgagtagcagagaggacggggatgagtatgtgtagtttacacctcaatcatgaggaagtgaagaacttgtgctgttataagtagtatggctgtgtgaggaactagggtgttctgctggattttgaggaagtattttcaaatcaatagaacttcaaacttttcttcagagtgttgggctctacatggaaaaacacatgaaattaaaaagtggcacaaatgtttagttagtagaacatctggctaattgggatcaaataattcaaccatgtgggaacgtttttgctcaaaatagataattgtgaattgtttcatataggcaaatgattagacaacttcctcttcctcaaatgtgaacggacagatgtgatctagaagcaagacactcttttgtgtaaatattccctttggcctaaagcaaaagtggacagactttaaacacctgagagcagagcagtgtgtgttaagattgcaatatcttaagctcttgagttaaatggaaaatgaaaaacaaaagtgtatatttggaagttaggaatgttttctttaaaatataaaataaaattttagatttaagatcacaagaaatattactgaagacttatactcttcctggggctaagggaggtgacagtcgctcatcagaaaaaaaaaaatgccctcatttcctaacttttctaaaaaatataatacaagttcaggctaatacttcctgtatatgtgggaaatttctaggggaagctaacaggcttagaaataaagatgtgttaaatagactaccaaagtgtccaattaagcaacacgataccaccgttattgatattctagcaagaaattactagcaatgtttgtaaatagacttagaaatgcatttgatgaattaacacttttatatcttaatttatctgaatttttctgtaatgtgaaaatgttttatttaacttatttctggcatctattagtaaaattctgatgatatacaagcattaatatttttccatggccactcaattcatacataccttccctatctatgcttagaaggcagtgcaaaattagatagtagcaatattgattataaccacaaggtggagacagatgtcgtgtaatatgcagtctgctcatataaagcacattttcttagacaagagttttcatacgatataataaagacatctggaatttgtcttgtatgcaatatgaaatttgctattaaacgtggagttaaaactttatgtcaatagatccaataacaatgttcataaattaatcattatgtcatgctgtatttccaaaatactatcttaaattataagagcaaacgaggtaataatatattacacttaaaacattttttttttttttttttttttgagacggagtctcactctgtcgcccaggctggagtgcaggggcgcgatctcggctcactgcaagctccgcctcccgggttcacgccattcacctgcctcagcctcccgagtagctgggactacaggcgcccgccaccacgcccggctaattttttgtatttttagtagagacggggtttcaccgtgttagccaggatggtctcgatctcctgacctcgtgatccgcccgcctcggcctcccaaagtgctgggattacaggcgtgagccaccgcgcccggccaaaacattttttaaacatacaaaaaattagcctggcatggtggcgggcgcctgtagtcccagctactcaggaggctgaggcaggagaatggcgtgaacctgggaggcggagcttgcagtgagccaagatcgcgccactgcactccagcctgggcgacagagcgagactgggtctaaaaaaaaaaaaaaattataagttattctatatccaaatggtacattttttaataaagatgtttgttttaactttttgaatatgaagatttctagttctagaataatgtttataaaaatatacaaatccatctggtgatgagttgacctctatcacaactagtttgcatatataacttgggtgtgaccaagcaaggtgagagttaagaacttttaaaacttactgtattatattgatagaactcagaaagtactaacttgaatattattattctaattgcttttcccttttagttattaaaaataagaatacttaaattaataacaagatcttttactggcaggattaaccaaattatctgtaatgtgttcctcgaatgcttttaagtggaaatatactttatacattctttaacaactctgagaggatgagttacataaatcagttcaggaatctatagaatctgtaatacatagtaaaggtttattcacaattaaaacaatttcacttctatattaaaaaaacaaattgttgaaagtacagtggcttttcatatgtatgatttgtaaaacaaattagcttttttaaagtgatgtgacgcttaatgagaagaaatcagtagagaattacaaactgcacttcaaaagatacatctaatatcattttaataatgaaatttgaaaaaatagtgtgctcgttttacagtctcattaaatgaattaaaatatcagcacacattgtagtaggttatcattggcagagaaggctgaaatagaaacgttacaatgggatgcactgccatctgaacattatgtcgaagtggaacgcggaaacatatttctcagaacaagtggtaaaatgaaaacagcatcatttgtaaagcatttcttttgagagtgcttcagtttcttctcctgatgacctgccattcagaaactgacaatgaataatacactctgacaccagcatttgtcaatttgcccagaaccatatgagagtactctagacagatatatgttccgaagtaaaccaaatacctgttaactgtaaatcaaatcttgtagaaaccatgccatggttcctttggacatatactttgcatgcctgaagcaagttaccttaagaaatcattcttttgttttacaaaacttgtattaaaaaattaaaaatgcaaaaaagcttaatattattaggaatttatccatagctttatttggaatccagtttctttattatgatctataaacatgcatcatttgatggagttccttagtggagaggtgtttttccatgttgctaagaaacatgccccagcaccagaagggatactacctaccatctttttgccatttctcaccgtgattcttacattgtacctgtttactcactgaacagggcttccttctctttgtctagattctaatcaggtgtcttctggtgtggaagctttggcttttatttacacacaacacagaattaataagatagatgccaaggatttagcaacattttaattcaacattatacaggtatcagagttaatgagaattatgcattagtctttaaatttgggcagcttattcagctaaaacatagatgtctagctcttaaacactttgtttttttaattactctgaaattacaataaagtcaaagaactgaactgttttcttttcaagccagtgcaaatgtgctttagttattattttactggtgatctaattatgcattttaatgctttattacttaatacttatataagcctaaaatacgttgttaatgtcataatttcagggattttagtattctttccatgagttaccataactaggtgcatatgtgtaaatatatgtatatatctatatctatatatttatatctatgtatatatcaatttataagactaaatagacttggccatatgtgttgttggtttatgcatacatgcacaaatattgaggtgtccacaaagtatatatgcctgtacataaattacatactggctggtgagtgaatgtaagcttctctaaattgtacaactctccacagagtggcactctaatattgcaaaggtacaatataagcatgtgcagaatgaacagctcttctaggatccctataaaactccaccccatgtttctgttgagtcactataaaattgatgactgaggcaatacacgagcaattatttatgcaaagcagtgtgaggaggtgcatgaggatccacttaataccaagacatatttagatttgactgccacttttcttcaacttaatttttttaaagcatttggtatgttgttgtggaattaaagtcctaattatttatcaaaataagtggcatagccacattgtttaatcattttcctctttccaccacgatctgtgatgcttaaagtatcctatattcagcagggaccatctatatcactgagcacaatgcctgccatgcaggaaatacttcagaaatgaatggtgcttttgtcatcatttttgttgtcacttattatatttcagagttggaacctagtttacttttgtcaaagcaacgcactattcagtgaggaaaaagagataagcgattaagaatcatctctatgtcctttctcagactgataccactcttggtaacatggtgctaactctacagctaactgaggttccagagagaaatgtcccactataaactttccatatgcctgttgtgactgccacatttacatccatgtattaattttagaacttggttggcattgttcccaagtcatcaatattgtttatttacaagatgagataactagacattagttctgtgaatttagatgttttgcaagtgtgaacgaatatctattctcacatcaactcagaggaacaggtgcaagtaagatgctaaagaagaaggtatataatacctgaataaagtgtcttgtgtgatgttctccccatttatatcctgctcaccaaggaagaaggaaaacaaggagttacccaattaacttgactgtgcgataaatgtggcttgctggagagccatttcagcagaatttctggcatgcagtaaacatgtggaaagaagagacagtgaaaatcttccaaatgtttgagtcagataaaaatgagttccaatttagattttgttttttctaagttttgccatatgtatgattgaaaacaaattatctttctaagttttcattttctcatttttaacaagagagatcataagcatattgtagattattatgggtttaaatgagataccatgtatgaagtacttattatgtacttggaataaagtaagcagtagatgaataatattatttggttatggtggagttggcaatggtgaatgtaggtgaggtataagaagaggaagcagaagacagggagtggaagcaaattgctatttggggaccatagacatgaggtaaggctgtaagcagagatagcccataaaaatgcaagatacaaatccatttttggaatgcctttaaatatgtgcattagaaatctgttattttccccatgctgagattcattcatagtcagaagttgagtaatcaacattcagaaatatgtcattgagaccaggctacttattcctgaatatataaatggcaacgattataatttgtgactacattcattctgtagaaactacaggtgctgccatttcagctgctgttgtgcaatctttactgtgaggagtccagagagactcttattattccagtgccttcctgatgcacaacaacctatgatttgccctcttaatgaaatctgaagcatctcattgcctctgtatagggacaggctgtggacagatttagagcggagcttcaggaagtatcttatatgtgtgtactcgcctgagaatgatgttacagctgctgttatgactattactgtgggttggatgtggatgtcataattcagagtccctcttgtttcagttttgggtgcagtgatgttgaaattcctcttctgtacttgaacttctatagcagtcttctagctaatgtcttcaacttgtttctcttttctaaggaaagagcaccttctcttatgtcccttgttcatcagccagttaaaaaagcatcctgactggttcttttctaccctctccgatcaaccccaccgaagctcccaggcacactcttacttcttaacctagttgtagatgcacagaagatacataccaagtatgtggacaaagagatgagaaaaaatgacattaggggaacctgaagagtttattttggttttagagattatttgaagcaaactgctaaacatccaggtgaactcagagctagccaaggttctgaaagttcagtaaaaaatgttaatattgcatagctatgaaacatttaatgaatttagcaatttgggggactgtgttaagaaacagccctttaaaactgaaaaggccaacagttttcagaatttgtgagtctactcaacccttgctactcaaagtatgacttgtgtgtgagcagcaacggcatcattcagaagattgttggcaatgcagaacctcagggcccactgcagacctgctgtatcacatgtgcatttaacaggatccccaagtatcatgtgtgcacattaaagttttgagaatgactgtggtaaacacttagaatgtttgacattccaagaaaattatagagcttgggctgtagagtgacaagatgtggggtcaaagcctagctccaccatacactcctcattagatacctaaatcattgaatgaagcttactaagctctggtttctacaaatgggaattaggaatatgagcccttcccacttcaatgggctgttgtgaaataatgcagttagagaaccttcaataaaatgtcagttagcataattatatttgtaataattattcatattatattcattatagaataaagcgaaatatcataaataacttttttttttgagagagagtcttgctctgtcatccaggctggagggcagcagtgagatctcagctcactgcaacctctgcttcccgagttcaagcattatacaacatatttttatagggcaaggtggaatatccatttactagcatgggctacagtggtggttggaaaataacaaagagaattgcttagaggagggatagtgttttgttcatctttggatatctgtgactagcaaatttatttgggtaagagtaatttcagaggggaaaataaacacgtccccccacagcccccaccccagaatcaatgcctctcaaacactctgcatttttgaaatatggtaaaaaaaaatcacatcagagaagtgattgatgctgcagtctcttttcagttcagaggagagagacttctatccatcaatagtttggaagttctcaattatgtaatataaatgatcaagattaatcgccttttctttatttttcttctaaacaatgtccagattcctccaaaggacctcaatcgtcttcaggtgtaaatggtaacgtgcagcctcccagtactgctgggcagcctcctgcctctgccatcccttctccaagtgccagcaagccctggcgcagcaagtccatgaatgtcaaacacagtgccacctccaccatgttgactgtaaagcagtcaagtacagccacctcccccacaccatcttcagacagactgaagccacctgtctcagaaggggtcaaaactgctccctcaggacagaaatccatgcttgagaaattcaagctagtcaatgcccggactgctttacgccccccgcagcctcccagttcaggacctagtgatggtgggaaggatgatgatgccttttctgaatctggtgaaatggaaggttttaacagtggtctgaatagtggtggctcaacaaatagcagtcccaaagtgtcacctaagttggcccctccaaaagctggaagcaaaaatctcagcaataaaaagtctttgctacagccaaaggaaaaagaagaaaagaacagggacaaaaataaagtttgcactgaaaaaccagtcaaagaagagaaggatcaggtgacagagatggctccaaaaaagacctccaaaattgcaagcttgatccctaagggcagcaagacaacagcagctaagaaggaaagcttaattccgtcttccagtggtattccaaaaccaggctctaaagttccaacagtaaagcaaaccatttcacctggcagcacagcaagcaaagagtctgagaaattcaggactaccaaggggagcccttcccagtccttatctaagcctataaccatggagaaagcaagtgcttctagttgtcctgcccctttggaaggaagggaagctggccaagcttctccttctggttcctgtaccatgacagtggcacaaagcagtgggcagagcacaggaaatggtgctgtccaactccctcaacagcagcaacatagccacccgaataccgcgacagtggcaccattcatttacaggtaaggtggcctctgtttatccacagttgtaaatatatttacaggcctacatactcagagtgtaatagggaaggctgataaagtggtgctttatgtcgtcattttggagtaaagtttcatgctaaagatagaggcctagaattcagtgcggaatcttagtctggaaaaagacttccagtaggatctagttttattccctctctcattccctgtcagcaattgagaccttcaaaaattgaattacttgttatcaaaagccagctagaaaccagatgccacaactttctcttgtgtttattcatattattgctactactatactgcttctattactagcggcagacttttaaaataattctcacttttacatcgtttacggttatttttgttgtcatctttgggagaaagtataccataatggttaaagaggcagcctctgaaatgataaagttgcggatttcattcctagttctgccacttttcagctataagacattgggaaagttacttaacattctttagtctcattttcttcagctgtcaaataggaaccatgcactactttgtagagttgagactattaacagaggtcatgcatataacatgtttactgtatatcctgatgtgttgcaaatgttcttcaaatgttatttataagatattactttctcagtgtaaattttatattaatttcccacagcaaggcataggtttctaggtaaaaggggttacatatataatttgtattacttatttgggttgtattactgatttgttttttttttaccttttatttatttattgtttattttactttgcattcttattttgtaggcattgaaatacacaatataaaatttttaaatgcattattatgcattttaaaatatgcatcctaccatccaaatggtaaagacaacactttgcttgttgttctgtgatttgttttaatcgattagagatatgtcagtaactgctgtgtccccagtttattcactgcttggttggtaaggagatggcctggggagcaataatgtctgctttgtccctctttcgggcaggttggcaatttaactacagaaagaaaattttatgaataggaagcaggacccactataattaagaaagggtcaaaactatatagtttaaaattttattaaattttttgaatgtaaaagtttttaaaataaagcagtttatactgatttatttttttgctcaatgaggaatgtaagtgctttttttctgaggttttttatacactcagcaaaacaaaattattataattattacatttaagctcttgggacattacaattgaatgttgctattctgacttcaatagtactaactcatttaaaatacttgtatttggatcagatgggagtctgcagctccttctgactccagggtccctgtttgacaaagcagaatttaagatgtcaaaatcatgatccacatttcaaaaacgtgagaaaaaaaatcatgaagttttaaatatgtcatactcagcacacttttggattacaaatatattctgtaaaaacatcaatcctttcaaaaaatcacaagtgaatttcataggaaagtgtaaatctagaactgctaatttagtaggcttctttctataagtagcaacaagcttttaaaaaaattgtttgcaataaaatatccagtggaaacaaatttagtggtttccatttgaaaatgtaacttttaaatatcaaaaacaggaagcagcacagcagcacagcttagaagttacagtgtggatccgctgtgtgaacctgatgagttctttgagaaactctttgagtttctgtttgacctctttaacaacaagactataaaagtgaggcagtgtagccaagtagctaagaaaagaggcattagagaggctgaagcaggaggagaatcgcttgaacccaggaggtggcagaggttgcagtgagctgagatcgtgcatttgcactgcagcctgggtaacaagagggaaactcaaaaaaaaaaaaaaaaaaaaaaaaaagagaaaaaaagggcgatagaatatgtcttactctaccattgttcagaaacagcatcttgtggtggtggttgcctaggtgggaatctcaatgccaccactgatcagttgtgttactttgggtcatatatgtaaagattctgacccacaatttcctaatctgtgaaataggtatgataattgtagaagctacctcattagcctattttgaagattgagttgatatttatctgtagaacagtatctgccacatagtaaacagccttccctaaacttcactttctaatcctataaagtatgattgataaaggatgcctacctcgattgattgtatgaaagattaaagaaaataatcccatgtaaaatttttagcacacagccagattttgagcaaattacatgaatatcagtaattatttttattattatcaacaatataagatagctaaaaataaatgaaactatggttggcatggtggctcatgcctgtaatcccagcattttgggaggccaaggtgggaggatgacttgaggccaggactttgagaccagcctgtacaccagagcaagaccctgtttctacaataaataaataaattaaaactgtctcataaaatttcacattgaagtctatatataaagtaatattcattcaaagtttttaaatcaatgcagaacaattttacaaataatatgtaaatcctcaaaaggcagagtggttaatattcattcttttcagctttcagtaaaagcttgtttatagagtcatgacatttggattatgtaaccttttatgttctttctgactttcactgttctatccccatgtaagaatccctcctataaaatccctgacaattatttttggagttgctaatcatttgatgagataagactaataatttactttttgatgttggtattatcatttgttgagtgcttacttagtgaaaatctttgtgtcacaaaatatatgtgaattttctcatttaaacttcatcatgaactcatgagaaaaaatgtcatcccccattttccagaaatgaagaagcagagatattaagtcagaatagtaataatctcttcagatcataaagctagtagaaatttgctttgcttatcagttctatctatgtgacagaaataagaggtattgttactgagaaaattctggttaggaaaatgccaatagtacacttgcaaaattctcaatcagaactcatttataattgaaaatggtaattgctgttaattagtataaattatataaatgtatacagatacatatatatatgatatgtaaatataattaaataacttttatataatgggaagattgatggctgatggtgactttttttctcaattctaggtcagtacttattccttctgagacttcaataaatgcttcatagtactctttgtcacacactgggtgttcagagttctataaatataatgtggattctggaagttaatagatttcctattagcctaacttcctatctaatataaattattctgtacatagtttcagtaattcaattatctctacagagtgataaagtagtttcaaatttgctgttattcttattcatttatcaaatagatataactaagacaaaatgtcaagaattaaagaaaatattttattttggtttaagaagttcctgataactagagctacctgaaattggaataggctgctttttatagtgttaagatggccatctgaagtatttaaaaagtggcaaagtgaccagttattacagtttaagcaaagggaaattgctgcatactttttcatttatgtactcatccctcattctacaaatactgtgtaacagaagatacaaagattttttaaaaaaatctctgccttctgggagctcagtctactaagggtagtaagaacaatatcatcaaaaatattaaaccattactgttatggaagtgtatgcaacatacacaattaatgtagaaaaaaagagggttttttacaaatctggcaaaatggagtaaactaatgcatcaccaagaagttaagataagggtaaggcataaaagatgagttacagtttgtcacaaggaggtaagaatgttgtgctatcatccgaatttgatattctacaattttataatccaggcatgatgggaaaaataataggtaaattgtgagctgctatgcaaatactagtaactggaactgctatagacactaatggttaggatttgtaattatatgaatgagagactatattagtcagttttcacactgctataaagaaattcctgagactggataatttataaagaaaagaggtttaattggctcacagttttgcatggctggggaggcctcaggaaactaacaattaaggtggaagacgaagaggaagcaaggcacgtcttacatggcagcaggtgagaaagagaggacatgggaaactgccatacacttttaaagcatcagatctcatgagaactcactcactatcaggagaacagcatgggggaaactgctcccttggtcccatcacttcccaccaggtccctccctctacacatggggattacaattcagatcacaatttgagatgagatttgtgtagggacacagagccaaaccatataagatactaaagaagaaaagaaatggaaataatttagattttgtttttctctttcaatgaccccttctccatacatcaaattttcagctagtcttcctaacccttcttctgaaacataccctcaatcagactttctttccatttccagcccttgtctcctagtccaagccacaacaccaccaattctcatctagtttccaatgagtctcccagcttccactctgggctctttgcagtaacatccttcacacagatggcattttgaccttctaaaagcgtaaatcatatatcttattctaattaatgaagccatctattaggtttccattacattaaaaaaataaaactcaaacattgcaccatgaccctccaggttctaagtaatctaataccctgttcacaattgatccccacagccacatgcagtcccaccttcccccagcacgttgtatctcagccttcatcctccttctcaacaaaccaacctatattgctttagaacatatctttggcatatatgttcatttatgactgtaacaactgtcttctagatcactgcaggcctgtcttgttattagagctctgctaatctccagccatctccaaccacctactccaggggaatatatattatgcgccttctcagaattctatttaatcatcctcttgtattttctttacacagtttattactatctgttcttttcttgtttacttattaactagtgtgatttcagccacctcctaatgtaatgtaagttcattgaaattaagagtcttgtctttctcatttagtagcataattgcccagtacagaggccacctacagtagataccaaataaaaattgttgaatgaaacactatcatcctgtgttagaatcacttgctatagaagaattttcaaacctgccaaaaatgtacactggaacaaaaaaaaattctgaagtctctcacttcctataaatgggagggtttaactgaaatacaaagagctttaaaatatttaaagaattaaaccataccttctcttcagcacattcattcacttattttttatcttctttcaacaactacctactaaatatctcttatgcatgagacatcaagaattgagtgaaaaaatcatacgtcctatgtcgttttcttttcatcatccacaatgtggtagacaaggggcaagctcaaagagaacaacaaaatgcagctggaagtgtaaagctccccaggagtgaaatagatttgttatactgaggcttcaaaaaagtgaaaagttacttttagctattggaatcagggaaagtggcacttgaactgagtccagaaagataagtaggatttggtaatgcagagatgagggggacagggagggaaacataaggctgaaggaaccacataaacaaagtcaataaaagatacgtaggctggtcggcaagtaggtcagtttctcttgaacattgaagattgattggagcctggttgtagtagaaattcttgaatgtcagaaacttggactttatgtatgtatatgtgtgtgtgcatacatgtgttcatgcatgcacatgagcatgtgtgtggaaagcatgatcagaaaagttattctttcttcagtatgtaaaatggattgtttgtgggagaggtcagagtaggatgaaccaggttaaatgtatagatgaaggagcaatttactgaatttcttaggtttgttaaatctcgaaggaggttccagttattggaagaaaagagaaaggagaaccacatagttttttcattctgtttttttaaaactcctttttttattgttcctcttctttcttggtgtccatcctgagctatataatttgaacctgtttttcctgcctggagttcaaatattgttaccttacatccttcagactttcaaaaaatacctccctttttcccatatgtcatttttcttccattgcttttgtgttaattacatcacaactatattctacatgctttcaaggacatgtgaaataaaataatataataattggttaattacagagaaaagggagacctgtgtgttttccctaaacctgtctctttagaagcctccaacaaagttttgaaataatgcttacccagagttatgctgttttgaagtctacattctttcttttctgaccatttgtagtaaataccaaggaaacaatgcattggacataaagcaaacatgaagaggcaaagagagcagaatcagggttttgagcagttctcaaaaaagaaaaatacctaacccttagataaggcaaggcactattcataaggagaaaagtatcatgcttcttaagcccattaattaaatataagcagagaccctctattaacacttgacttgtaaaattaggtcaagaaaatctgaatttagagtttttccttcttttgatataatatgctgtactttatacaaccacaccatggattctcagaagagatttttattataaaatatttctgtgggactatagatttgcctaggatgtgacagggaaattgacattttaatatgctattttccaaaaggtggagaatgcaaaacattagttttgaaaatgcttactcacaaggttttaagtttggcttatttgtcgagctagtataatgaagaggaggaggaactgtgagtttacaaagattgaaatgtgaagcctttaaccatcattcaggtaatgcttttgtaagccctgaagctacttctacataatataccacagtaatggttttatgtgaactgggcataattgactatcagtaaaaactaaagcttattgaatgcttggcttgcaagctcgtcttttgctaggtttgatatgtatctgcacatcaggtagtgatttgcatttcctcgcacagcggtatttttaggatggaatatgaacacactgctagaagaggcacttttgtgtagaatactaccacgagtcggcattttcccagcagagccagcagagaggttcacaaactaccttttctgtgcttgattacgaggttcatggcaagattgcctaaccaaaccattgttatttcttctcttcatattttatgttatgtttttggaaaccattttaatcttacagaaaatttgcaagaattgtgcaaatgactctcatgtacacttctcccagagcactcagagaacttattcatatttcaccaagtttcaccaaagatggtcacttttagtaattcaggataaatattgcacctagtagctgtcacatcttctgaatatccctcaatctggaacaactgtttagcctttccctgactttcatgatattgatatattgatggctaggcattttacataatgtttctaatttgggtttgtcatatagttcctcattattagatacatattaaatgtattttttttgtcaggaatgtcatcgaaatgatactgtgtttttcctgttgcatttcattgggtgtttcatgatatgaatatcaatatcttccattttggttgtgttgaatttgattgcctgattaagataatatctgccacaattttatattctaagtgaatttgtctccagttgtatgtaataggtatttttgtgggaagatattttgagactgtgtgtaaaaacgcaattttgtatctactttgacccacaagttttagcatccgttgagctttgttgcctgaattaataatgtgcaaaaaatgtcaataattaatgacaactggttttctaattccatcctgtcttctgcattttctctctggcattctactttaagaaagagatgtattttctccccatgatctttctatctatttaaattgtatggacaaatagatttctactgtatttgttataattcattactatcacaacttactttgatgcttaattttccaagatttggccactgggagccccttcaaactggctgtgtctcctttccaactgccctatcactctttgagaattttctttctttatggctcaaggtgttctaggctcatcttgcacattccctaacttggctttagatcctattcttttctttaaggaacttgtatgtctttttgtatagggtgattttagaaaccaagatctcattgctcctaggttttcttggtggacaaaaccaagaaatttatgtatgcatacacacacatacatacatacacatacattgaagcattatttattttgatattatatatatgccttattataattcaatgtgattattcacatatacatacattcataatacctccaattccaactcaacaccacagtttatttttctttccatacttgtgcctctttttgtcaaccatgagaaacttggctctcattattctcaatatgttttcttatttactcaactcccctgaatcgagtaaatcttccatccacactagacttctgttcaacccaacagtttcctggccttggccctgtctgtcacctgtctgcctttccagaatgaagaaaataggaaagcaagcacattagtggtttttgaaagatatgtgcttttctttcctttttgttggggttataaacaggaattacaataccattagttaatgtttctgactcaaatcagttctacttgtgtctacatttgtgaccatatctatatcaagatggatccacagggggaaatatttcttgaatacaaatcagtatgcaaacattcatgtttatgacattaaagattagaggtttgatagtgtctaggatttattactgagttccttttaatgatcagtacataaagaataacatttaggttagaccagtggaagtgtcacatttaacgaccgagtgactgagctgtctgttagctaagggaacctcaaatgcagtaaaatacttagttcagaggcattttcatggagttaaactgcagggtagtagttaatagagcaacatttacaggtagccagattcaagtactggttaagcatctactagattgttacctagggcaacttatttgacctctagatgtcttaatttctttatctgcagcacctacattgcaagattattgtgaattttgagtgataggctctaggaaaatactaagcaccacacttggcacatattaagtgcacaaaaacaggtaatagctctcatggtaatcactggtatcatgacttttaattactacaactctcagtaacagatgaaggacctggcttattagaattctaaataaattatactctggaggctgaggtgagagcatctcttgaaccaggaaggtcaaagcggaagtgagctatggttgctttagtgcgctccagccggggtgacagagtgagaccctatctcagaaagtaaataaataaaagaaatccagataaactgtttttgcaatgctatatcttatagtttcaatagttactcataacatgatgaccatgttgtaaatgcacagtaagattgtctacataggaccatgttgctgaatattttgaaggaatattatgatacatattttttctttttccagttaataggaagagaatgcattatcagtttatggggaaacagtgaatgtgccactgcaatattcactatatctgtcaaaatgtactttctgattagaaaacactcttgattctaaagtctttataaattatttcatgaatcaacccaaatatttttatttaactggtacaaatcatgcataaaaatagagggtatgttgtgcgtcttcagagatttaactcaacttctttgatcatttgcataaaaggtacatctttaccagttggcattgattgatcctctatagactggagttaaaatctaattttgccataacaaattatgaggtggaaatactagagaaacggatggcttgtaacatcagtagacatttctggtcccatttccatgtgaatataaagcaaggatgacttctaagtcctttttacagtgatttgaagtttaccttcaccatgttcctttctttcatcgatcaatctatttccttattaatgctaagttagatcactcatgtagggaatttgatgagaaatacaccagagaacttaaggtaaataagagtctcttgtgacttaaactaaaagacataaaagagtgagtctgccaaaaatatgcactgctacattaacaaaaattttaaaaaggcttccaagacaagactgagctgtcacaagtaggaatacatttttttaaaaagcatgtctcagacagggggaatgggaacttaaccaatggaattaagtcttacatattgaggaagatagctgtaagtcagcttctgaagaattctttttaagagctgtttgcttttagtagagcaaaaactatacggctaaaatacattccaagttttcttttactccagactttcttagatggagatagaatcttttttaactaacatggccagaaacattcttgctcctgtgacagctgttggtcttgttctcataggaaccaattagcggtgggctttagacaaatatttcagtgaaatgcttaatgtgactcagcttctaaaagataaatctgtgaatacaaagtctgcaggactagaggtcaaccctggctcccagccagttcaacaaggtgctgtgtctctgtgacacttctttgcaggcagccagtcagctttccctggggtccacagtttcactacatactctccatttaaacttcttcagcaagtaataaaaatccttagaacacttcagaggattgtttttcccttcgttcagagacaataggttagggaagaggtcagcgaggggtagagtggcccacaatagatgaagccaggtggaagaacagactttagtagactttagaaacgaatggggagggactgtcagtagatgggggatatgtgagaaattggggtccagaagagaaagaaacagcctacacaaagagcagatatatttgctcttttaatattgaccagaatttcacaagagagaatgtatttccggtccttttgtaataacagttgatttcacaattattttgcaaggcaggcattttttcttatttttacagatgaacaaacaagttcagagaggtgaagtaactagccaacatcacatgagttagtaactgattagtgatggggtcaagttttacacccaaacccagtatatttacacatatgctactctttcttgcatatgttttacccaccaataattttgttttaccgttgtggctaatattatttattcatatatttataaaagatttgttgactgaaacttatattctgatacaagactggacactggggatacaatggtgagttcaaacatggagaatagcgtctagtctgggagttaaacattaatcaattaattacattaatctcatatcacaagagtatgaagttctgaaaacataggtccagggaatactaagtatgaagtgcttataattggagactttgcctgatgagcgaaattagggaggaattttttaaaaatagtcacttgagctaagacttggagggaaggaatcaactggatgaagttgggaggaaaataatcaagtgtaaagaccctgttttggcaggaagctgtggaaagtgggtagaagactctggtggccacagtagagagaggagagaggagtcttgtgtgagatgatgctggagaccatcatcccataggttgcgtgggacccaaccatgcaagaccttgtaagttccgtaaagttttcaccagagggctccatgaatcaggaccaggtttgttaataaaatattatgactttagttctataaatgatgggtttgaagtatttttgtgacagccaagaagaaatgtcaattagacagtctttatatacattgggaattcagagtaaagtgctgggttagagttagaattttagaattcaggcataaataaataataaccaatacaatgaatatgattgagatcatttagagagactatagacaaaaactggaagaagaatagaatattcctttgctgaactcccgcttctgctctctgtatccccacttctttttctactacccagaaccacaacatttaatgattatgtagaggaaaacaatagaataaagtagaatccagagaaaatgggaaacacactggagaatttttgccataaaagccaaggtagtacagtttgataaaggaaggaatgggctgctgttctaaatgctgccgagataccaaatgattggaagactaaaatatcttttaaatttagctactttgaggtctttttttctggccttaatggtatatatcctatcatttaaatagtacattttctttctaaatttgtttatgctctttatattcagttttaagctagaataaaataggaacagtctgtcagaaattattggagtccaaggcacaactttgtataggaaagtttctttcttgtatagttctttctttcatatattaattcacatatataacacatatatcaatacagacaacatgtagttttccatactttattaaaacctaagtgaacttttaagtttctaggactgtcagttaaatattgactatttctaatatcaatgattactttttttctcttgaaactcaaatttagattaaaagcaaaatgttaattaagcattgattcaaaaatataatacatttttattcatatatgaacattatttgtaaatattcttaaagtagtaaatattgaaagatcacttgtcatggcccagacctactaccagaaaaaaaaagggtagaagtaaggcaaatgagatgtctctaaagaacacagtccagtgtgcaatcctatattacctcgcctccttctgtgtcttagtagttcatgccgtgaacatttaaaatgtgtgttagtttgtgtcaaatatacgtcgattttgaagctgcatcaaatagaaagcatatcttaaaatatttacccatgcataaagggaagaaacatgcatgaagtatgattagaatatcaaaagtattcaggacctttgttgagtgcttttcttttaattagacacactctttacaagttaaccacacacacaaatacatacccatgtacatacatagacaaatgtgaaacagatgatatgaaaggtaattgtaagaatgagaatttgtttctggttgactttaattgctctgaaatctttggtaattaagtcatcataatgatgtataaagtctagaacaaaattattttttatttttacacatattttaaaatatattttatagaatttttgttttaaaaaagaattttaggtgtgattttaatactttcactattctcacaaaaaatgtaatttggccatatttcctctaaaatagcaaaagaagttggatcttttaaaatattttgctcccaaattataatcaactattggtagttataagcttccaaatttagacaagcctaagaaatctaattccacatctcactcccacttaggttgtgtatgaaaaataacacagttctcctatacatagacagctctggaacattccagtcataaagaaatacttaccttgatggaaaatttgtaattaatatttcttgtagaacttccactttgatgagtgactagtgactataactgctatttctttctattttcatggttaatttcagggcacattcagaaaatgaaggtaccgctttaccatcggctgactcctgtaccagtcctacaaagatggacttatcatatagtaagactgctaagcagtgcctggaggagatatctggtaagtgacctcatcgatgcataggtcaaacctaggaatttccgtattctctccataagactttttattaaatcatatatgtggtatactgtttttagtgcaaaaatggactatatacatctcatgcttcaaagatcattaactatttggctattctgcttaggatgatctctttgttactataaaaggaatggtagtcctttcagaagtgaagactttaagtcattttgccctcagtcaagtagttgaataaaatcagagaaaacctggataatacatttggagattgaaaataaactaatgattggccatgtatattctccatggctaatgcagcctgctctgtcatcaattctgtacgatttaaaacatctctacagggtggcttcaaatgaccattctaaaaaactctgaaaaggaaaatattttattatatatagatgatgtaagaaaaaaaatacatatcccagacacagttatcatgtttttggtgtgtatcaaatgggatgctcagcttgagcacaatgttttctctagggtccaggtaagcctaagcatatatggaaggcatttagtttaatttcattacatatagatctatattcgtgaggaatcaagtaacctcctagcaaaatatattgcccctaaagggtgagagagtacagagtactttatctgctcctaagtataataatgcatgaaagtaggggtgtgtctgttgttccaggaaatctctggtccaagcctgtgtattcacagctaagttcaaatgaagaaaactaaataaattatttaattttaaaaaattactgtgtactccaaagactcaaagtataagtattgctatgaagctcaagcgactctatcacaaatttgggggttaagaaacttccccacttcggcagacctgaaaaatatttggcaagcattagacatgactacagcatcctgcagtggatactgacaacaattacagaacaacatcccaagggtacattttggaatcagcattagttgataacattaggcgtcagaggtttcatatggagattacaacaaaggccagttctaggtaggggtagaaatggtaatgccaagacacagatatagggctaataattgtagatttttcaaatacatgggggatgtgttgactttccattaactctgggtagtaccacggtcaaaataatgctatgtgtctattatgaccagatgttttataaaattagcatggcatgaagatgtgtatgcctcatatatttatacataaatgtcctcaaattgcatgttttagcactagagctcaaatctttaggataaatgaatttagtagagtttgaattgcaatttttttgtgaatttcacaaaggaacactgttttcagaaactaatatatcacggtatatctgattgaatagtctgtatttgatgtttttctccacttccttattgtctaccctttgatcactttttcatttttccagttgatatttccttttaacattctgatttttaatagaatacctgaaagtgaatataaactggcaattaatgtaataatttaatgggtttatcagagagcataatatcattttgcagcaataatcaattatttacataaaatcatagttttcagtctaggattttgataagaattcagtaaaagaaagaaaacagaaaataaatggtacagtgagacttgtctaattatgtcaatctcactatcatctgtttaaatgcagcctatagtgggatagtgaaaatgtctctcgttgcttgagatttcctggaagaattgtgatattatttgcagttagtaagttataaattgagtactataattgaagaaatttagatgaggaaatatgagcaggccagtgataagatgactatcacagagaaattagattacatatcttcatcattttaagattttggtttatgggtcactattactctcttaccatttctgccttaatttttagtgattttagtatctacacgggtgttctttctaacaccttggcctctcctcccataattttgtgttgcagtccctcctgagcttcttattctcatcatcataccctagatctaggcaccatcagaaactactacttctctatgacctcactttcatgcactgcactctcactgattatatactcctatcatttcagtattcttccttttgttccctaactccagcaatgattccactaggatttccaattcattgatcctaccactttttaccgttcttcaccaacctccgcatatttttcttctctccttagctgaattcctgtaatgagtgaatgtatttttatttttatatatcctaactccattgcctctctctcacttaattgtactcatttgatgaaatcatgacctggttacatttaaatctccacctattctataccaacaatgaatgaaccaggagaaaacacaccgcatgtcaatgcaactcactttacatatatgacctccaacctcaagtgactatgtaatgctcctggcagtcagtctattttttatacctttttttctcaaatgtccgacatcaccagtcccatcctttctcttaactgacaacctggatatgtacttcacttaaaaaagtgaagcacaaagaaaagttcatgaaccactgtcatcacatctacccaagtaaaacatatatacccacttaatacctatttactctgcttttacttagattactctctcttctctttaatagctccctcccaaccaaatcacttattttaggccatagcatactatcatttctccaaccttaatttaaaaaacacaacttcctggccgggtgcggtgtctcacacctgtaatcccagcactttgggaggccaaggtgggcagatcacgaggtcaggagatcgagaccatcctggctaacggtgagatgccgtctctactaaaaatacaaaaaaatagccaggcatggtggcgggcgcctgtagtcccagctactcgggaggctgagacaggagaatggcatgaacctgggaggcagagcttgcagtgagccgagatagcgccactgcactccagactgggagacagagcaagactctgtctcaagaaaaagggggaaaaaaaaagccacaacttcccttgaccccaaatttgtcctcaagtactgttgtgatttatctccttctcttatggcatgctgtaaaaagagtacggttcaatcacagtctcttaggcttttagccccacttctccactggaactgctcttattgaagtcaccactaatgtcaacatggccaaatccaaggatcaagtctcagggcttatcttatttcacctcacagcagctatttgtcctcttctaagaaggtttcttccttggtgctatagtttggatacagtttatttggtctcaccaattctcatgttgaaatttgatttccttggccaggcatggtggctcacgcttgtaattctagcactttgggaggccgagggggtcaggtaatgagatcaggagttcgaaaccagcctggccaacacagtgaaacctcatctttactaaaagtacaaacattagccggctgcggtggcagacacctgtagtcccagatacttgggaggctgaggcaggagaatcacttgaacctgggaggcagagattgcagtgagtcaagatcgcaccactgcactccagcctgggtgacagagctagactccatctcaaaaaaaaaaaaaaaaaaaaaaaaaaaagaaatttgatccccaatgttgtaggtggggcctcatgggaggtgtttggatcccaggggcagattcctcatgaatggcttggtgccattctcctgggagtgagtgaattttcactgttaggtcccacacaaactggttgttaaaagtaacctggcaccttcactttttcttgtttatgctctcaccatatgatctctgcacaacagctcccctttgcctttcactgtgagtggaagcagtctgaagccctcaccagaagcagatgctggaagcagcttcttgtacagcctaaagaacagtgagccaaataaacctcttttcttcataaatcacccagataatcctttatagcgtcacaaatggactaagatacttgattttcagagtcatgtatcccctctgttttcctcaaaccttactgttcctttttggtttccttttctagttatactttttttcttgatgatttcttatgatttaaatgatccaggtctctgcttctaggtttctctacctataaatgtgatttaatatcgatattatctcatggctttaaatttcatctatattctgatggcttacaaatgtctctctctgcactagttctctccccggaactctggactcaaatatccaactgccaacacaatctttccgcttgaatatctcacagacacttcaaacataatatatcccaaactgaacctctgatattaacctagcaaattgtacccctcgaaaactctttacccaagtcttctccattttgattaataagaatttcatccttccagttgcccaagcctgaaaccttagagttattcatggctcctttttaatgcctcacacctgatgtcctgatattctattcattatagtatatttttggctccagaagtattgttttctatttgtactcagaaacaaatggtgtatatgaatcaactttttaggatatttctcagtacttgaactcttgttattttctcagaaattcagaaactgaaaaaatttagatgacacaatattgaactaactataagaaataaggtactaagataccctagaataattgcattttaaaatatatccagaatttgccagttcttcttttttctacttttatctattaagtggcatcaccaatggatggttagtatatagatagcattcaataaacgcatgtaaaatgaaattaatataatggatgtagcattaaaatgagaactacgctaaaaaaggaacctaataattttcagaggaaaacagtaaacagaaaagataggacttatatctttggctttggaaggcactcaggaaataatcacagtgaacttatgaccaattatactcaactgaaggggttgatataaatggaaaataaaaatttacttttgattatgccatcactgaataatcaaagaatatgaggaagaaaatgtttagttattctacagaagtaatgttagagttcagaagctctccccgttgagctgggattttaagacagcacattagaaaatggaagaaagccaagaatggtggctcatacctggaatagcagcactttaggagaccaaggcaggacgactgcctgaagccaggagttcaagaccagcctggacaacatagtgagaccctgtctctaaaaaaaaaaaaaattcaaattgttcaggcatggtgctgtgtagcacatgtgtagtccaatctactcaggaggctgaagagagaagactgcttaagctcagaagttcaaagctgcaggagtcatgatcatgccactgcactcaagcctgggtgacagagcaagaccttgtctccaaaaaaaaagggtggggggccgggggagaagaataaatttgtaacacaggttgaacatccataatttaaaaatccaaaattcagaaggtcccaaagtcataagtttttgtgtggtgacataatgccactagtggaaaattccaaacctgacctcctgtgacaaattgcagtcaaaatgcaggtgcacaacacagtttattcagcattctcaggggaaaaaatagtctgtcagcccctttagctgctatgtatcttttccatgcacacccacaaagggtaatacaatggcatgtgtgcagaatggacatgccaatggcaggttccccacagtgccccacattgggtcaagacctatacgcattactctgtggtttttgttttgtttttgtttttgtttgtttgcttatttttcattgtgtggcataaagatattgttgaaaatgtcaaaaaggcctgaagatacccctatgggtaacagtgataagaaaaaaaggaagcgtttttttttgttttgttttgttttgttttgttttttttatagcacagaaagtcaagctgttggagagactagactgtggtgtaagtgggaaacatcttccagaagagaatggtgttggaatgaccaccatatatgacctgaagcaaccaaaggataaattgttgaaggtctccattgaaagtgatgaacagaattaatgaaaaacagaaaaacactgcataaagctgaaaatgaagatctcaattgtgtattgaaagagtggatccatcagtgtcacggtgtacacatgccacttaatggtatgctgatggttaaataagcaaagatctttcacaatgaactggcaattgaaggaaactaaatattcaataggctggttgtggaaatttaagaaaatatatgacattaaatttttaaagatttgtggtgataaatagtgaaaacatacattgactagttttccaagatcattgccgatgaaaaactgactctggaaaaaatctttgatgctgaaacaacacaagttttgatgcctcagaaagatactgacacagaagataagacagcccctacaggaagtaaggatgccaaggacggagtaactgagattggatgtacttatacagcaggaacccataaatgaaaacttgctgtgataaccaaaagcttgcatccctgctgttttcagggagtgaatttcttaccagtttattattatgctaacaaaaaggcttggatcaccagggacatattttctgttggttttgcaaacattttgcatcagcaattcttgctcactgccaggaagctggactgaatgactgcaagaatttatttgattatatttattctactcattgtctagctgaaattattatcaaaaacaatgtttatgccatgtactttccccgaaatgtgacttgttaatttagcccagtgacgaggtgatccttcaatcgaaaaagaataaatataaaaacacttccttaaatagcatgccagcagcagtgaacagaggtatatgtgtggaaaattttcaaaaggagtttagcatgaaggatgtcatatatgctgttgtcaagccttggaatgcagtgactaaagacatggttgtacctgcctggcacagcctctggtctgcatctatgttcaatgatgatgatgaaccaggtggtgactttgaaggattccatatgtcaaatgagaaaaacaatggtgtctgaccctacctattccaaaaaaaaaaaaaaaaatactttcagagtccataagtaggctagaaaaagtggatatcaaagaaatttttaacattgataatgaggctccagttgttcattcattgaacattgataacatagccaaaatggtgctgaattcaggtgactgtgataatagcaatgatgaagataacaatgttaacactgcagaaaaagtgcctagagacaacatgatagaaatgcatgatgatcttagtgaagaactagagcagtgtacattcattacagaacaataaattatgccagttgataaaaatcagagagatttctaagacaaaaactgttgttaatgaagcagatgactctggggtaaacattttaaaaagctacacagcagaatgccacctcatccctaaggggcccacttcccagtccctcaactgcttctgatgtttcttctcacctaaaaaaaaaatacagtgtacagtaaccttttaatccaaatacagcattgaatgtagagatggaaagcttgtggttgtttgtggttgctgttgtttcatagctgatacaggtattctggcaatgctactgtgctgcttagtgaccttgaacacattattttttcactgcattaatgctatgtcatattttttattggtaagtacttatgtataaataattgcaataaaataattgcctattagtagcatataaattcagtcaggaatgatggtgatgccacaaaaccacagattgtacaatcctgttaggtgactgagatagagacacctttgatttctgatggttcaatgcacataaactttgtttcatgcaaaaaatttttaaaaatgtatagaattaccttcaggctatgtgtataagatgcatatgaaacataggtgaattttgacttgggtcccatccccaagatatctcattatgtataggcaaatattccaaaatctgaaaaaattcaacatgcaaaacacttctggtcccaagcatttctgataagggatattaagcctgtaatagaataaccctataaaagaatgaacctctcagaattctaaagctcatgagatgttttctatattaatgatgcctctctttctcagaatctccatcctttattggctttcatctttctgagttctggatgctagtgaaaccacaaagcactaagcacctgaatttattgccaggtcctagctcagactggcccacagaataccccttccaagactgtttgaaatgtggaaagagaaatgttctaggaattggaaaaaataaattttggcttcagcactgcaattatttagcgattatttggcctctgcactgtgaattgctccctggttcccttttctgtgtggtgaatatgatgatacttaataaactcagaagattgttgtgaggtatggtattattcctccatcagtcttttcagtaattatcacctggcatcttacacatgccagacatctcaaaatttgggaaaacaaatgtgactaagaagtgagctctcctttgaaaaagtaagaaacaaatagataaaatttaacaccacaaataaatgaataaataggcacatggaaacaactaacttagctgtaaagagtcatgcagaacttaaaagaagatcagacatgcatattgtagaattctaatgaacaatgaaattgtggaataacatgaaaataatgggaaacaaattcttcttaacttactcttttcattagtttctttttgtaaaattgggcatttctcctaaacttactgaggtttcgatagttctctgattttctgcaaccccaagcttcaacactattgttattgttgaacttttattgctcatggttgctgtaggggcctcagtgaggaataattctgcttcccaagtgaagtggccttcatgatacagaattctgaggaagttagtcttgccagggtaagatgcaggctttataaatttgtgaagtctatataacattcagagtcctgaaaatagtacagaaaataaaatgtatagtgtctagaaaggggtttaggtgagttaggagttctatagcttaagctctattgctgtgtattaagcctacctggaagtactggtgtcgttttgtgtgtctggtatccattgccccatcttctgataacagcaccttgattttctttggggagaattctctgctcatgtgatctaactgaaattgatataagtggagccaatgagaacaatctattcattgactgcagtgactgtttgaggactggatgtgtgacccaatcaagtttgatcagaacaaataagactcaatctcaggacttttcctgaggttgttataagagaaaatgtggcacatatacaccatggaatactatgcagccataaaaaatgatgagttcatgtcctttgtagggacatggatgaaattggaaatcatcattctcagtaaactattgcaagaacaaaaaaccaagcaccgcatattctcactcataggtgggaattgaacaatgagatcacatggacacaggaaggggaatatcacactctggcgactgtggtggggtggggggaggggggagggatagcaatgggagatatacctaatgctagatgacgagttagtgggtgcagcgcaccagcatggcacatgtatacatatgtaactaacctgcacaatgtgcacatg

SEQ ID NO: 1306 - DNA, 1756 bp, Homo sapiens
atggcaccaggggtgacacagcttgttcattgccattgctacccaccaaggctgctgtctgatgagtgcccgaagatttacactgactgggccaaccactacctagcaaaatcaggccacaagcggctgatcaaggacttgcaacaagacattgcagatggagtactcctagcagaaatcatccagattattgcaaatgaaaaagttgaagatatcaatggatgtcctagaagtcagtctcagatgattgaaaatgttgatgtctgccttagttttctagcagccagaggggtaaatgttcaaggtctatctgctgaagaaataagaaatggaaacttaaaagccattctagggctgtttttcagtttatctcgctacaagcagcaacaacaccatcaacaacagtactatcagtccttggtggaacttcagcagcgagttactcacgcttcccctccatcggaagccagccaggccaaaacccagcaagatatgcagtccaggcttccagggccctctagggtgcctgctgcaggaagcagcagcaaggtccagggagcctctaatttaaataggagaagtcagagctttaacagcattgacaaaaacaagcctccaaattatgcaaatggaaacgaaaaaggtgtaaatggtaacgtgcagcctcccagtactgctgggcagcctcctgcctctgccatcccttctccaagtgccagcaagccctggcgcagcaagtccatgaatgtcaaacacagtgccacctccaccatgttgactgtaaagcagtcaagtacagccacctcccccacaccatcttcagacagactgaagccacctgtctcagaaggggtcaaaactgctccctcaggacagaaatccatgcttgagaaattcaagctagtcaatgcccggactgctttacgccccccgcagcctcccagttcaggacctagtgatggtgggaaggatgatgatgccttttctgaatctggtgaaatggaaggttttaacagtggtctgaatagtggtggctcaacaaatagcagtcccaaagtgtcacctaagttggcccctccaaaagctggaagcaaaaatctcagcaataaaaagtctttgctacagccaaaggaaaaagaagaaaagaacagggacaaaaataaagtttgcactgaaaaaccagtcaaagaagagaaggatcaggtgacagagatggctccaaaaaagacctccaaaattgcaagcttgatccctaagggcagcaagacaacagcagctaagaaggaaagcttaattccgtcttccagtggtattccaaaaccaggctctaaagttccaacagtaaagcaaaccatttcacctggcagcacagcaagcaaagagtctgagaaattcaggactaccaaggggagcccttcccagtccttatctaagcctataaccatggagaaagcaagtgcttctagttgtcctgcccctttggaaggaagggaagctggccaagcttctccttctggttcctgtaccatgacagtggcacaaagcagtgggcagagcacaggaaatggtgctgtccaactccctcaacagcagcaacatagccacccgaataccgcgacagtggcaccattcatttacagggcacattcagaaaatgaaggtaccgctttaccatcggctgactcctgtaccagtcctacaaagatggacttatcatatagtaagactgctaagcagtgcctggaggagatatctg

SEQ ID NO: 1307 - protein, 576 aa, Homo sapiens
  VARIANT (1)...(576): Xaa = Any Amino Acid
MAPGVTQLVHCHCYPPRLLSDECPKIYTDWANHYLAKSGHKRLIKDLQQDIADGVLLAEIIQIIANEKVEDINGCPRSQSQMIENVDVCLSFLARVNVQGLSAEEIRNGNLKAILGLFFSLSRYKQQQHHQQQYYQSLVELQQRVTHDPSEASQAKTQQDMQSRLPGPSRVPAAGSSSKVQGNLNRRSQSFNSIDKNKPPNYANGNEKGVNGNVQPPSTAGQPPASAIPSPSASKPWRSKSMNVKHSATSTMLTVKQSSTATSPTPSSDRLKPPVSEGVKTAPSGQKSMLEKFKLVNARTALRPPQPPSSGPSDGGKDDDAFSESGEMEGFNSQSGGSTNSSPKVSPKLAPPKAGSKNLSNKKSLLQPKEKEEKNRDKNKVCTEKPVKEEKDQVTEMAPKKTSKIASLIPKGSKTTAAKKESLIPSSSGIPKPGSKVPTVKQTISPGSTASKESEKFRTTKGSPSQSLSKPITMEKASASSCPAPLEGREAGQDSGSCTMTVAQSSGQSTGNGAVQLPQQQQHSHPNTATVAPFIYRAHSENEGTALPSADSCTSPTKMDLSYSKTAKQCLEEISX

SEQ ID NO: 1308 - DNA, 26922 bp, Mus musculus
  misc_feature (1)...(26922): n = A,T,C or G
gcgcacgcctttaatcccagcacttgggaggcagaggcaggcggatttctgagttcaaggccagcctggtctacagagtgagatccaggacagccagggctacacagagaaaccctgtctcgaaaacaaaaaacaaaaacaaaagttcctacaggggttttaagcctaaaatccacaaacgtttgtgccaagttactctcccaatcaggatttagggatagaggatttccttaggagcatgtctttcttgttcacgtatcctgttcccattggttggggtattcaagtctggcaggggacttgtcttgtctaacattcatgtcttaacttgccaaccaggatgtcaattgcccacatacaagtctctttcttctaagtaggatgtcagttcccagggtggtcttgggaacttaaactttactcaatccctattcaaaatggaagtcttattcccaacactttcttatatcagtgcaggtctctcttatgttggggtccatcccaggggcaggttataaaagccaacaccataaaagctcatacataggtgcagggcacactgctgggtggttgctttggggccaagcttattgtgggtaactctacaaagcagtttgaagatagattggcttctatcgtgattggtttccaagggcacaggacatagcagaatatgaaatcaacctgggcatgaggaagtttcctagtacctgcagaaacaaaataggaaaaagcttccttataatatgagtaagagcacatgatgacaaactgccaggtaacacttacctaggccttaacatccaaccctccatctgggtcttaatattttacctaggccttaacagagcccaggtccattagaagagcccagtgctctgcacagctgagccatctctccagcactttacagaacaatctgagagcaggctgtgtacattatgtctccttgatgctttgcattttagagtacacctttgagaacaaggagtttcttaaacaccagttatcaactttacgaaacaatatttaccttttagcaattatcttttagtcaaattaaacattaactttcattaacctaccatccttattcctgtttgtgagctgccctcaaagttttcgttacagccattttcttccactgagagccaggatttaatgtaattataatagttaatgtaatgcattatatttaagatcacatctctattatagtctcttttcccccttgttgttacaggattcttaaaactatttttttcacagaacagagtcaaatgactcatttgttttcagagtcatcccaactgtaggctgcgaggtctgaagtttggactgctgaactccaaaagtgtcagtgtttgttagtacccaatctgccttgatgaattgcctgtgtctgtctctgtctctgtctctctctctctttccctctctgtctctgtgtctctctctgtgtctctctctttctctctctgtctctcactatctctctctgtctctctctctgcctctctctctcatatcttgacatttacttggtgtggtttgttgtttgtttgtagagacagagactcactatatagtgttggttggcctggaactcactatgtagaccgggttgaccttgaactcacagtggtttgcctgcttctgcttcctaattattaggattcaaggtgtgtgctaccatacctggcatatttttgttttagttatgagtatgtgtgtaactatgtatggacatatatatgcctatacgcacactcataggtatccacagaagcctggaaacgaagttacaggcacttgtgagcctctcaacatgggttctgggaacctgagtagggtcccctggaaaagcagcaagtgtttatttaatttttaaatttatttattttaaatttatttatttattcattatttattttaaaaataaataaatgagtacactgtagttgtcttcagacacaccagaagagggcaccagatctcattacagatggttgtgagtcaccatgtggttgctgggaattgaactcaggacctctggaagagcagccagtgctcttaaccagctaagccatgaccactgaagacagttacagtgatttatttataataataaatgagtggggttgaccagagggagcagaggtcctaaattcggttcccaacaaccacatgaaggctcacaactacagtgtactcatatacataaaataaataaatctttaaaaaaacaaaacaacaaaaaaaaagaagttccttattcatctttagtctgaaaatttctcagtcttcctttggagtaataataataataataataataataataataataataatagactagcattttaaaaactgcaggttggtttctatttatacacaaatatacacacagacttcttcctcatttaagctcgtgttcatcttcctacctagaatcaagctgagcatcgtcaggtaggattctgtactgtagtatgtctccctcagggtagcctgtgtggaggactgcatattcctccgtccctccagagtagtgttcctccttaaggcactgactgttaaccactggaaagttttcgttttgcaactaatgagcctgctagaggggaatttctggagctggggatacagtgcttgcctgatgtccctccccccctctacccccttccctttccttcccttctccctgttgctccgaccccggcctcgatccagcccacaggttttgtttgtttgtttgtttgtttgtttctctttatggatggttgtgagccaccatgtggttgctgagatttgaactcattacctccagaagagcagtcagtgctcttagccaccgagccatctcaccaggccctgatgttcttgcctaacattcttgcctgtgtttgatcctcaatgccacaaagattaatacgtcatagatgctgcacttaatcaagtttctcctttagtgaatatccacttacccatctcgctgtaaccacttttcactgggatcattattgtccttttacagctctgtccacttcctccacacttatcaatgggcaggtgcccatcctttccctgatccttgatctatgaattaccagggcgtggctcaagggctcttaatctctatttaattattgtgttctgttttacatttgttttatgtttgtggtgtgtatatgtgtgggcaagcatgcagaggtcagaggtcaactccttagaacagagagaaagttctgaccctctgccatgtaggtaacaagggtcagactcagattatcagcattggcatcgagtgagcctcttatctgccccaccttaggctgaaatggcttccaactcacaaccctgacatcctctccagtgttagattatgtagccctgccaccacacccagccggggtcctaattatttttgtttgtttctttagtttaggctaagggatttgtgtcttccagtaattcacattccattcttatcatgaattatttttatgctaaaattgtcctaatattctaccagtgcaaacgtcttgaagctgccttctcaagacattttgcctgactcacctgcctggtgtcctcagaagccagagaggtagttagatccctagaactacagttacgtgccacgtggttgctggaaattgaacatgtcctctggacgagcagccggcgttcttgcccacttaactgtcttcctagcccctcctatcaattttaaaaacaattcttttaaaggtttctaaaattacacttcttgtgtgtgcctgtgtgtatgtgagtgtgactgtgtgtgtgagtgtgagggtaagtgtgtatgagtgtgtgtatgtgtatatgtgttgtgtgtgtgcatgtgtgtatatgtgtgtgaatgagtatgtatgtgttatgagtgtgtgtgttttaccaaacttgtgtgtatgtgttgtgtgtgtgttttaccaagcttgtgtgtatgttttaccaagcttgtgtgtgtatgtgtatgactgtgtgtgtgtgtgtgtgtgtgtgtgtatgtgtgtatacaagcttgtgtgaaagtcagaagacaatttgcaaaagttagtttcccccttccactactgtgtggggtctgggcatcaaactggcaccatgtggtttggttgtaagagcctttagcccacctagccatctcactagacctttttttcttttctccttctccttcttctccttctcctttcttttcctccctctcctccttctcctcctccttctcttccttttcctcttcctccctctcctcctcttcctcttcctcctcctcctcttcttacaatttctcctccttcttctaaagaatttttatatgtacaagtgtttgtttgcacatatgtatgtatgtgcatccacatgcacggctggtgtccaagtaggtcagaagaaagcattagactctctggaactagaggtacaaaagatcactcaatgggttctgggaacgaaccaaccccgagtccatgcaaaagcagcaagcactcctatccacggagccttccctggactcttgtttagttttttgttggtttgttttgctttttgtttttcaaaacagggtttctctgtgtagccctagctgtcctggaactcactttgtagaccaggctggccttgaactcagaaatctgcctgcctctgcctccagagtgctgggattaaaggtgtgcgccatcaccgcccagcttagttttgtgttttaactaactattattttctgtaattctaggttcatctttaactttttctgcctcaacctttgactaaagactagaatgagtccaaagagcttgtttgtctttacgagaaagatagtgcaggaattggaaagatgattcggttcccaacacccatatggtgactcacaactgtctgtatctccagttccaggggatctgacaccttcttgtctccatggatacgaggcacacatgtgggggacaaatgcacacgcagacaaagcactatgctgtacacacatctctgcactgagatgaagtaaaataaaacctcttaggttaatgagacggcccatcaggaaccggcactgcctgccaaacgtgacaacctgaggtccatccagggaacaaccgacattctcagcttgtcctgtgagtgccacactgatgttatgctactcacaggtgagcgtttgcatgtgcacaagagtgcacacacacactttatgtaagtgctctttttaaaaagcctgtttattacaacttatcacatacagaagaaagtctaagattttaaaatgtcagcctttgctgggcagtggtggctcacacctttaaacccacacttgggaggcagaggcaggaagatttctgagttcaaagccaacctggtctacagagtgagttccaggacatccagagatacacagagaaaccctgtctcaaaaaccaaaaaaaaaaaaaaaaaaagtcagcctttgtagatatacaattacttgaacttgtatatcttagttcaagtaatacttcctctctgtagttaacatcttcttgagtcagctcgtctataaaggagctgtgtctgtaacttggctttgatattcttaaaaaacagaagtccaggagcaaagtcactccaggaatgatgaaccacaacagagcttccacgatctttcttatttttttttttatttgatgagaattttagattttctctaatataaaatccctcctttaaaaatttcgagttttgttttctgtgtgtgagtgatttgcccacatgtgtgttgtctgtgcagcttggtagctgaagacgtcagaggtgggtactggagctcccaggatggttggagattctttttttttttcttttttaatattttttattaggtattttcctcatttacatttccaatgctatcccaaaagtcccccataccctctccccaactcccctacccacccactcccactttttgaccctggtgttcccctgtactggggcatatatagtttgcatgatcaatgggcctctttccagtgatggccggataggccatcttctgatacatatgcagctagagacacgagctctggggtactggttagttcatattgttgttccacctatagggttgcacttccctttagctccttgggtactttctctagctcctccattgggggccctgtgatccatccaatagctgactgtgagcatccacttctgtgtttgctaggccccggcgtagtctcacaagagacagctatatcagggtcctttcagcaaaatcttgctagtgtatgcaatggtgtcagcgtttggaggctgattatgggatggatccccggatatggcagtctctagatgggccatccttttgtctcagctccaaactttgtctctgtaactccttccatgggtgttttgttcccaattctaagaaggggcaaagtgtccactctttggtcttcgttcttcttgagttttaccggttggagattcttataaatggccaagtcggtgctgggaatcaaactcaggtcctctgggagatcagccagtgatcataacccctgagccatctttctacatccctcaagatcacttggcagggggtggaggtggggtgggggggggggcagtgttttccaagacagggtttctctgtgtagccctggctgtcctggaactcactctgtagaccaggctggcctctaactcagaactccacctgcctctgcctcctgagtgctgggattaaaggcatgccctactacggcctagcttcaagagcattttttaaacatatatttacccaggagttctctaaactctcagattcaagtgatcctcctgcctgatcctcctgagtagctgggaatgtaaacaccactatgcccagctaagagcatttttatagtgaaattaaaaatatagatttctattctttgatattgttagttatctttcatggatgaggggttcatcactgagagatatgtccaaccttttttttttttttacattgttttccataaagttcacacttcagatccatgagattgaattacaagggaaaaaaaatccaaaatttgtgttttagttaaacatacggttttgtgtcagacgggattcatagccatcttgtgtggtgcatgtgtcttggaagcagaataattccctggttacatggatagacgctgttgagttttaatcttaattttgccccctcagctaagcaatccctgttttctcatttagagaagaaataggagcccctggatcgtaggagcatcggtggttatcaaatggtaagcggaatgctcagcaggaggaaaatgaaaactggttaggtaggtggcataactcaaaccgccctgctccctccagcgcttgtgttagagcatgtggtttcagatggagatgagctcactgtggtggggaggcaaggcagaaggagcaggagactgagagagagatcacacctcagctgacaaaacccactagagagaggacaggaagtaggctgaggctcagcggaatgctcagcaggaggaaaatgaaaactggttaggtaggtggcataactcaaaccgccctgctccctccagcgcttgtgttagagcgtgtgatttcagatggagatgagctcactgtggtggggaggcaaggcaggaggagcaggagactgagagagagatcacacctcagctgacaaaacccactagagagaggacaggaagtgggctgaggctctgaactctcagagcccagccataaggacgcgcttcctcctgtaaggtgccttctccatccaacagtgacatcacctggagaccaggtgctcaaatatctcagccaattgaggagcctcttcatccaaaccaccacatcctaacacacggacacatgtacgcacatgtatgaagaacatatgtgtgtgtgtgtgtgtgcttcacaagatatttccatgcgtagggaaacaatatatgaaaaatctcaaaataccattctctcaatgaggttaatcttcaacacttgtgcgtgtgtctgcatgtgtgtgctgtgtgtgtgagagagagagagagagaagagagagagagggggagagagagagagagagagagcctgaggagaccagaagagggcacaaagtctcctagtgcgcagttatgagccactcaacatgggtgcttcgaatcaaacttgggtcctctagaagagggagaaaagctcttaaccactaagccatatcccccaacccaactgttggctttctgacagggtctcacttacttagaccagaccaaacctgctaactcctcagctcctgactccacggtgttaagaaaggcatgcgccacgtcggttttgattctaccagtcaagaataagatgactgccacaatttttgaacaaaatttgaagcaagctttaatactagccaggatgatggactctggccagtccactccagggttcctagaaaatggccaccagctacaatggccaggtgattataaagggctaactcacaggctatgccttggtcagatggaagcaagcatacatcctgacatacttcctcctacctacctctcaactccctgtgatcccctagaaaagtgaacgcatgtggcttgctatctgatacgggtaacagcttccagagaatcgtggcgtatctgtcctcgggcagggagttgaccggttacaaagatcattttgattcacggagttcttgggcacagtaataaaaacctaactttgcattctacacccgatgtctatcaagtgttttgtaaataaatttattcctatttacaataatattctatctacatgtgggtctgtgaaggggtatccagacgcccgggaactggaattattgttgtaagctgccatgtgggtgctgggaattgaacccaggtcctttggaagaccagccagtgctcttaactgctgagccatctctccagtaagtgttttatatagacaggtttactaatatttcccttcgcctcttgcttaggggatctcttccgactgtaaaggaaaaaaagcccttgatttattttaaaggttttgtaattctacttttagcatttgatctgaaacttctggtttaagggtgggttttccctcttctccccaacacacacacacagttcattcaatattgcttatctacagccccaacccccagacacatttttcattatgttttacctatttttctattcaattttgatccttctgagaaccacaggactttgtttctggtcagtgtcgggaatcaagccacctatggcctacttcactgtccatctggccactttctgcggttcctcttcaagtctgtaccaagaagcagttaggggaagtaggccggccattgagtaacggcttgcctcggttgatggctggaattcggagccaagaggtcagagagaggccgctgtctttgttgctcgtgaggcagtgttcacctccagggctggctggttttatttatttcatcttccccatccaagtgttccttgaaatgaggttagaccgcatactgaacccaatcgcccttcctggggctacactgtgaacgagtggggaaatggcggggaccgggaactggcatcttagacaccgcggtttggggacgaagggatgtgaaaaggggggaccttcccgggagggctcatcgcctaagcaatcttctccgcgtccgccagacggcgccgcggagctcgccatccccgctcagagcccgagcctgtgccgcagccagcccgggagcggcgctgcgctgcggtgtgagagccgggcggaggcctgagccctcggctgcctgggagcgcgacgcggtgccagggcttccccgctttgtcgctggggctggggcgcggcggatttacgatccagttcaccccggcaggaaacgttcagaaccacccccgcgctgcggtctacaaagccccggagtccgcaggcgggaggagtcggatccccgacactgtcgggctccctcccgcccagctcccgcatcaggccgtcgccggcctcatgaggaccccccggccggggcggagaaccgggcactgcccggaccgcgatcctgccgcggccttagaacgttagacaggtcagtgcgctggcacgcccggcggccgaggtgtgggcaggagcggcgtcctcctggcctcgcgcatcgtgcccgtggctcaacgaggccacccgagggtcaccgaggccgggcacccgcgagcgcgggcgcgacaccgtgccttccctgacccgccaggtgcagtacagccgcccctccgcagcaccctggcccggctgctgcccgtggggtgggggtggggtccccgagggctgcgcacccaagatactgcatgtcaccacggcaagccttgggtgtatgcggaagcccagaggcgagagagaggcggaagaaaggaggccgggagacctttggcgtgagcatgagggaaggggtgcgcgccgtgcggagcggagatggctggccttgggtacctgcgcgagcctcggaggcggcggggtccagagtcccggccctcacgttctctgagagcctggtcacctctcaccctcccccatatcaggatgcggctagaccgccgggccctctatgcgctagtcttgctgctcgcctgcgcctcgctgggtctcctgtactccagcacccgaaacgcgccaagtctcccgaaccctctggcattgtggtcgcccccacaaggtcccccgagactcgatctgctagaccttgcccctgagcctcgctacgcacacatcccggtcaggatcaaggagcaagtggtggggtgagtgcggaccgcggcgtggcggcggcgacagcgcagaacatgctggagggggtggccggggagcttttgtttcctccagtgctagactcggacgctgcttactgctgactggttgggtgcagttatcagggaggtggagagggctaccgaagcttgaactgggggggagacaggggcgcggcaaatctatcctcctcaaccttgtcgccgccactggagtgtgggaggatgtacaggcaaaagagcacccggagactgcctgctgtcttgatttagacttgagattccagaagggttcctggatggcggctacgtagacatcctagtaattggccctagttcgcacctctgtaacgcacagatttaagggataagctgtctctcacctgtgggcagagttgagggatcaaagtgtgcagcgctgtgcgttttgtgagataaatggagcttaggtacctacctggactctgaagccgcttctcctccctttaggctgctggctcagaacaactgcagttgtgaatccaagggaggaagccttcccttgccctttctgagacaggttcgggcggttgacctcactaaagcctttgacgctgaggagctgagggctgtttctgtcgccagggagcaggaataccaggccttccttgcaaggtaccagtgagagaggaggatccagctcttcccagggaggccagtggtgtcgtagtgaccccgttggaagaaagagctcctctcctactgactcctttatcacctctacactacaggagccggtccctggctgaccagctgctgatagctcccgccaactcccccttacagtaccccctgcagggtgtggaggttcagcccctcaggagcatcctggtgccaggtaaagaaggaaggtctcaggggttaagtcaggtcgtgagggtggcggagctacaggctagcaggtggagatctctgacaaagagatatggaggcagagggactctaaggtcgtcaggtattgcaggaatacctgggaggcttatgagtaaatatcccttctttgatagctagctagtcaggacaagccacggaagaaatgccttttttttttttttgatgggaaggagttaagaagcagtcacttgagttctgtgggttgtgcacagtcctgctgaggcctccacgggagagtcagacataaagttctgtatggcacgtggtggcagggggagagaaaatgaggaagaattcaagactgtctgtgaaattctggcttcctcattctacctcccagggctaagtctgcaggaagcttctgtccaggagatataccaggtgagagaaaccggtaaagaggtgggcttggagaatgaagaattcttgatgggttacagagccccactccacacccacacccacacccaggcatgcagggttgaaaaggcaagaggcgggtcagggacctaaggctgctgtctctcaccctcttccaggtgaacctgagtgcttctctaggcacctgggacgtggcaggggaagtaacaggagtgactctcacgggagaggggcaaccggatctcacccttgccagcccagttctggataaactcaaccggcagctgcaactggtgacttacagcagccggagctaccaggccaacacagcagacacaggtgggaggcccgaggaggggtagggacagactgagagaacagaaagaaccagaaaagcaaatgaccacgtgtgggaggccctcgggcaatggccagaacagcctagacacacaatgaatgttgcaagtgggccagcagggccaggagtcagaggagcctttgtttatctagggccaaaacaggccagggagaaaccagagctggagagcattcccacttctgtctgtcatcacggctccaggaagtgacctgttcctggctgtttctagcccaacacttaccttgccaagctccctcacccttcctcctttttttctccaaaactggcttttctgaacctgcgcctaccttagggcctttgcatctgccgttttcaggaatgtttttgcctaagtttgtttgtttgctttcaaggttggctccctcttgatgtttacatctgggctcagacgtctcctgtttgcttgaaacaatgtcccttgcctccgcttttacactagacgtttcttatttactcagcctaagctttgacgttgtaaaatatggacaatttacttttctgtgcctaagcttagtttcctgcaatagtttatctagtaagattaccatgaagattaaatggcttcatctatttagaacacattttcaatttttttgttttgttttgttttgttttgaaaaccatctcatttatttagctctgtctggcttcagactcactattcagcagagcctgattcctgctccttggtgttgctacctcccaaatcccaggattacagatgtatgccaccacacccaatttacagaaaaatttaaatctgtgcagcacagaggaaagtatagtgatccatgcctgtaatgttcgtacttgggaagccataggaggaggagagaaatttcaagggtagcctaggctacatagcaagagcgtgcgtgtgtgtgtgtgtgtgtgtgtgtgtgtatttgtgtgtgtgtgtgtgtgtgaggcatgtagtaaatgctcagtaaagattaacttgttctgttttgtttttcgagacagggtctctctgtgtagccctggctgtcctggaacgcactctgtagaccaggctggcctcgaactcagaaatccacctgcctctgcctcccaagtgctgggattaaaggcgtgcgccaccactgcccggctgtaaagattaacttttttaaaaagttatcttttatctatgtgtggtgatgtttatctatataatcctagcacttaggaaactgagacaggtagaattgccttagtgttggaacaagcctgggttatatgcaataagtaccaaaccagccagggctacaaagcaagacccagactcgagaaaccaaagtggggtgggaggcgtcgagaatctcattgtctttgttccacctcctaagctgtaaggtttctgggcagaagctgtagctcaacggataccatgctatacctagcatgcacaagaccaggggttgagttcccagcactgcacagatgctggcacccctacatgatgtctctccttaggagacatctgtagataataacacctgcaatcgcactcaataggcacaggcaggaggttccaaaaatttaaggtcatcctccgcaaccatggtgctgggaggagagctgggtgttcccagctgggcggtagagtgcttgccaagcacgtgttagtctctaagttcaattcctaataccacaaaacaacatgcaagctccacagaagtcagaacggtatgatcttgcccaccaaggcctgaaaaggcagaacacagattaagagtttaaatactggccgctgaaaggagagtgctcttctagccttaagggcccaattccacctcctttcttcccagtccggttctccaccaagggacatgaagttgccttcaccatcctcgtaagacaccctcccaacccccggctgtacccaccatcatccctaccccaaggaggtgaggctgaggctccagggattaggaaagtaaagagggggttggccctgggggtgggggtggggctgctttcccactctttctccccccccccnnnnnnnnnnnnnnnnnnnnnnnnnnnnnnnnnnnnnnnnnnnnnnnnnnnnnnnnnnnnnnnnccggcccgcccccctcacactggccaatacaccttgctttcagccgagtacaacatcagtgctctggttaccattgccaccaagacttttcttcgttatgatcgactacggacactcattgccagcatccgacgcttttaccctacggtcaccatagtcatcgctgacgacagtgacaaaccggagcgcattagcgacccacacgtggagcactacttcatgcccttcggcaaggtgcgctgcccgcaaagcagagcgggggcgccagaggactctgggaagggggcgtgcctcagccaacagcttccagggtgctgattaaggaccacttccctcaaacaaatgtgtgcctatcacaagggcttcggaatcaggaatcctgcctatcttattcgttccgcattcttgaaatggtgcttaatacctatagcaatacaatggatgtatgcacgaagcaatgaaatacaagacccttcccccaaagggctcaaaatgtctaggaaaagggttgggaccctctgggaagttttaaacctagtttccggtcatcggaaagctctaagaagtctagagcaggacacaggctgttttgagtgcggggagagggaaaaagatgtcaggctttttctgttcccaaccatatacaactcttctagggttggttcgcaggtcggaacctggcggtgtcccaagtaaccaccaaatacgtgctgtgggtggacgacgactttgtcttcacggcgcgcacgcggctggagaagcttgtggacgtgctcgagaagacgcccctggacctggtaggggaggagagccggatgtggggtgggagacgggagagcgggacgtccaaaggtgaagcgagtctggggggtagtgtgggccctgtgtgtttcgatagggcgagggtggggcaggggcgcggggaggaagcgttctactctcggggacctggtcttagctggagcatcctctcgcctcctgcaggtagggggcgcggtgcgggagatctcgggctacgctaccacctaccggcagctgctgagtgtggagccgggcgccccaggccttgggaactgcttccggcaaaagcagggcttccaccacgagctcgttggcttcccaagttgtgtggtcacagacggcgtggtcaacttcttcctggcgcgcacagacaaagtgcgccaagtgggctttgacccacgcctcaaccgggtggcacatctgggtgagcggcgccccctcctggcagtgcgtaggaatgggaaggaccaggcgcggttctgccacttgaaccctcccaccaccctctgcgctttccctagagcagtttagagaggctgacaaaggtctgcacttgaaacctccacttccttctgccggacatcccacttaacacctcacacagcgcaggtgccggtcagccttgaacttcctctccactgcaaaggttacctttctgccagctgcttccccagttcagaccctactcagagggagtgaactggtatttattgaaatgaaccccacacgagagtaaatcagagcaaaagaagctagagtgtcctcagcaacatagtttttccttagctgccctctgagccctgtatttcagttcagcgtaaggattgccgtctctcccctcaggagcttttaaccgttgctctccccaccctcaccccagaattcttcctggatggacttggtttccttcgtgttggctcctgctctgatgttgttgtggatcatgcatcgaaggtgaagctgccgtggacagcaaaagacccaggagctgaaacttatgcccgttaccggtacccgggatcactggaccaaagtcaagtggccaaacatcgcctactcttcttcaaacaccggctacagtgcatgaccgccgagtgacgtctgatttgggccttcacactgtcaggctgggcctgcctccttgttccttccaggattatccaccaccacctccatccctgtgcaccccactgatgaacaccctggcttcccgatcctctccaccaatctgattcctaacaggggcttgtcctggtgacacccttcctttctgtgagcgaccagaggcccgatggagccatatcctcttccccccacagccagtgccaagtcctcccacaaccccattcctatggggcaggaaatggggaggttcactttccaagtgccaaagagcccagaaggactctaagaccctcaagtggaaacactctcacctcccgaggtgggcagggaaactcccaatttgcaaccccagggacatgcaccccaccccagctctggatccagcaccgtgtgtaccggctcccacatacccccacagaaagcactgtgactgtagttctgtggggctggtgaacacacggtgaaagccatttttacttgtgtctctgtggtactttgggtgtggcggggcttgtggggggatgggagagctccacgtgtagatgccgagacccactccacgggcttctggtattctcggcttcattttattggttgcattggggtggggggagctcaaggaccgtggccttcctcacacgcggactgttgggccctctcacactctaagtgcatggtcagacccacaccgtgcaaatctttgggccagtaggtttctggagaagaaaagtggacagttagggaatattgggtaccatattccctgagacctaccagtaatctggtagcatgtcacccctttggaaaccttagttcagttctccacccttggtaaagggtgccccagactctttttttttaatatttatttttattattgtatattattaatataatatataatattattctactgtagttgacttcagtcacaccagaggatggcatcagatctcattatgggtggttgtgagccaccatgtggttgctgggacttgaactggggacctttggaagagcagtcagtgctcttacccgctgagccatctcaccagcctgccccagactcttgaacttggctaggttgtttgtttgtttgtttgtttgtttgtttgttggatggatggatagattggttcatttgggttttgaggtagggtctctctatgtagctctgactgccctagaccaggctggtctcagactcatagaaatgctcctgcctctgcctcccatgtgctgggggatcacagatgtgcctgcccctgccctccaatctactaggcagcttctctctacttcccccttgatcttcctcagtcccttctctgaatccctgtccccaggtcctcatctattccatactctagcccagcacctcctggctcccactcttgatgctcctcccccttaccagcctctccagtgcatgtgcagcagcatcctggacactcacaaagagttgttctggagacacgctatccaggagtctcgcccgggtcaaggtctcgagcaccaaggctgtgtgggaaaagtgtcaggggctggggcctctacatccaccctacaagtgtccagtcagtcctccacctcccaaccctctattcttcactccacgaaccattacactgagccaagagaaggtagatcccatcgtcctggcaccgcctggtgagctgcaggaatcaaagaggggttaaacccaaatcgagggtgcaagagggatgactgggagcttttcctgagtttgaccactccctcacctggaccacttcccgggcccctgcagcatctacaaaagtgataccactgaagtctaggatcgccactctgacaggctcagcacctaaggagggaggaagcagatgtgccagccaactccgtggttcatgaccgaatctctctccctctgtcagcccacctcacctttgtcaggtacactacctggctgtaaacaaagacaacaagatcacataagtgccatcctcagaacccactggcctcccaaacccagagggtccacgttcctcctccaccaaaatcctcaccttgattctttctccaagccccagatgccactccaagattcggtggaactgcccacgggttgcaaagtagaggggtgctggataactcaggatacaaagacctggaacttggaggagctaaggggtaagactgttagaaacggcctgtctgatcactcctgccttcttaggctatatacagcccacccaccttacggctctctctgattggcctgtagagctccgtcccctcagccaatccaagctccaggcactgcaccctaggaaagaagctcaagtcagagtcccagcctcagcctggcctggtctagcctggctgtagtcaccacagggtacctatcccccttccctcatttggtgcccatctctgctcacctctgagttctgcagaccactgtcatcatggagacgaccacacccacagccaggcccaggtccacattcagggtcacgacagccacccacgtgactatccacacagcctgagggacatggatatgggtggattctccagaaggaacggaggttcaaggacaaatatgagcaagggaaaggaagcgtggtggacagacgagttcacttaagcctacacaccaaatataacaccagaccctgggcaacccgggagtctggattgggggtgtagttcagtggtagggaactctcctaatatttatgaggttctgggttcaatcttcagaacccactccaaaatacctccaaacaaacacgcaggcatggcgaatcacatcccaccctctcctttcccccaatgtatgtatgaggtctgtatgttggaggttgcacggattaaagaatttagggtggtcaactttggtccatggcaaaaccggggcgcttggggggttagcaacctggcatattgccatttctcacaaagtccacacggctgatgtgccagagctgcggaagttcttgcatctggaagaacatctggcgcatgctggagatattgatgcaagccaggacagccttgagatggagaagataggcctttgtcaggacaaaggttccactcacacacgcagcgagcgtgcacctctttcccaccctaccttgggcaggtagtagaagaagggccccagccacagcagcgctgccaggaccactgcgcaggagaagaggcctgccagctgcaggaaggaaagacagagacaagacagggagactcctccaccccgacccgagtgggagctgctctccctggccgactagcctgtctcatcttcttcaaaactctccctcctcccccagaaaagtctccttcctcccaaaactccatcaacacagaaaatgcccttctcaccccgttcttgatgttctgccaatcacacttaacccctccccccagctaaatgtctatcacttgccagtccctcccagatgtgcacagttcaacctccccattcttatagcccatcgccatctgcaaaggtcttttggtactgatgctttgagaagcaggctagccatctgtgtaggatatagcagggaaaacaaaacatataaaggtaggagtggtatgtaaccattctttctttttgtttactgttgtggtttggttgttttggtttttgggtttttaaaaggtttatttattttatgtacatgactacactgtcgctgtcttcagacacaccagaagagggcatctggcagggaaatggtggtgtacaccttttatcccaacacttgggaggcagaggcaggtggatttctgagttcaaagccagcctggtctacagagtgagttccaggacatccagagctacacagagaaaccctgtctcgaaacaaacaaataaacaaacaaagagggcatcagatcccattacagatggttgtgagccaccatgtggttgctgggaattgaactcaggacctctggaaaagtggccagtgctcttaactgctgagccatctctccaacccgaaggttttggttttattttgttttgatttgttttgttttgtttttgagatccttatgagaaccatcagaattattttatctcctacatttataggtatgtgtgtgtgtgtttgaatgtgcgtagaagcacaagtgtgtgcagggacaacatacctgtgtcccagttcttgtagaattccacactgggcctcctcccccatcaccttattcatcgaggcaggatctctcagctgaacccaaagctcttgggttcctgcccccatccctgccttctagacaggtcaccatacccatggagctggaggcttgaacccctgtgctaatgcttctgctttaaccactgagccatctccacagaatggtggcagtcccctttccacagtcactatgtgccccagcctgccttgagccccagacaatcctctgctctgtcagccttcctagttccagaactctgggtatgtaatacaacaccttgatgttactgtttttatttttaatcaggtctgaggcattgtagcttttgcttacggccaacagaggtcctcatggagttccgttattgtctaaccctcctcttcataatcccattaccatcctggaatatgtagatgctaaatcctgggttatccacctgttccccactctctcctgccacccctgttgaatgtcccatcctttctcctcatcctctcaaggatacccttacctgtgtattcccaccagcatccactaataagctggttgtagccagtgtggccgagttgggaaagcaagagaagagagaagaaatgaggttggagacaccgtgggccaggagttcctagaaggacacagcaggatgaagatggggaagacgtaggcacggggtggggtggggtggggaggagtgaggctaaggggcttaactctgaaaagggatgacattcacaattaagtcacacctgattgggctcaatagtgtagctgtacttgtctgcatagatggaggccagagaggtggacacagcaaaagtcaccaacgagataggcagggagtcggccagtatcctgggcagctcatccagggtggggaggaggggttggggaaatctagggaaggagaaagccaggataagggtgggtccgccgccggtgctacagggaacagaggagacaggaaacaggaaggggcggggcaggggaggggtatcttgggagaggtgggcgaagtctttctcttaccctccaggcaatggtcccactacctggacattgtatcttgtgtccagggaagaggtgaagcagagcaccgtagccagaagcacctgaaaacgatcacaccttttgtttcgttttgtttgtttttgtgtgtgtgtttgtgttgggtttttgtttgtttgtttgttttgttttgtttttgagacaggctgtcctggaactcactttgtagactggcctcgaactcagaaatccgcctgcctcacaagtgcgtgtgccaccactgcccggtttagaagaaagaggtttaacatgaaagagaatccctttgcgagtgtgggggcctctctagagtgtagcagctgatgaggccacagactaactcacctacactgaaggaagagtccgtgtttgcccggagagagggacaaaggatctaagaggaggtcctttgggattgatggacacaaaagacacacttgagccaagtgagccattctaagcggagagcacatgtgagttgcctgtggaaagctgtggcattcatttacactggaggagttatctgggcgggcagtgaaaggaattacagtgagggtccccgaggagagaaaaagtgcagtgggaaggaaggagaggagcaaagagaggcctgacgctcgactccggtagtggaacagttcaggtgtgtgtatgtgtagcgggggagttcggatggctcaactgctctggaaagatgcttggaaaagtacgcgtcaccgtgatctctcgcttgtgactcctgagatttccacaagggggcgacagcctctagatctcactggatggggaggatccggatacagcggggtccagggatctagagccgccctcaccatgacaacttctcctgggattggagtaagtagcctgtcccggaatcgcacgtttagttccttgactggcactagcaacaccaggctgagcgccgagatggtcacttctgcaggactgctctgggacagggcgctgagcaccgcggccagcgtctgcgggcagggacagtgtgcaaaggccgggtaccagcgttaactgaccccgagagactcaataccaacccactaggccggggcaaaactctctttccagaggccatcaaggcttctacgtccccagcgctctcacgcagcgccatagttccttgcattcattccttgttgcctatcttaaccccttcacccaccgtccctatcgagccaccctttcccgtgacatctagaaacctctttccccacccccaccttgaagagagaaaagcagccgatctggcgtgggagagacaatcccaagaggcttggcagctgggacaccagcacgtgcagcgcggccccgctggtcagcgccttgatcacaggctccgatagaaaggtggacaggacaccaagctgcagcacgaacatccccagctgtagagaaggcggcgacaggtggggtcggggcgtggtgcgaaacctccaacagaccagcccgcacagtgcaccagcttccccacgatatatctgccactccggactggaagccaagttcaatggtgtttttatcctcccctctatcctctggctcaattgtgttggtccttttcggtggattcatctaaggtcctcacccgggtcgagtcctcgcttaccattagcgccccactcccgaaggccacagcggctgccgccccaactctccgagcttccagttgctccctttcgattccactgaggttccccgcgaggggttcgggcaccaccctctcgactacagaaccggtcattagactgagtactgcgaaagttcctgcagtcatgggccaaatgcagagattagcattcgtgcagcctggggcagagcagcagccgtgactcgcacagttctggagtctcacatgcgtcccatccgctctcttagaagaccttaggatcacgagctggtgcagcagccaggaaccgatgcggaagagcgcacccatggaaccagtgggcaaggagaaaagagtgtacccactggcaaaaaaaaaaaaaaaaaaaaaaaaaaaaaaaaaagtgccccttcctcacgctctcactggaccgtgagccactgtgcacctctttcccttcaaggtcatggtcccttcaagttgtttcttttaaccaaatgtcacaggggacaaggagatccttgtaaactgtcgcctctatacccactccaacaagcctagggaggcgacagagttctgtgcaaagggggtggaaatgggttgtggatcccaagagaggtggcaagtaggagagggaagggggcagaggggaatacagccccaaagcttccaagtagcagccttgctaaggtgtgtttgacccctgcttttaatcccagcacgcaagtggcagaggcaggatctctgagtttaagaccacctggtctgtggggagcttcagaccagctaagactataaaatgagaccctatctcaagggatgagggtatgcctcaagtccctgtctattttcatcccaaagagaagcaaagtcatgagcagtgtggccactcaccagtggacaggtgtctcccagtgcccagtaaactgtagatgaggacaggaaagaaagacgtgtagagtccgaaaaccgggggcaccgaggtcaggagggcaaaagccatgcctggtagaaaagtagaaggaatcggggtggggtggggtggggatgggatgagggtggggatggtggggtgcacaacctccagatactgcccttcccaacactcttgggttgacaccagatactatcaatcatggccccggagggaacggaaaggttaattaatgggcctcagtgggaggtcgtgaggctgacaaggtcacagatccttgcccacgtcctgggtggcaggttttgtgcctctctacaattctctgaggcagaacagagtccagtatatctcgcagaattgcacagatgtggaggaatgggggtggggaattatgatggagtcccttagtcctctcaaaccgaacctcaagctcctcctctctgatcctcccccatgcagggacacaagtcctccacatcactgctggactctcagcttcccagggccctgccctgaaagccccccataacttggaattccaacgggctgaagttggggactcttaccctggggcacgtgcacaacgcccacggttactccagccacagcatctccgagcagccaggctcgccagcggtattggggcagccaacgcagcgggggcagccgtgccagcagcacgcgccacgcccccggcccagaacaggcgctggctcgcctcctccgcagcctgcacaagcagggtaggcagggctccgctggcagctccggctccggctctgcgcccccgaagagctcctggaaccgagcgtgggtgagaggttctctgaaccttgagctcagcggagacttaaggtcagaaacctcttccggatctgagcaggtcccagaggcaagtggcccactcattttgtccttggccccctgcagcatctcctggtcttaaataccctctgttccatcagctctgagcccgcctctataaagcagggtccaatccggacctgtagggagtactctctagagtacctccttgggtcaggcttgggtggaaaaagtccctgtgttaggcgtttcctcagatatcctttcttagctctgcctaagaacctgggggcctgctgtgaggatgttgaggaaccatagggagataagagacccacagtcacttccagtgaccctcatcgcttcgcttctcagggactgggaggcattttttttttcttcatttgcactttgagcaaagacagagctggttccttttgggtcacaggtcttctttccctgagcctctgcattctcaccaccaccaccaccaccaccactgctggagcacaaaattcacagccagttgggattccccactcaaatcccattcctcatgtggcaaacttgccccagtaaagtacaagaggccttactgttttataagcatggtgaatgcgacagggtgcatggtgaatgggacagggacagggacccactccaccctctctaatgcagatggctgggtttgatttaggggaaagactgaattaacaaagacatttttatctatttgttaggagccccaaagtcctctaatactgttccttacatccagtgttattctccaagtaggcatttagaagtacacgattaaactaagggcatgccgtgtgctgctggaaccgctgcccgttgctgccttgggcaccttgtcaccactggcagtggtgggcctggctgccgcaggagcatgaagggtccagccacccacctcatgtacccctgaagagacacaaaggttctgggccccaggatttcactgtttgccgtcatccactcagagatgcttcggcacccccatcaccctgtggttcccccagtccctgaccccaaagcccagggtggggtccagagagggtgggcctctcttcttcaattcctcctattgttccccagaaatcttatctgggcttcacgtcctgtcccccccttaaagatccctcccctcattgtcagccacagagacctgaggctcccatatctcccccccccaccccccaccccagtagtctattgtctgctgaggaagccccagtgcacgtgactgagcccaggggactgacggacacggtggacacacagatacatagggacccagaggcagtcatatgggtctccacacacttgcctgtctctgttccagaggctgtgccagaagctgggaggggcagacatcttcagctctccacattagctccgaatttaaagaatctattcctactcagcgtgcacacaccttacccctttccctcaagatggcaaagaggactccagagctgctccatcctcccattcttcagcagagcatggatgctcagaggaaaggtacccggggtgttttgtgcttttagatctagatactgtgagtggtagggggtcagagaacagtgagccttctggtggagtctgaaccaaaggatagatctagaacccagggccctgaataaaggggagaatacattaagagatattaagattttccctaagcctgaggtctggagtgagagatgc

SEQ ID NO: 1309 - DNA, 2118 bp, Mus musculus
gcgcgccgtgcggagcggagatggctggccttgggtacctgcgcgagcctcggaggcggcggggtccagagtcccggccctcacgttctctgagagcctggtcacctctcaccctcccccatatcaggatgcggctagaccgccgggccctctatgcgctagtcttgctgctcgcctgcgcctcgctgggtctcctgtactccagcacccgaaacgcgccaagtctcccgaaccctctggcattgtggtcgcccccacaaggtcccccgagactcgatctgctagaccttgcccctgagcctcgctacgcacacatcccggtcaggatcaaggagcaagtggtggggctgctggctcagaacaactgcagttgtgaatccaagggaggaagccttcccttgccctttctgagacaggttcgggcggttgacctcactaaagcctttgacgctgaggagctgagggctgtttctgtcgccagggagcaggaataccaggccttccttgcaaggagccggtccctggctgaccagctgctgatagctcccgccaactcccccttacagtaccccctgcagggtgtggaggttcagcccctcaggagcatcctggtgccagggctaagtctgcaggaagcttctgtccaggagatataccaggtgaacctgagtgcttctctaggcacctgggacgtggcaggggaagtaacaggagtgactctcacgggagaggggcaaccggatctcacccttgccagcccagttctggataaactcaaccggcagctgcaactggtgacttacagcagccggagctaccaggccaacacagcagacacagtccggttctccaccaagggacatgaagttgccttcaccatcctcgtaagacaccctcccaacccccggctgtacccaccatcatccctaccccaaggagccgagtacaacatcagtgctctggttaccattgccaccaagacttttcttcgttatgatcgactacggacactcattgccagcatccgacgcttttaccctacggtcaccatagtcatcgctgacgacagtgacaaaccggagcgcattagcgacccacacgtggagcactacttcatgcccttcggcaagggttggttcgcaggtcggaacctggcggtgtcccaagtaaccaccaaatacgtgctgtgggtggacgacgactttgtcttcacggcgcgcacgcggctggagaagcttgtggacgtgctcgagaagacgcccctggacctggtagggggcgcggtgcgggagatctcgggctacgctaccacctaccggcagctgctgagtgtggagccgggcgccccaggccttgggaactgcttccggcaaaagcagggcttccaccacgagctcgttggcttcccaagttgtgtggtcacagacggcgtggtcaacttcttcctggcgcgcacagacaaagtgcgccaagtgggctttgacccacgcctcaaccgggtggcacatctggaattcttcctggatggacttggtttccttcgtgttggctcctgctctgatgttgttgtggatcatgcatcgaaggtgaagctgccgtggacagcaaaagacccaggagctgaaacttatgcccgttaccggtacccgggatcactggaccaaagtcaagtggccaaacatcgcctactcttcttcaaacaccggctacagtgcatgaccgccgagtgacgtctgatttgggccttcacactgtcaggctgggcctgcctccttgttccttccaggattatccaccaccacctccatccctgtgcaccccactgatgaacaccctggcttcccgatcctctccaccaatctgattcctaacaggggcttgtcctggtgacacccttcctttctgtgagcgaccagaggcccgatggagccatatcctcttccccccacagccagtgccaagtcctcccacaaccccattcctatggggcaggaaatggggaggttcactttccaagtgccaaagagcccagaaggactctaagaccctcaagtggaaacactctcacctcccgaggtgggcagggaaactcccaatttgcaaccccagggacatgca

SEQ ID NO: 1310 - protein, 563 aa, Mus musculus
MAGLGYLREPRRRRGPESRPSRSLRAWSPLTLPHIRMRLDRRALYALVLLLACASLGLKSTRNAPSLPNPLALWSPPQGPPRLDLLDLAPEPRYAHIPVRIKEQVVGLLAQNNCSCESKGGSLPLPFLRQVRAVDLTKAFDAEELRAVSVAREQEYQAFLARSRSLADQLLIAPANSPLQYPLQGVEVQPLRSILVPGLSLQEASVQEIYQVNLSASLGTWDVAGEVTGVTLTGEGQPDLTLDVLDKLNRQLQLVTYSSRSYQANTADTVRFSTKGHEVAFTILVRHPPNPRLYPPSSLPQGAEYNISALVTIATKTFLRYDRLRTLIASIRRFYPTVTIVIADDSDKPERISDPHVEHYFMPFGKGWFAGRNLAVSQVTTKYVLWVDDDFVFTARTRLEKLVDVLEKTPLDLVGGAVREISGYATYQLLSVEPGAPGLGNCFRQKQGFHHELVGFPSCVVTDGVVNFFLARTDKVRQVGFDPRLNRVAHLEFFLDGLGFLRVGSCSDVVVDHASKVKLPWTAKDPGAETYARYRYPGSLDQSQVAKHRLLFFKHRLQCMTAE

SEQ ID NO: 1311 - DNA, 1498 bp, Mus musculus
gtcggatccccgacactgtcgggctccctcccgcccagctcccgcatcaggccgtcgccggcctcatgaggaccccccggccggggcggagaaccgggcactgcccggaccgcgatcctgccgcggccttagaacgttagacaggatgcggctagaccgccgggccctctatgcgctagtcttgctgctcgcctgcgcctcgctgggtctcctgtactccagcacccgaaacgcgccaagtctcccgaaccctctggcattgtggtcgcccccacaaggtcccccgagactcgatctgctagaccttgcccctgagcctcgctacgcacacatcccggtcaggatcaaggagcaagtggtggggctgctggctcagaacaactgcagttgtgaatccaagggaggaagccttcccttgccctttctgagacaggttcgggcggttgacctcactaaagcctttgacgctgaggagctgagggctgtttctgtcgccagggagcaggaataccaggccttccttgcaaggagccggtccctggctgaccagctgctgatagctcccgccaactcccccttacagtaccccctgcagggtgtggaggttcagcccctcaggagcatcctggtgccagggctaagtctgcaggaagcttctgtccaggagatataccaggtgaacctgagtgcttctctaggcacctgggacgtggcaggggaagtaacaggagtgactctcacgggagaggggcaaccggatctcacccttgccagcccagttctggataaactcaaccggcagctgcaactggtgacttacagcagccggagctaccaggccaacacagcagacacaggtgggaggcccgaggaggggtagggacagactgagagaacagaaagaaccagaaaagcaaatgaccacgtgtgggaggccctcgggcaatggccagaacagcctagacacacaatgaatgttgcaagtgggccagcagggccaggagtcagaggagcctttgtttatctagggccaaaacaggccagggagaaaccagagctggagagcattcccacttctgtctgtcatcacggctccaggaagtgacctgttcctggctgtttctagcccaacacttaccttgccaagctccctcacccttcctcctttttttctccaaaactggcttttctgaacctgcgcctaccttagggcctttgcatctgccgttttcaggaatgtttttgcctaagtttgtttgtttgctttcaaggttggctccctcttgatgtttacatctgggctcagacgtctcctgtttgcttgaaacaatgtcccttgcctccgcttttacactagacgtttcttatttactcagcctaagctttgacgttgtaaaatatggacaatttacttttctgtgcctaagcttagtttcctgcaatagtttatctagtaagattaccatgaagattaaatggcttcatctatttagaacac

SEQ ID NO: 1312 - protein, 240 aa, Mus musculus
MRLDRRALYALVLLLACASLGLKSTRNAPSLPNPLALWSPPQGPPRLDLLDLAPEPRYAHIPVRIKEQVVGLLAQNNCSCESKGGSLPLPFLRQVRAVDLTKAFDAEELRAVSVAREQEYQAFLARSRSLADQLLIAPANSPLQYPLQGVEVQPLRSILVPGLSLQEASVQEIYQVNLSASLGTWDVAGEVTGVTLTGEGQPDLTLDVLDKLNRQLQLVTYSSRSYQANTADTGGRPEEG

SEQ ID NO: 1313 - DNA, 1064 bp, Mus musculus
gaagaaaggaggccgggagacctttggcgtgagcatgagggaaggggtgcgcgccgtgcggagcggagatggctggccttgggtacctgcgcgagcctcggaggcggcggggtccagagtcccggccctcacgttctctgagagcctggtcacctctcaccctcccccatatcaggatgcggctagaccgccgggccctctatgcgctagtcttgctgctcgcctgcgcctcgctgggtctcctgtactccagcacccgaaacgcgccaagtctcccgaaccctctggcattgtggtcgcccccacaaggtcccccgagactcgatctgctagaccttgcccctgagcctcgctacgcacacatcccggtcaggatcaaggagcaagtggtggggctgctggctcagaacaactgcagttgtgaatccaagggaggaagccttcccttgccctttctgagacaggttcgggcggttgacctcactaaagcctttgacgctgaggagctgagggctgtttctgtcgccagggagcaggaataccaggccttccttgcaaggagccggtccctggctgaccagctgctgatagctcccgccaactcccccttacagtaccccctgcagggtgtggaggttcagcccctcaggagcatcctggtgccagggctaagtctgcaggaagcttctgtccaggagatataccaggtgaacctgagtgcttctctaggcacctgggacgtggcaggggaagtaacaggagtgactctcacgggagaggggcaaccggatctcacccttgccagcccagttctggataaactcaaccggcagctgcaactggtgacttacagcagccggagctaccaggccaacacagcagacacaggtgggaggcccgaggaggggtagggacagactgagagaacagaaagaaccagaaaagcaaatgaccacgtgtgggaggccctcgggcaatggccagaacagcctagacacacaatgaatgttgcaagtgggccagcagggccaggagtcagaggagcctttgtttatctagggcca

SEQ ID NO: 1314 - protein, 276 aa, Mus musculus
MAGLGYLREPRRRRGPESRPSRSLRAWSPLTLPHIRMRLDRRALYALVLLLACASLGLKSTRNAPSLPNPLALWSPPQGPPRLDLLDLAPEPRYAHIPVRIKEQVVGLLAQNNCSCESKGGSLPLPFLRQVRAVDLTKAFDAEELRAVSVAREQEYQAFLARSRSLADQLLIAPANSPLQYPLQGVEVQPLRSILVPGLSLQEASVQEIYQVNLSASLGTWDVAGEVTGVTLTGEGQPDLTLDVLDKLNRQLQLVTYSSRSYQANTADTGGRPEEG

SEQ ID NO: 1315 - DNA, 27562 bp, Homo sapiens
  misc_feature (1)...(27562): n = A,T,C or G
ggtggaaaaaagaaagtagaaccttagctatcaaactgtagcatggggtaacagtcattgctttcactttggcctggctagcaaaaggtggccttgttatgtaaataaagccccttttgtagtcaaaataaaaaatctttcctccttttttttcttttgctggccattttttgcccccaccacaccaccttttttgtgtgtgggggaatttaggcagttcagaggacttgttccccataatttggaacttcctttgtatttgatcaagttggatagagttgaccaaacccaatgggaaaaagaccgaaacaacaacaaaaacagaaacaaacaaacaacaacaacaacaaaaataggtaaacttatgtgatcacttagtgctctaatggtaaggagaaattaagaccagctggttgttaattttcactttagccacgacaatcctcaattcagttacttacctagggatgggtctcaggctgtagactgctctctaccactttagaagcctgaaaaaaactcaccttccctgttggaagcgagctgaaactctataaaggagttacctgccttccatcatcatggaaacaggaaatcttgccttccttattggaagcagtaaaactccaaaaaataagaggagttgcacagcaaaataaactttagatttcaaccaaatttggggagatcagggattttctggagggggtgctcttaggcctcagcaaattgtcctattggtttgagccatgaagttagctcatgctggtcccaagcactgatagatttgtcaaaggtcaggggcatctccactcagaatccccccatggttaccaaaatgtgaaccccaaaaatctgaaacaggtctcagttaattttgaaagtttattttgccaaggttgaggacacatgcctgtggcacagccttaggaagtcctgatgacatgtccccaaggtggtcagagcagtttggtttttatgcattttagggagacatgagacatcaatcaacatatgtaagatgaacattagctcagtctggaaaggctggacaattcaaagcggggagggagcttccaggtcataggtagataagaagcaaatggttgtattcctttgaatttctgattagcctctcaaaaggaggcaatcagatatacatttatctcagtgagcagaggggtgactttgaatagaatgggaggcagccttgccctatgcagttcccagcttgactttgtcctttaacttagtgatttgggggggcccaagacttattttcctttcacagaagtatcatataatattgaaccaatagaatgtaagccatgtctgaaacacccaaagcccaagcgagcataaaaatcccagcctgccaccaaacactggaggacaagagcactactgtccctgcgtctctctggagtaactggacaatttcatgtaagtcgtgaggtctttacgactccctcgtgctggttagggtaaacaaaatccatgagcaaaagaatactttgatgaaaacagccaagaaaagctgaccaaatcctggcactaaagtagcatggggcttcccttttgttagttctcatcgccagctaattgagcaatacactgatttttattaacttgttgagtgcaaataaatgtgtgtatggcaagcattaactggctcacagttttcttggttgcctcttctgattgacatctttgaacttggtctttgctgtaatctaagcaaaaaatctaaattaaagaacaatgacataataattggcattcagtttaaatagatcaggcatatttataacagttcaccaagtatgtttattgcagcactgtttgtcatgaaaaggaagtgttaattaatatattcatttgatgtagtaatatgcaaaattttaaatgagacattttcatgtgcttttataaagagacctccaagatatatgtgtcatgtaaaaaagcagtatggggttccacgtgtatagtataatttctttcctgtttaaaaaaaaagtttataagtagacaatttgtagggtcacttccatcaaaaatggttgagtaaattcaagggaaaatccttccttcactccaaacagatcaaattaaaatgacagataatatatcccaaatatgtattaaaaagacaagccatgttcaataaacaaaataagcatcctttgaattgttaagggaaagataacagctgggggcttaagtcacaggtctgctgggctacacgacaagaaacagcacctgccaggaacccaggtcttttggaaaactcactggatgttctgatgcatgacagggggttgtataacgttgtgactgctagccgggctccatccatccatccagagccacttgcctagagtgattgagaagagcagagaggacaaggctagcccagccctgtccccagccctctaggctgccatgcagaattggactttgcctacagctggctgggggtaggatcaagcaacatactgtctggattttttgtttgtttgtttgttttgagatggagtctcgctctgtcgcccagcctggagtgcagtggcgcaatcttggctcactgcaacctccgcctcccgggttcacgccattctcctgccttagcctctctgagtagctgggactacaggtgcccgccaccacgcctggctaatttttttgtatttttagtagagatggggtttcactgtggtctcgatctcctgacctcgtgatccgcccgcctcagcctcccaaagtgctgggattacaagcgtgagccaccgcgcctggcctggatttctttttttaaatgtaatccccctgcctgtcaaatgtaaattctaggctgtggagacaggcttggcaccacttaacatgaaggcatgcagtggggagagagggaaacctacaactccaaagtggactggcaaatttagcacccattacaatcttttcctaatgaatctgactctgctggagtatgaaaaactgcattttctgaactccctctgagctagcgttccttgtgtcaatcacgtgcacacttgagaaatctgaattgggatagggcttaaatgggagaacgtgggaggaccttgagtggaaggtgtctgcttttctaatgtaaattgtggcagaggcattggggttcctcagctagtagtagcttcctggttttgaaagcttgctgcaccgggcatggtggctcatgcctgtaatcccagcactttgggaggccaaagcaggtggatcatttgaggtcaggagttcaagaccagcctggccaacatggtgaaaccctgtctcctctaaaaatacaaaaaattagccggacatggtggcaggcgcctgtaatcccagctacttgggaggctgaggcaggagaatcacttgaacccaggaggcagaggttgcagtgagccaagatcacaccactgcactccagcctaggcaacacagtgagactgcatattaaaaaagagagagagagagcttgctgcagttgtgaccccagttttgctgataccaacagagttgtgtgattctggaggcagggagctgtttctagaagttccgcctaaagcagtgcttctccattgagtttctatcggtgtctagggaagggcaagtctttgttgcataggcttgttctgttcatcataggacatttagctcagctgacacctgcccaccaattgctggcagctggcccagctattatgacaacccaaaatggccccacatatttccaaaagcctggggaagcactatcacccatggcgtaaaaaaaccaggccccaaatcacattgtaagccccctaataccaagaaataaacccctgtcatctacaatgtttctgtcagctacaatgaaccctaacaaggacacacacgtacaagaaattcacacacaaaaaacaagctagcaaactaaaatttcaaagctcttcatgaaaattaacataatgaaagataaaaatattaatacacaagataatttattctagagtaaacagaaataatagatcaactggagaaaaaaaattaaatatagtcatccctcatttctcaattatctgcagaggattggttccaagactcttgcaggtaccaaaatcccagaatgcttaagttccttatatgatatggtatattatttatatataatctatgtacacactcttctatactttaaatcatctctagtttctttatacctaatacaatgtaaatgctgtgcaaatcgttgttacactttaaaatttgtattattttcaattgctatattgttatttttttccaaatatttttgatcagcaggtggcagaactgcacttgttgaacccagagggcccactgtaagtatgtttaatatcctcaaagatgaggaaacaaaaagacatgacaactaaatacactaagtaaaaaatcagctgggcgtgttggtgagcacctgtagttccaccacttggaggccgagatggacttgagcccaggaggtggaggcttcagtaagccaagatcataccactgcccctcagcctgggcaacagagactcaaatctcaaaaaaaaaaaaagtcttaatgtctacaaaacatgagaaaaagagagagagaattaaaatcagtatttcggtattcagctgaggctaaatatcaccatcatagaatgaaatgctgagatacaagaactaatatgaagttctgttagaaagttttaattattaatatttcattatgaaaaaactttagtttttagaaagcatgacagttacacgctaaaacaatttctcagtaccgtcaccaaattattaaatagacattcactttcttttttgtttgttttcaagacggagtctcactcttgtcacccaggctggagtgcaatggcattatctcggctcactgcaacctccatctcctgggttcaagccattctcctgcctcagcctctggagtagctgggattacaggcgccagccaccacgcccagctaatttttgtatttttagtagagacgggctttaccatgttggccaggctggtctcgaactcctgagctcagatgatccgcccgcctccacctcccaaagtgctgagattacaggcatgagccaccgcacctggccaacactcactttcaactaaagtaaataaaggagtgatttttttctttttatttttactttgaaataatttcaaacttagatatttaaagaataatacagagcactcccacgtatcatttattcagcttcaccaatttttcacatttggtcacattttatcattttctctctatatataattctatataatttataataaatgtgattaattatcaaattaacaataaaatataaattatacattatatataccacacatatatattatataaatgtatcacatacacattactattatttattttttctgaacaatttgagagtagattgcagacatccttccactttaccctttaacactttaggtcatattctctaagaacagggatattttattacatatccacggttaccaactttgggaaatttaatatttaccatttatcttttaacaaagataaaacaacgtttatccgatcaactttccatattccaatttttttttttagaaaaaaaaagataggttcttgctctgttacccaagctggagtgcagtggtgcaatcatagctcactgcagcctcaaactcctaggctcaaggaatcctcccacctcagcctcccaagtagctggtactacagccacgtgctgccatacctggctaattttttaaaaagtttttgtagcccagccaggtggctcacacctgtgatcccaaaactttaggaggcccaggcagaaggactgcttgaggctagaagttgaagaccaacctgggcagcatagcaagactccatctctacaaaaaataaaaataaaaataaatttctgtaaagatgaaatctcattatattgcccaggctggtctcaaaggcctgatctcaagcgatcctcctactttggcctcccaaagtgctgagattacaggcatgaaccacctcacctggccccaattttttaaatagtcccccaaaatgtctgttatatcacttttaatctaggatcacatattgcattgagttgtcatgtctctgtagtctcctttaatctggagcagttcctcattctttgtctttcatgaccgacatttttaaaaactactagccagtttctttttctttttctttttttttttttttttgagacagagtcttgctctgtcacccagactggagtgcagtggcgaaatattggctccctgcaacctttgcctcccaagttcaagtggttctcatgcctcagcctcccaagtagctgggactacaggtgtgagccaccatgtccagcttatgcctggctaatttttgtattaagtttcttttttttttttttcttgtgacagagtctcgctctgtcactcaggctgaagtgcagtggtgcgatcttggctcactgcaatgtccacctctgggttctagggttcaagcaattctcctgcctcagcctccagagtagctgggattacaggcactcatcactatgcccgtctaatttttgtatttttggtagagacagggtttcaccatgttggccggactggtctcgaactcctgacctcaagtgatccacccacctcggcctccaaaatgctgggattacaggcatgagccaccgtgcccagcctgtttcttttatacagagaaaatattccttacttggggtctgtctgtttctttgtatttaaaatcaagttatgtattcccagccacatcactacataaatgatgtcatgctttctccggggaacatttctggaggcacatgatattcttctgtccctcattggtgatgttaattttggccagcaagtcaaggtgctgtctgcttttcccactgcgcggttacaatttttcctcttgcaacgaataagccaactatggggagatactttaagctacgtacataagctgcttctgtcaaactttccccctagaattagcattcattgataattcttgcccaaaccaacttttactctgatggttgcaaaatagttattttcatggggggaggggggaggaatagctttaggagatatacctaatgctaaatgacgagttaatgggtgcagcacaccagcatggcacatgtattcatatgtaactaacctgcacattgtgcccatgtaccctaaaacttaaagtataataataataaaataaaattttaaaaaatagttattttccaactccatcagctccctccacatttattaattggcattctcccttctccttcattcattcatttaattaattaattaattatctatgtattatcagtgtggagtcatggattcctatgttttcaatggttcataattcattcctggtcatctccgctgggggcaccaaccagataaagtatacctgtcttatatgttacaaatattttttcacagtttgtcatttctctctcaaatttagtgtatgttaatttcttcactcaagtttttcatatagtcagatttattaatatttccctttacatctggcttagagatctcttccctactccaagatcataaacaaaacaaaaattccatgatttcttcttttgagacagagtctcgctctgtcacccaggctacagtgccatggcaccatctcagctcactgcagcttcaacttcccgagctcaagcaatcttcccacttcagcctcctaagtagttggactacaggtgtgagccatcttgctgggctaatttttaaattttttgtagagacgggggggggggggggtctcaccatgttgcccaggctggtctcgaactcctggtctcctatcgcagcctcccaaagtgctgagattacaagcatgagccactgcgccnnnnnnnnnnnnnnnnnnnnnnnnnnnnnnnnnnnnnnnnnnnnnnnnnnnnnnnnnnnnnnnnnnnnnnnnnnnnnnnnnnnnnnnnnnnnnnnnnnnnnnnnnnnnnnnnnnnnnnnnnnnnnnnnnnnnnnnnnnnnnnnnnnnnnnnnnnnnnnnnnnnnnnnnnnnnnnnnnnnnnnnnnnnnnnnnnnnnnnnnnnnnnnnnnnnnnnnnnnnnnnnnnnnnnnnnnnnnnnnnnnnnnnnnnnnnnnnnnnnnnnnnnnnnnnnnnnnnnnnnnnnnnnnnnnnnnnnnnnnnnnnttttttaaaagtttttgtagcccagccaggtggctcacacctgtgatcccaaaactttaggaggcccaggcagaaaggactgcttgaggctagaagttgaagaccaacctgggcagcatagcaagactccatctctacaaaaaataaaaataaaaataaatttctgtaaagatgaaatctcattatattgcccaggctggtctcaaaggcctgatctcaagcgatcctcctactttggcctcccaaagtgctgagattacaggcatgaaccacctcacctggccccaattttttaaatagtcccccaaaatgtctgttatatcacttttaatctaggatcacatattgcattgagttgtcatgtctctgtagtctcctttaatctggagcagttcctcattctttgtctttcatgaccgacatttttaaaaactactagccagtttctttttctttctttttttttttttttttgagacagagtcttgctctgtcacccagactggagtgcagtggcgaaatattggctccctgcaacctttgcctcccaagttcaagtggttctcatgcctcagcctcccaagtagctgggactacaggtgtgagccaccatgtccagcttatgcctggctaatttttgtattaagtttcttttttttttttttcttgagacagagtctcgctctgtcacccaggctacagtgccatggcaccatctcagctcactgcagcttcaacttcccgagctcaagcaatcttcccacttcagcctcctaagtagttggactacaggtgtgagccaccttgctgggctaatttttaaattttttgtagagacgggggggggggggtctcaccatgttgcccaggctggtctcgaactcctggtctcctatcgcagcctcccaaagtgctgagattacaagcatgagccactgcgccgggtttcatgatttctttcactacttttatgatttcacctttaatattaaaatatttaatacatttggaattttggtgtaagaagtgtagagattccactttcaccccagctgattagtcatttgtttgtataaaattcattcattcaataatccaccacacacacacacacacacatattttcgttatgttctatatttcttgttatatctttttttcctattgaatcttgatgcatcttttattagaaccacggagccacagaactccgattctcggcaatgtgaggtatcaggctatgacctaaggcttgcaagcagaactaccgccaatctggcctctctggggttcccttcctcctgcaaggttgcaccaagcggcagttcggggaaatagggccttcaattacccagtgtgtatctcttgagtgtctgttaaataatggggggcagggcggggaggaggggtagagggaggctgtgcctcagtctttgttagccaggcagagcgtttattttccaggggttgtttcctttatcttcatcctaacattcaaacttgacttgagttttagcgcgcccccgccctacctcctcccaaagcccttatttgcccatccttgcctacaagctcagaacgagcaggcaatggaatggatgtcgtgggagcaggcggttgagatgccagtgtttgaaggctaaggactgggggctgtgagcgaggaccttcccgcgtttgctccgcgcccccgcagtttcctccgcgcccactagaaggcgccggggcgctcgcattccccgcgcggagccgaagcagccgcaacgagccgggagctgagccgcgctgcgctgcggtgcgaagagccgggcggcggccagagccctccccgcgctgccagtgggacgcggagccagggatccccggctttgccccggggctggggtgcaacagactcttaacttggtcctcgcgccccgccaaccgccccagggcaggaaacgcccagaaccaccaccgcgccgcgctccacaaaagccccgggagttccaagacgggagggatcgggcgcgctccagaggcaggagggtcccccacaccctcaggctcatgcccagctcccccatcgggcagcccccagccccatgaggaccctcaggccggggcgagagcccggcacagcccggaccgaaattttgccgctgccttagagcgttagacaggtcagtgcccgggggtgggtgggggtgggattggttggtgaggggaggaggaggaggcgggaggaggcgggaggaggcgcgcttcccggtccactctgtcccccgcgccgcttgccgaggccactcatcgggtcacctccgccgggggcgcccgccagcacgggcatgattctgcattttttcctgacaggctaggtgtggagccgccctccgcagcccaccccggcccaggtgatgctcagactgaggagtcgggggcgcgccggccagggcgggcggcgggcttggggactgccactgccctgatagagcggggcttttccgcttacgcacggccgcgtcgaaaccgcggcatccaaatgtcttcagcattaagatgccaggcctcgggtgtgagaggaaaccgagatgcaggagagggcgagaagaaaggaggccgggagaccctggggcctgggaagtgaggggaggggtaccgggaaaaccgcggctggcagtgcaaaccctagcgcgatgtgtggagtggagagcgcccttgggagccggcaggagcctctgaggacgcgggggccaagggccccatcccttgccctcccttcttccctccctttctcactccccaccctacccccacctaggatgtggctgggccgccgggccctgtgcgctctggtccttctgctcgcctgcgcctcgctggggctcctgtacgcgagcacccgggacgcgcccggcctccgggtacctcttgcgccgtgggcgcccccgcaaagcccccgcaggcccgagctgccagatcttgctcctgagccccgctacgcacacatcccggtcaggatcaaggagcaagtagtggggtgagtgccgaccgcggcggcgcagcgcagcgctcgctgggggtggtctgggggcttttgttttctccactgctgggctcagatgcctgcattctcctaacgggctgtgtggagtgaagtgggaggtggaagtgggaggctgctgaggcttgggctggggaaaatctgttctccctgaaccttgccatggggataaggatggggatgggcgtgggaggttgtgcagtcaagggagggccctgaaagactccctgaggtcctgattcaggtatgagaagagactccaggtggggtcctggttggtgggtaggcagctcctgaaatcctggtaattggccctatcctacaactctaaaatccagatttaggggataggtcatccgatccttggtccccctcccgaggactatttgaagggcagcatttaaggggacagagcctagacagacagaattgcagggccaaggtgtggggtgctgtgtcagtgtttatgggatgaatggagctgtgtagctgggctctgatgaccctcactacctacccccttcaggctgctggcttggaacaactgcagttgtgagtccagtggggggggcctccccctccccttccagaaacaagtccgagctattgacctcaccaaggcctttgaccctgcagagctgagggctgcctctgccacaagagagcaggagttccaggcctttctgtcgaggtaccagcttgaaagaagcgcatgactcctcagggggagagcagtgattgtgccgggagggagagaccctctccccccgactctgctctgtcctctccttcctccactgccaggagccagtccccagctgaccagctgctcatagcccctgccaactccccgctccagtaccccctacagggtgtggaagttcagcccctcaggagcatcttggtgccaggtagggaggagggtcccagaggatgacctcagccacagtgggggtggcagagcccaaggttgggtggggaagaatgggagatgattggaatgggaggtgggaacctctgatgaatgggggacttaagctcaaacgggggcttaggaggtgggaagtgaggacagaagggactctaggaatttcagaagactgtaactggggagttttgggggaaataatctattctttgctgactaaccattggttaggtggtggtcagggcaggccatagggcaagctttgacgggacgggctcaaaaatcagtcactgtaggctatgttatacagtgtgccctgctgaggcctcaataagaagaataggtggaaagttctctattgtgtgtggtgacagcagggagagaaaatgagaaagaattcagggctgcctatgtgattctgatccccccactcctttctcctagggctgagccttcaggcagcttctggtcaggaggtataccaggtgagagaaaacaagaaggcaaggaggccaagtaggcatcaagaatgctgggagggaggcagggctactaagggaaggatgggcgaatcagggaggcaagaagtgggtctggggcctaaccctgcactctccaatcccctcctaggtgaacctgactgcctccctaggcacctgggacgtggcaggggaagtgactggagttactctcactggagagggtcaggcagatctcacccttgtcagcccagggctggaccaactcaacaggcaactacaactggtcacttacagcagccgaagctaccagaccaacacagcagacacaggtgcaaggcctgggtggagagacgggcaggctgggcaaacagagaagaaccagaaaggctggagtgggcaaatggcagagggcatgggaggcatctgggctatggccagagctgtccagccacacaatgggtgcttcaactggaccagcagggccagagggagaaagggggcctttgttcatctggggctggagcaggccagagggaaacccgagccttgggtgtgtctcccctttaggccaactgtggggggccccaggaagagacttgtctaaggagttagaagactatattcccaacccaccccttactagagggcaaaggtctttactttcctgagatcccatttctcttccagcaaaagaggcctaaaagccctctttgcttctccccaaagctggtttgttgcactaagtttgcttccaccttagggcctttgcactttctattttctcagcctggaatgctcttccccagatttttgcagactggcttcttcttgtcatttagatctcagttcaaatgcctcctcttcactatcacattacttgtttgtcttattttccactcaatacttaccagtatctgaattttttaatttacttagcctggcaccagactgactaggttgctatcagttttgttgcttaatagttgtgtaaatgtggcaagttacttttctgtgtctcagcttttttttctgttgtaggaatctacttaatagggctatcatggggataaaatgagtgcatatatttaaggtaattttttaacgggtctggcacatagtaagtgctcaataaagattagcttttacttaaaattttctttgttgttttttctcctacccattagaatgtaagttccataaaggtaagaaccttctgttcttgtccaccaaggcctagaaaggtgggacacagagtaggcacttaaatattgattggctgaaaacagaatgttatcccacccttcagggtcaaatgccatgtcctttcttcccagtccggttctccaccgagggacatgaggctgctttcactatccgcataagacacccgcccaaccctcggctgtacccacctgggtctctaccccagggaggtgaggctggtaggggcagggacatattagaaccagccttggtggggagcaagttgggagagggcagtcctgggaggggatatctacctgttcccctctcccaaccctccttgtctgcacccaaccctgtgcccccaatctcagcccagtacaacatcagcgctctagtcacgattgccaccaagaccttcctccgttatgatcggctacgggctctcatcaccagtatccgccgcttctacccaacggttaccgtggtcatcgctgacgacagcgacaagccagagcgcgttagtggcccctacgtggaacactatctcatgcccttcggcaaggtgtgcagctagcaggctgaacggcaggccagaggactcccgcagggggtgtgccctcaatctgcagcctccagggtagtgattcgaggaccacctgcctcagaatcatggggtgcctgttaagcatgaggattcctggaatgtaagcttcgtgggagcaggaaattctctctgaattcttagaatggtgcttagtgcctaatggcattcaataaaatagctgatgaatgaataaataaatgcacacggaaattaaacgcattctaagaccactgacttggaacctctgtggggatctgcatttcttttacctagctcctggcctttcgaaagcactcaaaagtctggagaagaatacaagctgagaagggtcgggggagagaaagaaaggtggcagagggccatgtcctatttctgcagcctccccaaccacacacacctttctgccagggctggttcgcaggccggaacctggccgtgtctcaagtaaccaccaagtacgtgctgtgggtggacgacgacttcgtcttcacggcgcggacgcggctggagaggcttgtggacgtgctggagcggacgccgctggacctggtagggcaggggctgcaggatgtgggggtggagaagggccttgaacaggctaaggccacagcgggggcgctgcggccaggaacggccagccctaggacaaagagagaaccacgaagtggggcctgggaactgtctgggtcctgcaggggtgaagcggaagaggatggggcaggggtacccccgaaggcaccggagcgcagaccttgaccccttcgggtcccctatcccaggcccgcctggaggcaacctccctctccctgcaggtggggggcgcggtgcgcgagatctccggctttgccaccacttatcggcagctgctgagcgtggagcccggcgccccaggcctcgggaactgcctccggcaaaggcgcggcttccaccacgagctcgtcggcttcccaggctgcgtggtcaccgacggcgtggttaacttcttcctggcgcggactgacaaggtgcgcgaggtcggtttcgacccccgcctcagccgcgtggctcatctgggtgagtggcaccccctcccggtcgaccctggcaggagccccacggggagctggcgcacggtcacgcgcctctcctcctaggctgcacccgcgcccagccgccagcgggaaccccagaacagttctgcagtgatttaccaagacctgcacctgggcgagagacagctcccaccctctcccagccccgcatactctttttttttttttataaatatatatattttttgttatactttaagttctagggtacatgtgcacaacgtgcaggtttgttacatgtgtatacatgtgccatgttgaatctccattcccagcacagccgctgggcccccataagcttccccatcactgttcccgccacccctgctctactcccagggcttcccctagttcagaccacagtcggtgcaacccatctggcgtttatttaacctctgggagtaggggtaggtttttcgattttcaaagcacaagtatattgactccatttacacaagagtaagactgagacccagggagttgatttacatgctcagggtccttagaaacaagcctttgcacacacactttccacaccctaaatttgagagttctcccttaccagtcggccttctgcaccctcaggatccctcactgtgtactcccctccacccccagaattcttcttggatgggcttggttcccttcgggttggctcctgctccgacgtcgtggtggatcatgcatccaaactgaagctgccttggacatcaagggatgccggagcagagacttacgcccggtaccgttacccaggatcactggacgagagccagatggccaaacaccggctgctcttcttcaaacaccggctgcagtgcatgacctcccagtgatggcccgctggggatttctgactgtcaggctgggcctgcctccttgtccctgccaggaatttccaacaaaccccaccaccctgtgagcactctactggctgtccctgagcctctagttcctcactcttccttttcagaacctgatgcccagtaggggttgtcctggtgacacccctcctttttccagtgcccagaggcctggtggagccataacctctcccacagccagtgccaagtcctccccctgcccattctcatggggcaggaaatggggggatcactttccaagtgccaaagagcccagagggactctaagaacctaaggtggaaacactgtcctctcatcttgggaccgagggggtggggaagttccccaacacataatcccaagactgtgcccctcatctgcatcttcagatccagtactctgtgtacctgctccagccccacccccacagagagaacttgtggctctggggctggggtgagggctggtggttggtgaaagccattcttagttgtgtctctgcaatgctgtgggcacaaaagaaggggcaccagagtccctgtgcaaacacctagactcacttcatggattccaaagctctcagcttcattttattagttacgttaggtaagggggttcaagggtcatggtcctcatcacacacatgtcatcagggccctctgcactccacatgatgaggtcagacccacacggtgcaaatctttgggtcagtgagctcctggagaagagaggagacatgtcaggaatagattaggcacccctcttccttaatgaaatgtggcagtcctctcaggggtaccccacctacttagggatctgagttcttcagttcctcacccatagctcagcccgggctccctgatttggtcttcaatctactattcattccgtccccacccttttcttcttgatcttcctcagaccctttcccaaacccctctccctgggtctccagccacttacccctgcctcacttgccgcagcccagtgcctcctggctcccgctcctggtgctactgccccttaccaggctccccagggcataagcagctgcatcctgcacactcacaaacagctgatctggagtcaccctgtccaggagtcctacccgggtcagtgtcccctgcaccaaggctatgtggggagggtgtcagactctgagaccctaagtccacaccgggtccttttccctaccgcaggtgtccagtcattgcccaggcactgggccccgctcttctccacacatctcaccattacactgagccaggaggaggcggatcctagcatctcgacatcggctggccagctgcagggatggggcaaaggggttaagtcccagatcagagggtatgagtgagatgctaaggggtttctcctcaacctaccctctccctcacctgcaccacttctctggccccagcagcatctgcaaaggtgacaccactgaagtctaggaccaccaccctgacaggctcagcaactagaatgggagaagacaggagtacccaggtgtcaccatgcaacatgcccaaatcttccttcttgtcaccccatctcacctgcaaccattgggccatctggctttgaagtctcctataagtaaagaagggcagtcaccactcccgaaacacagcatgaacatgcaccccttgagcacaaggatccccctcagaacacccacctgcctcccactccctgaggatccacatccctcctaaaccaagctccttcaccttttctccttctccgagccccaggtgccactccaggttgcagcgaaactgcccacgggtcccaaagtacagtggtgttggatagctcaggatgcagagccccgggacctggaggagctaagaggtcaaaggatcagagaaatgtctggggctaatcttcccttccttctttggctgcagcccacccaccctggggcttcctctgagtggtctgtagagctctgtcccctcagcctgtccaagtgccaggcactacaccctagggaagaaggtggggccagatttccagcttagcctggcctggctggagagtcaccccaagcacctcattctcttcccctgccccgacctcaactccactcatctctatgcccacctccgggtgcggcagaccacagtcatcatggagaagaccacacccacagccaggcccaaatccacactcagggtcactactgccacccaggtgaccatccacacagcctgcaggatagggataggggtggattgcccaaaagaaaagccaggccatcactgctgggtaaagagatccagggcagtgactaccaaggcaagtgatggggagagatgatccaggaagaagtggaaagcatgacagaaggaaacaacagggttgattcaatgggacacacaccaaatgtaatgacccgcaccagttgggaagttacaaatattcaggccaaaggggttcaaaccccatcctttcccttgcctgtgagtaaagcatactaggagttatgtttgctgggggagtgggtgggttgcagaacttaagaccaggacaattaggtttggttcagggcagaggctggggatgctaacaagatgagagggggcaatctgggggtaatggcatttctcacaaagtccactcggctgatgtgccatagttgtggaagttcctgcatctggcagaacacctggcgcatgctggagatgttgatgcaagccaggacagccttgaggcagaggaggtgggctgactacctcgatgtcctggaatacagctacccctcccagccatgctcatgcctcctctgctcattaccttgggcagatagtaaaagaagggccccagccacagcagcaccgacaggaccactgtgcaggagaagaggcctgccagctagagaaaaggaggaacaggagcaaaaaaggaagagagcctcccacccccacatgagagctggtcttcctgcccactctgcctaatcttcctcggaagtctcccttctcccaaatctccttccacacaacccccttcttaatattctgccattcacatctaaccctcccgctccccccaattaattaaatgcccattattcaccagtctccttgtagatgtccattgttcaagttccccagttttgtagcccacctccaccttaaaagccactgttgggttaccctataagcagggtatatgtgtttagggcaccagcaaagtaagggaaaccaaaaatattagggggagactttgatatgtgatattccttttaaaagacaatgtcattgtgtgaaaaaaataagaattttatctcttaagtttattttatagttttgtgtttttattttgaaccacacctggggcaccataaactttttcagcgcttagagcctacaaaggtcttactggaacattgttatcttccatctctcctatctataattccatcccctcagtcaccctttctcacagatccccagtcttctctatataggtgccacctgggattctagccatcttccacctgtttctccaccaccgccaccttgcctggatggcccatcctttctcctcatccaaggatgccctcttacctgtgttttcccaccagcatccaccagtagattggtggtggccagcgtagccgagttgggaaagcaagagaagagggaggagatgaggttggaggcaccatgtgccaggaactcctggagggatacagtgagatgaagtgggagagacaaaggcatggtgggaagtcaaatgagagggttggggtccacagtcagagtcccacctggttggagtcaatagtgtagctatacttgtctgcatggatggaggccagggaggcagacaccgcaaaactaaccagtgcaatgggcagcgagtcagccagaatcctgggcagctcagccaggttggggaggaggggttggggaaatctggagagggagggatccatggtgaggaggggttaggtgcttcagtgagataaggaaggcagagaaaatggggggtggagataagagggagtgttgggtgggagaggtgggagaagagaaagctggcatcttttcattctcttaccctccaggcaacagccccactatctggacttggtatcttgtgtccacagaagaggtgaagcagagcacggaggccagaagcacctgaaaaagagagcaaaatgaaggcatgggaagagatggggtccctggcagaagctagaaggggctgaccatgagagaggaccataatgcaggcctagctggctgcaggagcccagcacctgggggagcggggatgtgtttgggatgagggcctgacaactgatttgtagtgtagagctgggaaagagggatgacatatgcctgaggccacagagcctggagccgtggaagtaagaggacgcttctgtgaaggatggtggatatgaagagatgccactgagccttccaaagagggaagctggacgatatctagtgatatactggcatctgtggagacgcggaacgtttatttagttggggagagagagaaatgtcggtggagggtggagagggagatgcactgtgaattacagggaaggaccctggtgaggacagatgtcagagaaggtgctgtgaccagcaagacctcaagggagcgctgtaggatggcagaggaaactccaagaggtctagggggtgctccgtgagagacgtgggacagtgtcgaggggggctgtggaaggtcaaagcgtccttctgcaggaggccaaggaaagtgtgagccggccctctgttccgtggcctctctgcactccaccagggggcggcagcggccagttcccacaggaccgcagggtctgcgcgggcagggggccggcgcgcacggccatcctcaccaagacgacttcccccgggatcggcgtgggtagccggtctcggaatctcacgttcaattccttgaccggcacgagcagcgccaggctgagcgcggagatggtcagttcggccggactgctccgaggcagcgcagtcagcaaggaggccagcgtctgagggcaggggcgatgagcagagggccccgtgccagggctcatgcgccccggcgcgggacccccagagcgaggccctctctacccagtgccaccagggcttacacctcctcagcgccctcgttcagccacgtggctccaacctcctttcctgctcccttgtcacatactacccctccaccctccgtccttcctcccttttcgagtttccctattcacgggacctctagaagccccttctcctttcttcttccacccccaccttgaagagagagaagcagccgatctggcgcgggagggacaaccccaagaggctcggcagctgggacaagagcacgtgcagcgcggccccgctggtcagcgccttgaccacaggctcggacaaaaaggtggacaagacgccgagctgcagcacgaacatccccagctgtgggggagaagacgcgctgtcaccatctagaggaggagcaaaccaaccccgcgcacctccgccctcccgaacccaagccgaaagctggtccctccctcttccccggcccaatttccctggcccctcagcagggatccccccgggttcctccccgggtcctccctcaccatcaacgccccgctcccgaaggccacggccgcggctaccccaacccgttgagcgtccagctgctccttctcgattccgctcagattccccacgaggggttccggcaccagccgctcgacggccgagcctgtcatgaggctgagtatggcgaaagttcctgccgccgggggacaaatgcagacatcaccagctgtgcagccctgggcagggcagcagctcagggtccatgccttgggtccgagatcctgctgccagactcggctctccaagaaggctgctgccccgtcaagactgtggggcgcgaagagctgcgctagccggcaaaaactgctccctcctgcagattctctgcctactgcgtgcccctttgggggaccatgcacctattcttccccttccaagtccctgagatgttcattttaaccaaatttcataggggaaaaaagttcaggtaaactcccacctctttgcacccactctagcaagcattgcctaggtcagtttcctggcagggttgggcaaggagggaggtgaaggtaggagaggtgaagagggaaattaggaagaagggaaataacagcccctgtccattttcatcccatagggaagaagagtcattggaagtccctggtcactcacctgtggacaggtgtctcccagtacctagcaagctgtagatgaggacggggaagaaagaagtgtagagtccaaacaccgggggcacggaggccaggagagcaaaagccatgcctgggatagaagtggatggaaaggtgtgctgtggggagggggccttgtccaacctccaggacttaaatgcacttcccagactcttaggagctgacatcaaggatgctaaatcaagcctcatcagggaactgaggggttaatgggcctcagtgagaggtcatggagcagacaaggtcagggacgctgtggccaagtcctgggggccaggcgttgtgcctctctccggttctctgagccagaacctgtctaaggcttctcgcaggattgcgcagatgaggggaggtggggatggggatctgatggagctccacagtccttacctcaaacttggcctcagatccctctctcccaccctcgacggtaggaacccaccatctgctcccggattcccagctccctaagcctcctcccggaagccctctagagcttgtgctcccgacaggctgctgttagggcctctcaccctggggcacgtgcacgatgcccacggtcactccggccaccgcatctccgagcagccaggcccgccagcggtaatggggcagccagtgcagcgcgggcagccgagccagcagcaggcgccacgcccctgtcccggaacaagcgcgagcccgcagcctccacagcccgaagagccggggaaagccgcgctcttcaggtagctccggttcctgctcttcgcccctgaagagctgatggaaccgagcctcggtgagagcttccctgagcctggtcgccaaggggtacttaaggtcagaggtgtcccccgcgcctgggtaggtcctggtgccctgaatcccgctcattctgcccttggccacctccaactccgcccggtcttaaatactcctccgcccgctaagccctgagtcccgcctcccacgaagcagggtccaatccggccctgaggtcaccctcgcttgaggaccttctcgggtctggcgagagccgcggcttggagagggagagtctctatgttaggcgtttctgcagacatccttggccggatctgatcgctggctctggggtggctgtggaaatgtgtagatattagagagagagaatccgaaaggcaagcgcaccccgacactcaacacccgctatttacccttccttagacttttcacttaactcccggttcctttccccatcggcaccttgggcggagagagaggctggttcctcttgggtcactggtccttccctgagccactacattctcccagccagagcaaaaaagttcagcgcccatcctgaacctcacccagacccacatcttcatggggcacagctggttccaaaaagcagtttcatgtcctactgacatggaatgcagccacatgtattggagagggataatgacagaaccagcacccacacctctgtgaggagtggctgggcctagttcagggcctcaggggaaatactgaacccacaggatatttttttcttaggaaccaaaaaaactgaagcaccatttatcacattcaaatgcttttcacaggccaggtgaaatggcttacgcctgtaatcccagcactttgaggccgaggcaggtggatcacctgaggtcaggagtttgagaccagcctgaccaacatggtgaaaccctgtctttactaaaatatacaaaaattagctggttatggtggcaggtgcctgtaattccagctactcaggaggctgaagcaggataatcgcttgaacccaggaggtggaggttgcagtaagccgagatggagccactgcattcaagcctgggcgacagagcaagactccatctcaaaaagaacaaaaaacaaacaaacaaaaaacaaatgctgttcacaaagtaggcattcaaaagcacatatgtggtcaaactaagttcaaaggggtcagccaccccgctcatgtgtccctatggttcctaaagaaatataaaggttctaactccagaatcctgctgtttgccatgatcccccacccccattcacaagaatcttcggcacccctccccatgatcctctggtcccccagtccacgaccccaaagcccggggggtggggtgcagtgagggtgggtctcccttcttcagttcctcctattgttccgcagaagtcttatctgggcgctacatcctgtaccccccttaggaatccctccctattatcggctaaagggacctcgggcccacagggaggctccaggtctcctcctcaccctcccaccccagcagtctattgtctgttgaggaagcccaagtgcacgtgactgagcccaagggacgaatggatacagtggactcggagatgcattaaggacccaggacagggcatctggacatggctgtgtgaatgtttggctcgctctgttccagcggctctcccagaagttgggaggggtgaagatccccttgggctgtccgctcttgggtccatggcttgaagaagaatccccttctgctcactatgaacatggcttatgacctcgcagagagcaaagataaggagacccagagccaggaaaaggtctcagcccccaggatcctctccaccttcccatcctccctcagctgaacatggtagcctcagaaggaaaggtacattggcattttgtgctttcgtatctgggtgttgggggaatggtgagaagtcacactgcattgggctttctggtggggtctagaccagagggtgggtagggaaaaagaagggctgggtaaagaggatacatcaagaatctagggctggccagatgcaacggctcatggctgcaatcccagcactttgggagggcaagactggtggatcacttgagcccaggagttcaagaccctgggctacatagtgagaccctaactctacaaaaaaaaaaagggaagaagaagaatctaagggctttccagtggttccatgcctcagtctttgtccctcaactgctgcaactgcagttgagggacaaagatagcaacatcttttatcttacaccctgtccccttctcctttcaccagaccccctcctccaatggctggggccaaccgatctcttccatatcacttcaccccacctacccccactacagcctccccttccctctgccaagacagcagcctcggtgatataacaaaacctttattctcagaaaacaggaaaaacaaaattaaaaaacaaaaccaataatttctatctggcccctgccccagccctcccacccacccacatatcctccttttggggggaccatgatgcatgcatagggatgggagctgaaggaaactgtgttccttgggcagaaaaaagtccttgggtctaggtgttctcctccaagttgatatccctcccagccttgcccaccctccagacacaccaagaaggaggaattctggagcagtgccagaaggactgccctgaagctccttggggaataggcggctgagtcagcaccacccccatggttttcaccagttacagctcatcttcatccagcttggcaagtctggcttggcagggaggggtttttggagttggagagactggaggagagtcatggggagcctgggggatgtcaccaagggcctgaagaaaagattcaagtcagaggatcaaaaaggccagaaatctaccctcacttctctcttttcagtttaagtccctagccaagccacctcctcttgctagatatcttagactgtctgagactatcagcttctccagagttaaaatagaggggagaagcgtaagggatgggaagtaggaaggaccagataaaaggaaggaatgatatggggagggaacttggggtcccagaacaagagaggctctcccctttttatccctacaatgagggagctctattcgtcatacctgtttatccagtggcaagagggctctggccacctcccctttgggtgacagcagcagagaggggagagagccattgatgggtgtgtgtgtgctgccctgggcctgatctccaagctgaattcttccagggctccccactccaggccctcttggccgccccaggctgttggtctggctctcccgtctctggtactcaatgggtgactgcaatgctggagcaaagagaggaacagaaggagggttaccgcagagacaggtctgctccctagggcctgtatcattctcccactttgccctccctccctgtcagccaatgtcaattgcttagggctttaggggattctatcaaattttgagctagcagtggaaaaggggatgggccatggtcagagggtaggtactggagactgggcagtgagggattcaggaggttaaggggctgagagagcacatcgggaagaaaggatgagagcttcaccgttgaggaagtcccgttggctctccaagatctgagccacatgcttgatccaggcctgactgatagcagggtctgcagcctgcaggacatagcgctggatcccaccctctggccctctggaggtcagtgcaaagcggcaagggtcaccttggaggttcccctccagtcccaggcagctcacctgaattggcagataggagacagcccccagattcctcaggccctccctggctcctctgagacatcctctcagaggcctcatgccctctctctctccaagccctccctcgtggccttctccccaccttaatgctgttcttgtatacatatccaggctgtgttccacctctcactcctcctcccagggctt

SEQ ID NO: 1316 - DNA, 3154 bp, Homo sapiens
gccgaagcagccgcaacgagccgggagctgagccgcgctgcgctgcggtgcgaagagccgggcggcggccagagccctccccgcgctgccagtgggacgcggagccagggatccccggctttgccccggggctggggtgcaacagactcttaacttggtcctcgcgccccgccaaccgccccagggcaggaaacgcccagaaccaccaccgcgccgcgctccacaaaagccccgggagttccaagacgggagggatcgggcgcgctccagaggcaggagggtcccccacaccctcaggctcatgcccagctcccccatcgggcagcccccagccccatgaggaccctcaggccggggcgagagcccggcacagcccggaccgaaattttgccgctgccttagagcgttagacaggctaggtgtggagccgccctccgcagcccaccccggcccaggatgtggctgggccgccgggccctgtgcgctctggtccttctgctcgcctgcgcctcgctggggctcctgtacgcgagcacccgggacgcgcccggcctccgggtacctcttgcgccgtgggcgcccccgcaaagcccccgcaggcccgagctgccagatcttgctcctgagccccgctacgcacacatcccggtcaggatcaaggagcaagtagtggggctgctggcttggaacaactgcagttgtgagtccagtggggggggcctccccctccccttccagaaacaagtccgagctattgacctcaccaaggcctttgaccctgcagagctgagggctgcctctgccacaagagagcaggagttccaggcctttctgtcgaggagccagtccccagctgaccagctgctcatagcccctgccaactccccgctccagtaccccctacagggtgtggaagttcagcccctcaggagcatcttggtgccagggctgagccttcaggcagcttctggtcaggaggtataccaggtgaacctgactgcctccctaggcacctgggacgtggcaggggaagtgactggagttactctcactggagagggtcaggcagatctcacccttgtcagcccagggctggaccaactcaacaggcaactacaactggtcacttacagcagccgaagctaccagaccaacacagcagacacagtccggttctccaccgagggacatgaggctgctttcactatccgcataagacacccgcccaaccctcggctgtacccacctgggtctctaccccagggagcccagtacaacatcagcgctctagtcacgattgccaccaagaccttcctccgttatgatcggctacgggctctcatcaccagtatccgccgcttctacccaacggttaccgtggtcatcgctgacgacagcgacaagccagagcgcgttagtggcccctacgtggaacactatctcatgcccttcggcaagggctggttcgcaggccggaacctggccgtgtctcaagtaaccaccaagtacgtgctgtgggtggacgacgacttcgtcttcacggcgcggacgcggctggagaggcttgtggacgtgctggagcggacgccgctggacctggtggggggcgcggtgcgcgagatctccggctttgccaccacttatcggcagctgctgagcgtggagcccggcgccccaggcctcgggaactgcctccggcaaaggcgcggcttccaccacgagctcgtcggcttcccaggctgcgtggtcaccgacggcgtggttaacttcttcctggcgcggactgacaaggtgcgcgaggtcggtttcgacccccgcctcagccgcgtggctcatctggaattcttcttggatgggcttggttcccttcgggttggctcctgctccgacgtcgtggtggatcatgcatccaaactgaagctgccttggacatcaagggatgccggagcagagacttacgcccggtaccgttacccaggatcactggacgagagccagatggccaaacaccggctgctcttcttcaaacaccggctgcagtgcatgacctcccagtgatggcccgctggggatttctgactgtcaggctgggcctgcctccttgtccctgccaggaatttccaacaaaccccaccaccctgtgagcactctactggctgtccctgagcctctagttcctcactcttccttttcagaacctgatgcccagtaggggttgtcctggtgacacccctcctttttccagtgcccagaggcctggtggagccataacctctcccacagccagtgccaagtcctccccctgcccattctcatggggcaggaaatggggggatcactttccaagtgccaaagagcccagagggactctaagaacctaaggtggaaacactgtcctctcatcttgggaccgagggggtggggaagttccccaacacataatcccaagactgtgcccctcatctgcatcttcagatccagtactctgtgtacctgctccagccccacccccacagagagaacttgtggctctggggctggggtgagggctggtggttggtgaaagccattcttagttgtgtctctgcaatgctgtgggcacaaaagaaggggcaccagagtccctgtgcaaacacctagactcacttcatggattccaaagctctcagcttcattttattagttacgttaggtaagggggttcaagggtcatggtcctcatcacacacatgtcatcagggccctctgcactccacatgatgaggtcagacccacacggtgcaaatctttgggtcagtgagctcctggagaagagaggagacatgtcaggaatagattaggcacccctcttccttaatgaaatgtggcagtcctctcaggggtaccccacctacttagggatctgagttcttcagttcctcacccatagctcagcccgggctccctgatttggtcttcaatctactattcattccgtccccacccttttcttcttgatcttcctcagaccctttcccaaacccctctccctgggtctccagccacttacccctgcctcacttgccgcagcccagtgcctcctggctcccgctcctggtgctactgccccttaccaggctccccagggcataagcagctgcatcctgcacactca

SEQ ID NO: 1317 - protein, 531 aa, Homo sapiens
MWLGRRALCALVLLLACASLGLLYASTRDAPGLRVPLAPWAPPQSPRRPELPDLAPEPRYAHIPVRIKEQVVGLLAWNNCSCESSGGGLPLPFQKQVRAIDLTKAFDPAELRAASATREQEFQAFLSRSQSPADQLLIAPANSPLQYPLQGVEVQPLRSILVPGLSLQAASGQEVYQVNLTASLGTWDVAGEVTGVTLTGEGQADLTLVSPGLDQLNRQLQLVTYSSRSYQTNTADTVRFSTEGHEAAFTIRIRHPPNPRLYPPGSLPQGAQYNISALVTIATKTFLRYDRLRALITSIRRFYPTVTVVIADDSDKPERVSGPYVEHYLMPFGKGWFAGRNLAVSQVTTKYVLWVDDDFVFTARTRLERLVDVLERTPLDLVGGAVREISGFATYQLLSVEPGAPGLGNCLRQRRGFHHELVGFPGCVVTDGVVNFFLARTDKVREVGFDPRLSRVAHLEFFLDGLGSLRVGSCSDVVVDHASKLKLPWTSRDAGAETYARYRYPGSLDESQMAKHRLLFFKHRLQCMTSQ

SEQ ID NO: 1318 - DNA, 3137 bp, Homo sapiens
gggcgctcgcattccccgcgcggagccgaagcagccgcaacgagccgggagctgagccgcgctgcgctgcggtgcgaagagccgggcggcggccagagccctccccgcgctgccagtgggacgcggagccagggatccccggctttgccccggggctggggtgcaacagactcttaacttggtcctcgcgccccgccaaccgccccagggcaggaaacgcccagaaccaccaccgcgccgcgctccacaaaagccccgggagttccaagacgggagggatcgggcgcgctccagaggcaggagggtcccccacaccctcaggctcatgcccagctcccccatcgggcagcccccagccccatgaggaccctcaggccggggcgagagcccggcacagcccggaccgaaattttgccgctgccttagagcgttagacaggatgtggctgggccgccgggccctgtgcgctctggtccttctgctcgcctgcgcctcgctggggctcctgtacgcgagcacccgggacgcgcccggcctccgggtacctcttgcgccgtgggcgcccccgcaaagcccccgcaggcccgagctgccagatcttgctcctgagccccgctacgcacacatcccggtcaggatcaaggagcaagtagtggggctgctggcttggaacaactgcagttgtgagtccagtggggggggcctccccctccccttccagaaacaagtccgagctattgacctcaccaaggcctttgaccctgcagagctgagggctgcctctgccacaagagagcaggagttccaggcctttctgtcgaggagccagtccccagctgaccagctgctcatagcccctgccaactccccgctccagtaccccctacagggtgtggaagttcagcccctcaggagcatcttggtgccagggctgagccttcaggcagcttctggtcaggaggtataccaggtgaacctgactgcctccctaggcacctgggacgtggcaggggaagtgactggagttactctcactggagagggtcaggcagatctcacccttgtcagcccagggctggaccaactcaacaggcaactacaactggtcacttacagcagccgaagctaccagaccaacacagcagacacagtccggttctccaccgagggacatgaggctgctttcactatccgcataagacacccgcccaaccctcggctgtacccacctgggtctctaccccagggagcccagtacaacatcagcgctctagtcacgattgccaccaagaccttcctccgttatgatcggctacgggctctcatcaccagtatccgccgcttctacccaacggttaccgtggtcatcgctgacgacagcgacaagccagagcgcgttagtggcccctacgtggaacactatctcatgcccttcggcaagggctggttcgcaggccggaacctggccgtgtctcaagtaaccaccaagtacgtgctgtgggtggacgacgacttcgtcttcacggcgcggacgcggctggagaggcttgtggacgtgctggagcggacgccgctggacctggtggggggcgcggtgcgcgagatctccggctttgccaccacttatcggcagctgctgagcgtggagcccggcgccccaggcctcgggaactgcctccggcaaaggcgcggcttccaccacgagctcgtcggcttcccaggctgcgtggtcaccgacggcgtggttaacttcttcctggcgcggactgacaaggtgcgcgaggtcggtttcgacccccgcctcagccgcgtggctcatctggaattcttcttggatgggcttggttcccttcgggttggctcctgctccgacgtcgtggtggatcatgcatccaaactgaagctgccttggacatcaagggatgccggagcagagacttacgcccggtaccgttacccaggatcactggacgagagccagatggccaaacaccggctgctcttcttcaaacaccggctgcagtgcatgacctcccagtgatggcccgctggggatttctgactgtcaggctgggcctgcctccttgtccctgccaggaatttccaacaaaccccaccaccctgtgagcactctactggctgtccctgagcctctagttcctcactcttccttttcagaacctgatgcccagtaggggttgtcctggtgacacccctcctttttccagtgcccagaggcctggtggagccataacctctcccacagccagtgccaagtcctccccctgcccattctcatggggcaggaaatggggggatcactttccaagtgccaaagagcccagagggactctaagaacctaaggtggaaacactgtcctctcatcttgggaccgagggggtggggaagttccccaacacataatcccaagactgtgcccctcatctgcatcttcagatccagtactctgtgtacctgctccagccccacccccacagagagaacttgtggctctggggctggggtgagggctggtggttggtgaaagccattcttagttgtgtctctgcaatgctgtgggcacaaaagaaggggcaccagagtccctgtgcaaacacctagactcacttcatggattccaaagctctcagcttcattttattagttacgttaggtaagggggttcaagggtcatggtcctcatcacacacatgtcatcagggccctctgcactccacatgatgaggtcagacccacacggtgcaaatctttgggtcagtgagctcctggagaagagaggagacatgtcaggaatagattaggcacccctcttccttaatgaaatgtggcagtcctctcaggggtaccccacctacttagggatctgagttcttcagttcctcacccatagctcagcccgggctccctgatttggtcttcaatctactattcattccgtccccacccttttcttcttgatcttcctcagaccctttcccaaacccctctccctgggtctccagccacttacccctgcctcacttgccgcagcccagtgcctcctggctcccgctcctggtgctactgccccttaccaggctccccagggcataagcagctgcatcctgcacactca

SEQ ID NO: 1319 - protein, 531 aa, Homo sapiens; identical to SEQ ID NO: 1317

SEQ ID NO: 1320 - DNA, 37980 bp, Mus musculus
  misc_feature (1)...(37980): n = A,T,C or G
gctgttacacaaagaaaaccagtctttaaaacaaaacaaaaattttaaaaaaccaaaaaaccctgaatctgactgtatgccacatgttcacttttcaatttttggtttgttttgttttgacaagatttttctctatgtaatccttgatggcctggaacctgtatacagtaggctagccttgaactcacagtactatttctctctttgcctctctggcactggcatttgtaatgccaccacaatcagagctttggttggtgggtaggtggctgggcttttgtagaaaggaggccactctatggtacaggttacaacaaactcacaatctacctgcctcagtcacccgagcactgggatccaggtgtatcccactggcaaaatgtatgtcctttggtgtccaggccatgggaaaataaaggaaataaacaggatgtagcgtcaaacacctgtactcccagtgcttgggagaatgagctaggtggatcactaggagtttgaggccagcctggactatgttgtgagttctaaaatagctagagatacaaaaagaaaccctgtctcaaaaaaaaaaaaagctgggcagtgatggtgcaggcctttaatttaatctaatcgcagcacttgggaagcagaagcagacagatttctgaggctagcctggtctacagagtgaggcgttctagaatagcgagggctacatagagaaaccctgtctcaaaacaaaaaaccaaaacaagctgggcatggtggcgcatgcctttagtcccagcactcgggaggcagaggcaggcggatttctgagttcgaggccagtctggtctacaaagtgagttccaggtcagccagggctacacggagaaaccctgtctcgaaaaaccaaaacaaaacaaaaccaccaccgcaaacaacaacaaaaacctagcttttttcacttttttttgagattataatataattacatcattttttccttatctttcctccctccaaaacctcccatctgctcctccttgctctttttttttaatccccctccctttttaatcttccactcctccctcccccaccccacccttctctcttttccctttaggactgggtttaactttgtaaccctggcgtcctggatacattgtagaccagggtggccttgaactcagagatcctcccactcctcctccctcctcttcttttcttcccactcctccttttccaactttccctcctcctcctcctcctcctcccacctctcctcctcttcccaccctttctcctcctcctccccctccccctccttttttcttcctcctcattcttctttacttttgaggctaaagttttaacttgagtactaagcaatcttccttctgaaggagtttacagagatccttaagggagactcacagaccttgtgagttgccttcatcttcctgtaatgcttgacctgctcaaaactgaagtcctaagctagggctgcagctcagtgatggagcacttgtctggtatgcctgaggctttgggttcaatccccaaccctatggtaaaactaaactctcacttgtatctgttgtgagttgggttcctgtgtttggttagatatacatacatggatacatacacacacacacacacacacacacacacacacacacacacacacacacactcatggccatgaagtcagggaagaaagtaacggattggggaaacatgttgcctacagctgtactgcccactccctgacctgaatcccttgtaatctctgcttagccatcaaagaagccttactgatagaaaaagcctacttgtcttagacttcatgtctataataccagcacctgggaggctgaggaaggaggccagccacaagtgcaaagcctgtttggactgtctgagaagtcaaaccaaaactttaccaggcttggtggcccacctatgatcctgaagtaagaggattgctctgaattgagcatcatcctggtcaatgtgtcaaggagttacaagactccatagaaataccctattcaaaaaacaaacaccaaaaattcaagccaggtgtgatactgcactgaggccataaattcccgacaggctggtgtgggtaaagcccttgccaggcaaatgtgcagactggagaaatgtggagattggagctccaatacctacataaataatggatgggtctcgttccccatctataattccagcccttgggaggctgagacaggctctccagagcaagctgacaaggtaggttagttcaatcaatctgctaaactaggttcaagttaacttggcacaaagctgggagaggtgtcacctttaaccccagcattaaagagacaagaggcgggcagatctgtgctgagttcaatgccagccaaaactgcatagtgaacatatatatatatatatatatatatatatatatatatatatatatatatatatatatatatatgtgtgtgtgtgtgtgtgtgtgtgtgtgtgtgtgtgtatgtatatatatatatatatatatatatatatatatatatatatatatacacatacatgaacatcatacatacaagtctaaaaagaccgagcatattcggcagtggagataccgtattatcattcagtgaactcgacacaggtgtgtccattcagaacccagcatgctctgaggcctttgacctgagatgtcagcgtagaaggggttcatgttgttatcacttggccctacttttcccatctgttttctcatctcttttctctcccgactacacttagaaatttagacccagagagccacataaataaatctttattgaaaaaaaaatacataattccttataaatagaataaataaccatcatctatactgttacaaggataaataatatcaaaagttcccttcccacttaataaatatgcagctttgtcacaggtcatagtggtagtatttgtcagttcgtattggtagtcctgttagttcttagtgactagattctgttagaactgagggacagagcaggcaggtacagagctgctgtctggagtactgtgcatctgcacatttccctgagccacccaggaaagtataatgttccccttttcttgtttttcttacagataatggccaaagcctgggctcactttttctgatgctctgggttttctcacagtttctcgatgccaccgcccccttcccctcaggccacgcagctgcttgcccgcttccaaggccaagggctcgagactttattcttcttctccagctcctttctctagccagctgcctgctctggggtttgtttcttttctctttaataatggtgtccttgcccttcacgcaaaacaaacaaaacaagaacagcacaagtcctaatgggttaattaactggtagatgtctgggctgatagattagtcttatcatggtagccatgggaacctgggcatccttaagctgttggcactaagggctcagtcagagttgctgctccgtgggcaaagacccgggcagctatggccaaaaaggcctggaggcttcgaaggatcttggaacggagaagggggcgctgccactgctgactagaactcaggctgggcatctgttgggtctcccgggggtgatcctctggctgaaagacacaggacacagtcagaaaggactccagatactaagctccgagcttctttttcaaacactggctagccctatcttccagatccctagttcatacctggaggagttggctgagtcctagtagggaggtgtgaagttgctccatggggctatcagggagtagagcaggctcccctttgaagatgtcagagtcaagcaggtgcttataaaaagccagaccttggcggatcctttgcaagcagaactgggaaagaagaaaacaatcaagacagatagatcctctttcctagtgcctgcctgcctttcttccttcctctgtttttcctttttctttctttagacagcatttcactaccttaggctttggccttaaacttaccacccacagctcaggctggcttcaagccaactatggctcctcgtcatctcagacaaagctaaatggccatggacgctcagcttcctctcacctccctctcctagacacatcaacatcggcttagtggtacctggctgttgtccttgagtccttgtgggtcacaaccatcttcacactggatacggggcacattatttttagtctcttcatcctcttcttctcttagtagattctgtaatggagggagtgggaacagtgaggcgaggtgaccgctttgcattccgctcaaccgccggcccacaactcttccagaagccccagtcttctgtcctatctcattccacgatggcttccaaccctccagatccacccggggccacagcttccattaaacctacacacttggaggactgggaaggttttctgcgcggtcccaggagctgacacttaccatatgtcccgctggtgcatgtgcgttccaggctagcatgcagagattccgagagagctgctggcactgagcccagtcaggactgctactcctaggcacagccaggccctgagtgacccagggcaacagccatagcattattactgctctgcaatccagcatcttgttccctgcttctcagatctggctggctctgtgatctgcaccaggcctgtggaccccctatccacctcctttggttctgagtctaactctgtagtccgacttctaagcggcttcctgatttcttccttttgtctcccagtctctttttaaggtccctgcactgtaaggcccgcccttcacactagcaggtgactcagagcaggtgggattcccctccctacatcatctccctctttggagagcccaggtatgccgcttcagttccaggggaaatgagtggtgaggttgttgtggctagaggcctaggtcgggacacatgtgtcatgctctccaggaacacagaagactgcagaaggggcagggaagtaatggacatttaaatgaatatctccagttccttcctgtgtaatctgcctgatattgttttttttttttttttttttttgcttctcaaggctttattcttacccaaccccagtccgatttcctcacttcctcttgcctgagggaaaaccaaaacagcactcattcatctccaaatcccatggtgacctcagattcgaagtctggttcccgtgtcatgccttctatgtaagaccaaggcatttccttctttccatgttcttttcaccaggcggccctggttttgaaggtgatagaagccaccttcttagatcaccttctgtgatctgagaagcctcagaggggcagtaagaaatagtaagtaagggcattccccgggtgagaatgctggctaagaacctcttcatttctcagcctgcttagcctacagttgccatcggttctgcgggatttaggtaatgatttttcagggagtcggggactggcagtccaccccctgctcccaccccatagctagaaagcatagacagaagttctgggtggttgaaagtacagcgatgatgacccgtgctggcctttcagcctgttgcatccacgggtaaaacccgctgatggctgattgatttcatcaccttccatgatgtaacacccagggaagcagctgtgagagtggggttggacgtgggaggagagggtggtctgaagctgggactcccccaaccccagtgtagggtccctgcaccatctggacgtcagagtgaggccatagatgaccacacggcaggctctcaaaagttatcttttcctctgagagacaagttctcaatgggggtcccctttcacttaggactcttgtttggttttggagacagaggtttctctgtgtatccctggctgtcctggaactcatgcctcaaaaaatatcagacagattacacagggaggaactagaggtgatatgaagatgttgaccatgctgtctccaactcagagatccccctgcctctgcctcctgagtgttgggattaaagctgtgtaccacctctgcctgaagactttcttttttttttaattataaaattctttatggatttgcatttcatctttgcacaggggccatgctaatcttctctgtatccttccaattttagtaaggtacagctgaagcaaataccctttgggactattttaaactgcccgaatgaagcttttggtttaaatactattattaggattctgtgatgactctgcctcccttccagtgaaacatttccagcatctgagaattagctcggtttgggggagaaatgatttgtctacctaggacagatataaatggaataaaggaattgggaggaggatgcataagggagtcctcgttattttgtgcagtgtctctcttttgctacatctgctcagagtcctgagagtcctcacaggtaggagataaaaggtgagaagaaagatacggaaacgaagatgaggtgggaagagattgacagagtgagttggaggcacaggctctcagctgttttacttcctggtgctttagcagttgagtaggaagtggggttggtgtggcgactccaaagtggctagcagctggaaccacttccaaggctgctgctgacctagagcttcaagaagcccttgacgtcagcgtggggtgggggggctcaaccgttatgcaaatcacattcagaagacactcctagacaggcctttccagacgaatgcccagactccaaatccaattgaagtttccccaggtggttaatgactatagctaataatgatggctaattcgtatctaactctcactgatctaagcattttacgagcattaatctaagtctcagtaaattctacgtcgtgcatattatatcatggatttactggggagactgaggtgcaaagataagtcgtttaacaaagacctcatagctgggaaatggctagctgtagcgccgaacacaaaattctacttttaaaaattgtttaaaattattatgtgtgtgcaggtgcatgtgtgcctcgggatgcctgtggacatcagaggacagctctgtccagacagccctctctttgtacctttgtgtaggttccagaaattgaccacgggttgctagtcttccaacctggctttgtattccacacatgctaggcaagtgttctaccagccattgaatccccaggaataaaaacataagcactaccgcacctagtttatctttacattgtcagtctttgtttgtttgtttttcaagacagggtttctctgtatagccctggctgtcctggaactcactttgtagatcaggctggcctcgaactccccagtgctgggattaaaggcgtgcaccaccatgcccagcttttttttttttttttttttttttaagatatacttgtttatgtatatgatacactgtagttgtcttcagacacaccagaagaggttatcagctcctgttacagatggttgtgagccaccatgtggttgctgggaattgaactcaggaactctggaagagtagtcagtgctcttagccgctgagccatttctccagccctgtattttgagtcttctaacttagctttagtaacaaggattatagacctgtatcaggctcaacccatattctgcagtttagttccttgtttttgagacagtttcttgttgcccagactggtttcggaatgaccttgagctcctaatcttcctgcctccacttcccaagcgctggggttacaggtgtgcttcgctccatgtaaaattactgtgtcattatattggatactgtgaggaaactcaagtggaagtagattttgattcataaagtagtttattgagtgaggtctgatggcacccttctgtatacccagttctggggttaatatgaagggaggattacaagttcaagtctagtttggactccttactgagaattcagctcaacaaaccaaaaagtaaccgatttactccaagtatctcaagctccttaactcccgtggtctgtgaggtctctttcaattatgagtctttaatatggagatttctgtgtagggactgtctgggtctcttagcacctaagtccttgtatgaaaatttaaatctaaggaccagcgaagccagagatcctttgagttaggtgttctctattttgatgtaggatttcttggtgtgtggaatacccaagtgcctatgtcccccttgcccaccccattactatattttattttgttttttttttttttttttagatagagtttcaggtaggctaggctgcagaacatccatagatgaagtcccgatgcatctgcctcagggttctttcttgaagttctacttgcttgcctttattgagagagagaaaaatcacacacacacacacacacagagagagagagagagagagagagagacagagggacagacagagacagatagacacttaaatttatttattatgtatgtgtgccacagtatgaatgtgaagacaaccacattgagtctcagggatggaactcagaccctgacagttggtagcagtatccttacctgctgtaccatcttgaaatcctctttcacctttttgaaaagaaatacatttttatttggatgaggggggtgttttgagacagggtctcactgtctaaccttggtcggcctagaattcactacgtagaccaagctgtcctcaaattcacagaaatccattctgcctcctgagtggtgggattgccatcccacttagcctggtttttgtttgtttgaaacagggtctcatgtaacctgactagcctgggacttgctatatagaagaagctaaccttgaacactaatcctcctgcctcaggattactgccattacaaatatacctccactatgcctggcccaataaatgctttaaaagttttattattggtgtttattattggtgagaactttcttccacaggcacctgttgaaagggatattcaccatgtagccatagcaagcctggtccttactatctatgtagcctaggctggcctcgaatttgtaagggattcctgcctctgctttaataatgcaggtattgtaggtatggaccactagtggcacagggcctttaaaaacagagatgacagagctgagtttgggcaacctaagacatctcacagcctggaccaattccaaagcagtttagtacacagccagtacccccaaatattttagacacggtgacacactctcacaggagagggagaggcagtaggatctcttagttggagattaatcaagaacccctcagaatagctacagctcagttgactcagtttactgtttatctctctcttggggtcaatgtccagctccacggtctaggggaattttgacagtctaggagacttgtttcttgggaaaattaggggacctctggggacgacacaaacattgatgggaatttcagatggatgcctctagaaatagagaaaaggtggccactcgggccacactagaagtcaggctcccgcttcctttttcttccccacatctagaagtcataggaaatgccagtgagtttcgggggtacagggtcagaggtattggaatggctcacaggcacagcaagatgaaggtctatacgccgggaatgatgaaggccacgctgggaatacccaccgggcgagtcccagtgcttagcctctggcgcccctttagtctagttcttattcagggagcgtaaaagcttggcttcaaagtctaaagttaattttgcttaacaaagcctgagagcgaagggattacttttcgtaacaccaaatagatccgcgcctgattcagtttgtccccggtggcattccgtaaccttgttttggcggaggctacgtcactctccttctcaggcgctgcctgtacctggctttttctgattggctgggatgagcccgtggcccccgctgattggaagcgatggctgccaatccaccgtccgtcttgcttgggttaggttgagctagaggcgggggagtagtagggaaactggaatttcccgcggagctgacggcgctttctctaccccctactcgtttgaattccacgcgctccaaaatatccgccatggagaaatcttggtaatgacccattccccgtaagcatcccaggaacacgtcttgacctttgccctaatccttcccctcccgtcccctgcgctgggggagaattctgggtaaccagtttctctggttcgctcaaagaattctgggtagctatccgtttccattacttcccccttacccccgccccgtttgtgggtaactggccgttcttgttacccaccccctggagaatgctgggtaaccactgtaaaggattctgggaaactggcttgtcttgcccccttcaccgcccagcccctttgtctcatgtccaattctaagaaacaagcatttcagagctctcccccgaactccagcccctatcaaacccgctcccttcaccttgtggttcaggagaaagggaagtcaagagttagatcatttggtgggctggcagggaacttaggaagtttagaggtgcagagtaagggacactgtcatgccactcacagtacagcgttgcccttgtcctcttcatgcatgcttccgtctttgcctggcagtctcatcccctctgcctacctgattgtcctgtccacatagaagatacttccagtacctaggcctatccctgactgcgctgcctctttcccttgcaggccagaatgtccattctaggttcactggtgctgtcctcctgaaggctgggtcacttgtctgtaggaagcgtggcaagggagggtgtgactccggtctgaccagcggccactatcgtcatgaactttgagggtctggatcctggactggccgaattttccccagctatgcattctaccctggacccagtcctggatgcccacctgaatccaagtttgctacagaatgtggagctagacccagagggagtggccttggaggctcttcctgtccaggagtcagtgcacataatggaaggtgtctactctgagttgcacagcgtggtggctgaagtgggagtgcctgtgtctgtctcccactttgatttacatgaggagatgctgtgggtggggagccatggggtaagaactatacccctttctgaaggctgaaagggtgtattagaaatctttatctggtctttgcccaaggacagctctttgcaggtagtcaaaactgagttgaactgatgagagttagctgggtctttcaaaccaacaagggagtggagagattaactacatatttagtttcataaggcattccactctgtcagttctcctatcactactgtgtttttgcgacaacatctctctctatagtccaggctgatctagaactcacagcagtcctcctgcttttgcctccaaagtgctgagtttccttgtatgtaaccatatctgactgttgtttattgtttttgttgtgttgttgtttgtttattgtttttaaagacagggtctctctatcccaatctggccttaaactttatgtatagccaaggatcgtcttgaatttctgatcctcctgcctctatctcctgagcgctgggaagatagacaccaaacccatattcagtgtatgttgctgagataaaccccgaggctttgtgcacagcaggcaagcactgaactcactcctacaggtcaaatcctggttttgttttgttttgttttttgtttttcgagatagggtttctcggtgtagccctggctgtcctggaactcactttgtaaaccaggctggccttgaactcagaaatctgcctgcctctgcctcccgagtgcctggttttgttttaagatagggttttgctgtgtaacccaggctggcctcagatttacaaccctaacatcatctccagagtgctgagtttataggggtatcaccaaccaagctcagcccatgttttgattaactatatccatcccttagtttatagccatccatactctttaatattttacccaatttagaattgggaatggggtcggggtttgaaacaatctcagtatgtagcaccttctgatctgggacttactatgcagcctagggtggctttgaactaggggcagccttatctcaacctcaaagtgctagtgtttcaggaatgcaccacacctcgtttataattgcagaatgtttaatgaatgtttttggatacctattggagttattttgtcttctctttctgattgttagtcttagcagttatcagtgttaattttcaagtgtgtaataatatatgctatgaggccaaatagtttttgtaagaccttggtttacttatttacgatttcatgggggtatgaattgtttttccattaggagaaatgaactttttcaccgatgtattcagttcagtaagtcaggcatgactactgctgtgctcggcacagggaacagaactgaatgcagcatagaccatagaacaggcatggttgttcacaccctataaccttgacttggaggctgaggcagaaggatggtaagttccaggccagcatggattaccatagtaagaccatgtttcaaaaaccaactgccaccaccaaaacagaggtctccctgcctttacatcctcaatgctagactctgaggcatgcgttgttgtgcctagctttgcacttaaaaaaaaaaagtatttggtggtggaagctggaaggtgggcacttattcaacctcttgtcagcagaatgaagtgcacacaacaaaattgtgggggtgtgaatcagtgataagaacttgcctggaatacaagaggccctgggatccagccttagtatcctcttacccccaggccctgggatcctttagtccatatctgaaggcatgggaaaattttggcttttccagtgcttgagtattaagaccaggaccttacacatgcaaggcaggtgttttacagctgagctgtatccccctccttcagaaactagtaggccagctgttagatatcagaacttgattataaggcttaggtttggaatgaggagttaaacagaatacaacaatccatgaccaaggctggaaattgtggtctacacctttaatcccagcactaggaaggcagaggcaggtggatttctgtgagtttgaggccagcctggtccgcaaagtgggttccaggacagccagggctgtctcaaaaataaataattttttaaaaagaaatgggattcaaggtgtgcacgtgcctgtaatgtcaatgggtgagaaaccaaggcagattgcataaggcccaggccagccagtactatgtagcaagaacctatctcaaaatttcaaaggctggggactgatcttagccgagtctggcctagcatatgtgagcccttaggtttgattcttagtactgaataaaacaaaaggaaaactcaagtacaaatgtaattaaagcaaaaccttttgagagcaaatgaggttataagggaagaggtacatgtttcaagagatccaaagaggggaagccgtgggtagtgacagatttcatcccacaatggagggcagaggcaggatagccatggctgcatagtatgaccctctctcaaacaatggagcaaagaaggcacacacatgaggagtcagaagtccagagtgagtgatgtgccagagcagggcggtgtctcagtctttgtgttctggctataaccattgactccgtatggattgcttatttgctgtagagcttaagatttaagcaaatgaagactccagaggcagatgcaggagggtctctgagtttaaagccaacctagtctttatagcaaattccagaacagccaaggatacataaatgttgcctcaaaaagcaacaacaaaaaaagatttaaccatgaagcaaggtctgatatcagcacttagggggggcttaggcaggaggattgtgtagctttgaggtagtcctggcgtacaaagcattcgccagaccaccctggactgtatgagactttttttttttttttaaaataaaaaagaccaagaaccaaaaaaaaaaaaaaaaaaaaaaaacccacccaaaaacttggccatggaacaagcggccagtggaggatcagcttttgtcgctggccttctgaagaaacagatctctaactgaggtactgcctgtcgttatggtcatagtgagaataaaatgaaggtctatataagtattctgtgctgggtgaacaaaataccttgaggctggaggaatgggttggatcagattagctgttgtcttccagaggatccgggttagagtctccgcaaccatgtggcggttcacagttgtctgtaatgccagctccagggaacctagtaccctcttccagcctctctgacacacacacacacacacacacacacacacacagattaaaaaagataaaaaaaaaataacatttaaaaaaaagtaattatataaaccattttattctcactatgaccataatgataggtaatgcttcagttaattaataattaaaaataatactgatttgcatgaaagtaacatagagtaatcattgctttatcactaaggttgactggtccctagccatacgcctctgttgtctagacagaaagggagtctgaggcgtactccatccttggcaagtgtctgccatgcccctgcctcacccaggtgtgtttgcatcctccccagggccacgccacctccttcttcggcccagctctggagcgctactcatcctttcaggtcaatggtggtgacgacattcggcaaatccagagcctggagaacggtatcctcttcctcaccaagaacaacctcaagtacatggcccgtggagggctcattatatttgactatttgtaagtggcctttcagttcagctgggaaagggggaaaatgacaggaaggccataggattgtcagctggtgagcccctggcctgtcggctcttctcacgcaggctggatgaaaacgaggatatgcacagcgtcctcctgacagacaacagcactctgctcgttggggggctgcagaaccacgtactggagattgacctgaacactgtccaggagactcagaaggtatgcacttaggtcgtgtccaggaaagacccttgtgggacctgaagtcatggtggggctgtgcttgggccgtcgtgtgtcgagatgtggatatgacttccctgtctcttggtcatgggaaatcatctcattggcttctctctccagtatgcagtcgagacacccggagtcaccatcatgagacagacaaatcgtttcttcttctgtggccacacatctggcaaggtaaccagatcccatgtctctccccaccataggcctgtttcagaagatactagggtctgctttccctgtggatgaaaagatgagggctgtgaggagttaagccatgtcctgctttctgtgttgagatcatcttggatcctggtgttttctacagctgggtgccttggaggcaaaaggataaaggaattctttgggttgtccctttttaactcttggcttctctctctgcctttctttgctctgacagtaccctagaaccttggtcttctctgtcaaggctctttcagggttaagtaggtggcagggtctcttccctggcacagaggtggcagataacaggtcttttcttcttcaggtttccctgcgagacctccgtagttttaaagtggagcatgaatttgatgccttctcagggagtctgtcagattttgatgttcatggcaacctgctggctgcctgcggcttctccagtcgccttaccggcctggcctgtgaccgtttcctcaaagtgtacgatctgcgcatgatgcgtgccatcacacctcttcaagtgcacgtggatccggccttcttacgattcatccccacatacacttcccgccttgctatcatctcccagtcaggtatgatgggcgcagtactgggtataacaggtgcagcactgggtaggacaggcccatgagcagagacacagctcagcaagggtaaccccatctacctttctgttggagaaggaagtaaccgtccaccagactaccgtgctttcacctaggtttgcttagaatgggcctaaggaccacagaagacagtaaagatcccaggcctgtgatcccagctacttgagaggttgaaacagaaaaatggtgaattcaagtcctggctgggcaccatagtgatgccaggtcttaagaaagaaaaacagtacaagccagggctgcagccagatgacagagtgattgctcataaggtgccaggcgctgtacaccaaatcagtctcctgtacaataaaacgtaaatcaaaacaaaaagcatggggactgagaaaatggctcagtattcagagcattttgtagagaacccgagttcagttgccgtcacctacagtgggaggtgtcagtggatctcatgccctcttctggactctgcagggacctgcattggtgtgtatatcccaacacagagcacacatgcaagtcttagctgggtgtggtggcacgtacctttagtagcagcacacaagaggcagaggcatgtggatctctgagttcaaggccagcctgatctgcagagttcaggacagcctgatctacacagagagaccctgtcttaaggggccaagtagaatgactggagacgtgcctttgcggggagtgaagggcctgagttgctcatttgattaatgtgtctcctgacattagaagagggtaaagggttttttttccctttcactttccagggctcactggtctgtccccttttccctcctaggtcaatgccagttttgtgaacccacaggcctggccaacccagccgacattttccatgtgaatcccgtgggacctttgctaatgacgtttgatgtgtcagccagcaagcaggccctggcctttggggattctgagggctgcgtgcatctctggactgattcccctgagccgtccttcaacccctactcccgagagactgagtttgccctgccctgtcttgtggactccttgccgcctctggactggagccaggatctgctgccgctttccctcattcccgtcccacttaccactgatgcactgctctctgactggcctgctgccaactctgctcccgctcccaggttgtacctcactgctgggtggagggctcgtggggggagagatggaagcctttgctagcctggctatcattccatggctatagttattttttgtctaccttaaatgctttttctaatcctgaacccatgggttgggaagtgcatgggtggctgtcatggcccttcaagctagaactacactggattataggcgagcaccacctgtggatgcagaaattcttcgaaccatgaagaaagtgggcttcattggctatgctcccaaccctcgcaccaggctgcgcaaccaggtgtgttcagaggcaagcctactgtgttctcctatctcttactagtgtttgttttgtttttaaacagtaaaggtttgggatgtgtgtgcagaattcaagaagctatgcttgttatgtctgatccatagaggacaagattttatcccttagcgtggttattgggttgaaaaaaagacattaacccatcagaaattgtgtatatctttttgttaaataccaaacgaatgttaggagcactctgtgccagagctttccagagaggctagagcagttaagataagggtattgaaagaggtggacagggggaccacgagtgtgtagtcttggaggaggaggaagatgctaaaaataacaactgttagagaaggtctcaggaaatatgtggtgacattgtaacattacaacactttacgcctgtcttattagtgtgtgtgtgtgtctgtgtgagtgatgtgcatatgagtgtgtgagtacaagagtatatgaaagtgtatgtgtgagtgtgagtgtgagagtgtaagtgtatgtgagcctgtgtgagagtgaatgtgagagtgtgtgtgtgagtgtttgcaagtgtgtgtgtgtgtgatgtgcgtgaatatgagtgtatgtgtgtgagagtgtgtgagtgcaagagtatatgagagtatatatgagagtgtgtgtgcttgcaagtgtgtgtgtttgcaagtgtttgagtgtgagactatataagagaatgtgtgtgtgagtgtatatatgtgtgagtgtatgtgtatgtgagcctgtgtgagagtgaatgtgagagtgtatgtgtgagtgagtgagagtgtgtgagcatatgtgtgagtggtatgtgcgagtgtaggcatgaatgtatcacaggcacatgcggaagtcagaggatgactcttattaattggttctccatccatcttgagatctaggaattgaacttgggtttgaactctgccccaattttatacttgtgtacagtgcgatctgtgttgctttcctaaggtaaaccaaaagcatatttctcagtgttctttctttctttgttggcagcattttgcagatttatttattgattatatgtaagtacactgtagctgtcttcagacacaccagaagagggagtcagatctcgttagggatggttgtgagccaccatgtggttgctgggatttgaactcaggaccttaggaagagcagtcaggtgctcttacctgctgagccatctcaccagcccatgttggcagcattttgatggaagaccttttatatgtttgtaatagataaaaataaagtaaatggaagggttgattttttaaaaatttatttatttattttatgtgctcttacctgctgagccatctcaccagcccatgttggcagcatatgagtacaccattgttctcttcagacaccccagaagagggcatcagatctcattacagatggttgtgagccaccatgtggttgctgggaattgaactcaggacctttggaagagcagtcagtgcttttaacactgagccatctctccagcctgggttaatgtttttttttttttaatcataaatcatatacagattaaacttaattgcttttcattaaccaatgtgaatatctttctgtaagcacagttatgttgaaataaagatttaaaaataagaaaaataaaagagtaaagtaggcaccgggtgacatggcatacaccggcaaccctagccttgggtagctggacagttcgagggctttttgggtatatattgaatttaaggccagccttggctacaggagaccctgtctcaaaaaaattaaattaaaaataaaaataaataaaaacagagtcagatgtgatggcacaggcctttaattccactacttataaggcaaaggcagaagttcaaggctagcctggtctacatacggaattccaggccaaccagggctacatagtgagactgtctcagaacaaaacaaaataaaaaacatcagaaaggaaaaaagaaggggaagccaaagatattaaacagtccattggagtttctttctctcttttttttttttaaaaacccaaaacccctagattccctatcgactaaaggagtcagaccatgaatttgacaacttcagccaagtcacggagtcaccgacagggcgagaagaggagcctctccacacagtttctaagaaataccggaaggtgctggggacactgagtcggggtcttgtgggacttgtgggggaagggtatcacgagggattgaatgtggtccataaagtcttcctccacagtctagacccaggaggccctctgtcctcatcctgctccaactgtctgtgccttaggtaaccatcaaatattccaagctaggcctggaagactttgacttcaaacactacaataagactctgtttgctgggttagagcctcacatccccaatgcctactgtaactgcatgatccaggtaagggcaggctctccatgcctgagcctgcacatgtctcctgctctctgtatccctcccctgctctccctaggtcaccttggtgcctcccctggaccttggcctcatctactgtgtaccctcccttgtaccactgtcttctctgtgagctccattgctttactggagtcccgctttgtatccagcgctcacagatcgctcctcccacccccatctttccccactcccagtttccgcaccagctctcctgctcacccccccgcccctgcccctgcaccagctctcctgcccctgcccgcaccagttttcctgctccccctgccccaccaccagctctcctgctaacccctccaggtgctctatttcttggagcctgttcgctgtctgatccagaaccacctttgccaaaaggagttctgcctagcgtgcgagctcggcttcctcttccacatgctagacctctctcgtggcgatccttgtcaggtcagtcctccgagacctgggacactcaaaatggcaagggacagaaggtggatggttgaaaagggcacatttctgtcaacataaccctcttcttccagggcagtaatttcctccgagctttccggaccatccctgaggcctcagctctgggtctcatccttgctgactcagatgaggcttcaggcaagggcagtctggcccggctcatccagaggtggaaccgcttcatcctcactcagctacatcaggatatgcaggagctggaagtgccccaggcttatcgaggtgctggaggcaggtatggaactggacaagaagaaagcccccaaagccagccccctgggactcaaagggtcttctaatgctcggtgtgtgtgtgtgtgtgtgtgtgtgtgtgtgtgtgtgtgtgttgccctcacctctctcagcagtttctgctcatcaggagactccatcattgggcagctgttcagttgtgagatggagaactgcagtctttgccgctgcggcagcgagactgtgcgggcctcgtccaccctactcttcacactctcctaccctgagggtagcatctgtggtataccctgcacctgggttgggaggctccctcagataacttgtaacaccacagaggggtcttggggggaccgtgggtagaggagggagcctggagtgaagtgtcaagtttcccctcagataaaaccgggaagaactatgactttgctcaggtgctgaagcgaagtatctgcctggagcagaacacacaggcctggtgtgacaactgtgagaagtaccagcccacagtgagtaagctggggttctgcttctttgaggactcatgcatggtggcctgccagtgttagcacggctttccaggggcgtacggggagagggaagaactccacttttacagatcctgtcttggcttcttgctttttctgtagacaatgccatttcttgtttccttctctcagattcagaccagaaacatccgacatctgccagatattcttgtcattaactgtgaagtgaatagctcaaaagaggctgatttctggagactgcaagctgaggtagtgaccatgattggaagcaggtcttcccatgactcctttgtctttatatcttgctttacctgggtatatgaatatgttctttcctttgtgttcaggttgccttcaaaatagcggtgaaaaagtacggcggggaaatgaagagcaaagagtttgctttagctgatcggtgggtgcatcttagagtggtcagacggtggagctacttgctggtctctctctccactggttccatatcttgagagcacatttccacttcttctgtcctaataggaaggaactgaggagtccagagggctttctgtgttcctccatcgaggagctgaagaatgtctggcttccattttccatccgcatgaagatgaccaagaacaaaggactggatgtttgcaactgggctgacgagcatgaggtgcaggcagttgaaaagtgggaagaagagagggactgagggagcgaaggtgggcggaaggtgaggcagggcaggggatggaggaacttagaggatcaaggaaaggaataaaacgtacgcttaccagttctggggttgtctagaataattcagtttagagttgggaagtcataggtgggctaaaatggagataccctaccctctgccctttatccccatcccccatcccacaacccatccttaaacttagcttagcagcctgggtgccccctcacagtggggtccggccagggcagaggaggagcttggtgtctatgtatatgacctgatggctactgtggtacacatcctggactcacgaacaggcggcagcttggtggctcacatcaaagtcggtgagacctaccaccagcgcaaggaggtgagtgaaatgacacagggaagaggtggctgcagtacagtcccaggctgtccccgagctcctggccaggagacagatagctctcacttgacttcagcctggctctgtacttgtgcagggcgtgactcatcagcagtggtatctcttcaatgacttccttattgaacctattgataaggtaagtcaaatgtgttctgttccccatattattttggggaggttcagagtgggtgttgctgtgtgacttaggttcgtgaattcactgtgtagcctggggtacccttgacctcgtgatctgtctgcctcagcctctagagtgccatgactgcaggtgtaattacagcccatttccccttcatctgcctctccgttagtgttcttattcttgggctcctatagaatgccgggaagggtcatgatgaatctagagaggcttttcgaataaatggcatcagaagacatatatatatatgtattattattatgtatgtatgtatgtatgtatgtatgtatgtatgtatagctgggcggtggtggcgcacgcctttaatcccagcactcaggaggcagaggcaggcggatttctgtgttcgaggccagcctggtctacagatcgagttccaggacagccagggctacacagagaaaccctgtctccaaaaaccagactgaggcagtgctcagaattaaacccagagccttaggcaccataatgcaagcacactaccactgagctaacttctagcccctgtgttctgtctcctctagtatgaagccgtgcagtttgacatgaattggaaagtacctgctatcctgtattatgtcaaaaggaatctcaattccagatacaatctgaatagtaagtgacacggagtggcccaaaggcttaggcagcctatggtctcaggagagagcctggggggtggataccttagtagtagtattcaggattggtagctggagctaactcttctaaagatactaaagaaattcctgctgatcagatcttaagtttggaagctggctagggatggtagcttacacctgtaatcccaatactcacaaaaggctgtggcaggaggattgttatgagttcatgacctggactatacagttagttcaaggcctacctgggctatagagtaagaaccacttcaaaacaacaaaacaaaattaattttgtagttggaaattgcgagggtggcgtgaaggacactagataagagtggcttaggttaaacttttgattctgaacattcctatcttcttttgtagtggtctgaatgagaatggccaccataggatagccttcttttcagatggcacttattgttgcttatttattgttattattgtgtgtagagaccaaaggacaactttgtaacaccagctctccccttctctgtgtatgctcagattgtcagactagcagagcaagctgccccattccagtcattgccatcacatgactgtctcttctcaggggcatgagttccttcaggggtaccaacttggtacctttaaacaatagtttctctgaagcttgttttttttctggattttgtagctaaggtccaaactgaaaattttattctgtcattcccactatttctgtctttttcttggtctgtttcttgataattttataatttcatctattgtattaccaggtacagtctccttttaatttttttgttagagtttaatttactcagtgtgtgtgcattagcatgtgtaccacagcagaatgtagacatgaggagtttgtgggagtaggtcctttccttcttccatgtggattctgggggtcaacttcaggctgtagacttggccacccaggtacactccttgtccccaaatgctttgtttatcaggagatcacagtatagacggagagcctctgagcagccatcctggggtcttcccctagccttttctctagccccagtcttctctgtattccctttccagtcaagaaccccattgaggccagtgtgctgctggcagaagcctcgctggcacggaagcaacggaaaacacacacgacctttattccattgatgctgaatgagatgccacaggtcggggacctggtgggcctggatgccgagtttgtcactcttaatgaggtaactagggccaaaagatgggacctgaatggggacagaactctggggatattaggaattgtgtttctctggtgtccacattaacctttgtgacataggaagaagcagagttacgcagtgatggtaccaagtccaccattaagccaagccagatgtcagtagcaaggatcacctgtgttcggggccaagggcctaacgagggcatccccttcattgatgactacatctccacgcaggagcaggtgagaagatatgaggggcattgaagtcaaccctgtgcttccatagagtgcttaagaaccctaagaagagtgactggaagagaccacaccttctccagcccagagatttgtctttttctctactcctaggtagtagattacttgactcagtactcggggataaagccaggagaccttgatgccaaaatctcctcaaagcacctcacaaccctcaagtctacctacttaaagcttcgctttctcattgatattggagtcaagtttgtgggtcatggtctgcagaaggacttccgggtcatcaacctcatggttcgggcagggcttatttcagagtgtgttttttgttgttgttgtcttcctttgtttcttgtttgggttttgttgttgttgttgttttgacacaatgtctcactaagcagctctggctgccctgtaactagttaagttaagcagaccggctttgaactcatagaggttcgcctgcctcctcctgagtgttagaactgaaggtgtatattaccatccctagcacccccctccctctaatatacagccttcttccaacccaacttgctccgaccatcttcattcactcaccatactttaaaaaacaaaattaagtttatttggtgtgtgtgcgctcatacacacctcctcctgcaagtactgagttacacgtgtagaggtcaaagatcagcttgtgcacgtcaactctctccttccatctcgtgggtcctgggaactgaagtaaggttgtcaggcttggtggcaaatgcctttacctgctgagccaccttgctgacctcggagttactcttctggctgactactcagggcatatatctgaattcagagaatgggaggttctggatcatctgtctcaaggcttcttttcttctggtccctgctaggtgcccaaggaccaagttcttgacacagtctacctgttccacatgccccgaaaacgaatgatttccctacgattcctggcctggtattttctaggtgagttgctctaccttgtgcgccctacagtaagaactgattacaagcagaaaacattcagggtggagacagggtagatggctcagaggtgcttgcttgtttcttgtttggggttttgtttttgtttttgttttgacacagtgtctcactaagtagctctggctgccctgtaactagttatgttgagcactggctgctcttccagaggtcctgagttcaattcccagcaaccacatggtggctcacaaccatctgtaatgggatcccatgccctcttctggtgcgtctgaagagagagacagtgttttactcacataaaacaaacaaataaatcttaaaagaaaacatcaggggcaggggatacagctcagctggtagagtccttgttgagagctcagcaccacatggaagtggacacaggcggcaggcctgcctagagtcacaactcaggagacacagaagaaacagaactttaaggttagtctcagtacataatgagttcaaggccagcctgggctacaaaaggccatttttgcttttaaaaaggagagtagaaagcaccaggaggcgacactttcaggtctgtaagtttgaagccagtctgggcagtagaggagatactgtcttaacaacgatagcaaaaagctacaacaatctctcaggaggcagaggcaggtggatgtctgaattcgaggccagtctggtctacagtctcagttccaggacagccagggctacacaaagaaaccctgtcttcaaacaaacaaaaaatctacaagaacaacaaaacaggaatcattttagaataaagaatagttatttctcaagttagaattaccatttttttcagctaatggttttagttagatctatcactaatttaagaagacgttttctgggtctgacgagttggcttagagcacctaccactgctcttgcagagggcccaggatcaagccccagtgcttaacatgatagctcacaaccgctcacaaccgtgtgtaacctcagttcaggcaatctgacaccatcttttgaccttcatggtcaccatgcacacccatacatagaccacgcaggcaaaacagtcagtaaacataaaataagaaaagatgtttctaggagactgcgtgggagtgttgtgggtgccaggatagagatggggtgcctgccgcctttgtgagttccttaagtatcggtgtaccccagacctgaagattcaaggtgagacccatgacagcattgaggatgcccgcacagcccttcaactctaccggaagtatctggagctgagcaagaacggcaccgagcccgagtccttccacaaggtgctcaagggtctctatgagaagggccgaaagatggactggaaggtgcctgagcctgaaagccagacaagtcccaagagtaaggctgggctgaggcgagggaaactgggctgggtaggtgttgctggcatatgtcgagcttgtataccaccacctcagattataatacccctacctgctcctgaagtgtctgacagttcacacatcactcagtgtttccaatagtcagtgagagagacactggtgtagccgcttgctcagggaaatgtccatgccttgccctacttccctcatgctctttctgtatagtgagtgtcctggtgcctcctctgctcaccctggtctccgtgattctgtctcctaacagatgcagctgtcttctcctcagtgctggcactgtgagctgccttccctttcagtgctgtccccagaactgagaggtggcttctcaagtcggctttaccctgtccacttccagaactggatctgctcagggtctacagatggtgctattaatagaactggaaagcagcaaaattgttgcaaaggttctagctgccagattccccctttatcctctgcaaaacagtgggccagaaacaaagcctaaagtgacccaggtggagtgattggtgttcgtaataaatatcctgggcaactgatatctgtacaaaagagctctagaaccagaactctcagttcccagtctgctagagaactgaagtcctggacagtcacagggtacagagacccaggcagctccagcatctagctgcttgagagacggtggctgggtggaccagcttgtagagtctcaatgggccaatcaaaccggtgtgcaggaagctgagctactggcttcattcctgaccacagctgagaagtatctgtcttccatacattctatctcgagttttgttttattttttaaaaattttgcttaaaacagcatgttttataaaataaaagtatttttatctcattagaaaaccgctagtgtgggattctttggcttctttctttctttgatttgacttcaccaaacaatgagaaaatgaaaactgtgttttcagatccacacctagaaatgaagattctgagtcccagaatgaatggatccaggaggaacatagtttttttgtttttttgtttgtttggttggtttttggtttgttttttgagacagggtttctctgtagccctggctgtcctggaactcactttgtagactaggctggcctcgagaactcagaaatccgcctgcctctgcctctcaagtgctgggattaaaggcatgcgccaccatgccgggcaccaggaggaacataattgttcttcccctggacggtgttcggtctttgctgtagttgcctagcaccctaaatacataaagcgatcacaaatcccagtttatctcaagaccttaaggcgtggtgtcaacctgttatcctaacagcggagcagttgagaaccacagtccccaaccagcctgcgatggggagttgagttcaaggcatcctgggctacatagcaagacactgcttcactcatgacagtacctgcggtgtgccgaaaattcagagaggaattgctctattcacagcgtgagagctaagaagaatattgaccgtaatataacccacacccccatcctcagaggataaattaagagaaatctccaagaacctgcctgaaaaggcagataataccaaaaatgatattacccaatacatacctaatgacgatcatttattaatttggtacaagaaggaagttgttttaaaaactagtttttttgtttgtttgtttgttttttttttaagaaagaaaaagacctgtagctactggcagagtggtactgcagtgcttcctgggaaatgtagtttgctgtatcatgaaatctttgtgcattgaaacctaggcttctctcccactactaattgcatctgtttgcaagtcctagcccacctggactgatgcaatttccccaggcaccccatgcgctcggtcctcactgtaagctaggctacctttgttctttggttggtcacgtgaaccaattcgccacgcaagtctgggtcctcaagtcttccaaggggtcctcgctgcctcggaggcgctcctaaagctgcctgctcgcgcgagagtttggaggggcgggcttagggtcagtttcggtggggggctcgcacgggaccctcagatctccgcttaggtgcctagttaagtgcgggaagctgggccaggcggtcactggccaccctgaacctggcgggagccggagcgctctggagaagccgggacagccccgtttttcccagccagctgctagggttgggacccacagaaaacaaagtgagagtccggctgctttccagagcctgggccacggcggcggccgtgggagcagaggtgggacagatgcgagcgtcagaggctgtgggcgcactgaggttgggaatggacccgagcaaagcgatggcggagtccttacaaaaggggctggtctgtctgcacgggagctacttacattctagagatggggattccggaacccttggtgctaggtccacataggccctggttatggagtgtgctcgctggcttcatggcctgactggttccttgctggcagctcctttctgcccgtcattctcacgtaatcgataacctccatctcaaagctactgcatagctctgtgagtcctcagtgtcctcaaagtatcaaaacccaggccctcacctgtggaggacatagtttctggatctgagtcccagtcccgagctctcactccctattcccccatcccgaactccggtccctcgggtgtttgtaacgaggttttttcctggaaaacaatccgaatcacaccaaggcctctgaaggccttggaatgaggggtgacggtcatgggggaaatggatcgctctcctcacacctgtgtttcattttcatacaaatccaggtggagcgaccctgttacactaaagatgaaaggctggggttggctagccctacttttgggggtcctgctgggaactgcctgggctcgaaggagccaagatctacactgtggaggtaaaagcacgaagaccagtggagaagtgggaggaagatgacccgtgggagtcatgagatccaaagcttggaacaaggatggatagaaaaaccctcattcccctcaccatccccactccctgttctcttccctgacaccagcttgcagggctctggtggatgaattagagtgggaaattgcccgcgtggaccccaagaagaccattcagatgggatccttccgaatcaatccagatggcagccagtcagttgtggaggtaatttactatccctcaaataaagtagctcactcgggcttagagtatgaacttgttcgaagagaagaaagcaggaagtcattcgacctgtaatgataatgatctcaaccctcagaggcgggaccagaaggatctttctgagttctaattctggtctaccccatagaattaggtactgtcttcgaaaagaaaagaaacagcctggtgtgatggtacatatcattaatcccagcagaggcaggctgatcttgaatttgaggccagcctggtctacaaagagagttccaggacagccaaggctgttatagagagaaaccctatctcaaaaaaccaaccaaacaaacaaacaaccaaggagccagaacattgattgtgtatcagaaggactgggctctaagccacttatggtatttgcatgcctgtaatcctagtacacaaacagcagagcagttgggttctgcctatctggaagagcctggaaagttataaccacgtatttctttgccccaaacctcaattaattgtttctgctgtagaagttaggtcttgattagtctgtttctcctcatccccagtccgcatgtctcttgtttcactatagcagtattgtatatatacatttatttaaaaaaagaataagaggtcttgtccagctgggaatgtagctcagttgatagagtgctagcctcgcatgcacagaaccctgtgtttggcccttaacatcccataaacccagcatactggtacactcctgtgatgcctgccctcaaagtcttccctggagctagagagatggttccgtggttaggagaacatgctgctgttgcagaggacttggctcagattctagcacccatgtagtggctcataactcattctggggaatcaaacatttccttccggtgtctgtgatcaccaggcatgtatacatgcaagcaaacactcgtgcataaaataaaaataaatcatttttttaaaaaaagtctttgtattcaagaaatttatattagctagaagcataagttaaagctatacctagtaagaaatatgcaaggaaatttattttaatgattgatttatttttactttatgtggattggtgttttgcctgaatccatgtctgtgtgagggtggagttaaaaacagttgtgagggctggtgagatggctcagtgggtaagagcacccaactgctcttccaaaggtccggagttcaaatcccagcaaccacatggtggctcacaaccatccataacgagatctgactccctcttctggagtgtctgaagacagctacagtgtacttacatataataaataaataaatcttaaaaaaaaaaaaaaagccaggcgtggtggcgcacgcctttaatcccagcactcgggaggcagaggcaggcggatttctgagttcgaggccagcctggtctacagagtgagttccaggacagccagagctacacagagaaaccctgtctcgaaaaaccaaaaaaaaaaaaaaaacagttgtgagctgccatgtgtaaacccagacccctgggaaatcagccagtgttccctaaacactgagccatctctccagtcccatcaaggaaacatttctgtgacgcatgttggtgtgctgtcatcgaaacctataccccctctttacatttttgtttggttggttttttattttatttccaagactctgcagccctgggtgttccaaggagctcactatgtagaacaggctggccttgaacttacagacatctgcctacctctgcctcctgggtactggaattaaaggtgacaatatatctggcttttaatgttattttaataaataataaatatctatgtccacaaaaaaaaaactaaacaagttcacggggggaaaaaaaccatagttcattatagttgatcaaagtggtttttgcctataattcggagctaaggatattggtgcgtgttttataatcaggcaaaataggattgtacatttgcctggagtgcaggttgtgagttacgctgtgcactgctggttcttggaagttaatagggattctcggggacacagattgggagttgggggtagatttctatgagttcaaggccagcctggtctacatagttgcaggccaccaaccaaggctacagggtgagaccctgttccaaaggatgggcaaacaaaatgtgcacatttgaaagtaacttgagaggaagaaagaatgggcagatgtcgccacaggatatcattagggaaggtttctttgtttttagaatgagttgtttgagctagattcgaaaggaaaggaaagagttcaaatgagtaacatctgaggtagaagggagtgaccaaaggctgagttcatttctaggtaccttatgcccgctcagaggcccacctcacagagttgcttgaggaggtgtgtgaccgaatgaaggagtacggggaacagattgacccttctacccaccgcaagaactacgtacgcgtcgtgagccggaatggagaatccagtgaactagacttacagggcatccgaattgactcagatatcagcggcaccctcaagtttgcggtgagttaccgctgtgccgtgagtagctgtttcttgggagttatagggattccctggcacaggatgggagatggatgcggaagtggtgttgcctgcttgtaacctgagcactccaggagcaccggttggaagatcagcttaagtttgaggctgggcctagttcatagtgagttcgaggccagctgggcagatatagtaaggccctgtctataaaatccccacccccaccccaaaaccaagtagagagctgagccagtgtctttgcccagctcgggatctgggtcaattctctgtcttcttggtccgcagtgtgagagcattgtggaagaatacgaggatgagcttatcgaattcttctccagagaggctgacaacgttaaagacaaactttgcagtaagcggacaggtgagcacccccgactttccgtcccacgctcacagccctgtgtaactcggcttgcggccctgaccctcgccacacagaatgtgtggccacacgctcagacctctgacaggtgtcccacactgctggcttccatttcccttggcttagggtttggagtgatttctctccagtctctgcctaatagttctcagagtatgtgtctctgttaccctgggttcaggagagggagctgtgggaggtggttggccacggtgattgttggttggcgcgggtgctttctggtgaggggtgtatgtgtgtgtgagggtggctgtttccttcacactgttacgtactatttgcagatctatgtgaccatgccctgcacagatctcacgatgagctatgaatcactggagcaagcagcctacaccaaacgtgatggaacacccccaggaggggaagatggcagcattgccttttatattacgtttttatggaaatgaactgaaaaaaactcttgaaaccgaaagtacaaactgtgttgtcttttttttttctcattttggttttttgagacaggttttttctgttgttttgtttttttgttttttatatagccctggccatcctggaactcactctgtagacaaggctggcctcgaattcagaaatccacctgcctctgcctccctggtgctgggattaaaggcagcgccaccactgcccggcactgtgttgtcttttatgcccaaaggcagcctttgtaccaggcttgaaggttgggggctacagatgggaagaaaatgaagggatgggttgtaatagcgtacatttaaaagggccctggcccattaattctctgtcatgtggaattctgttcacttacaaactggagatgagtatttattcagtgtgtacttaatgatgtgttagcagctgtggtgctgtggagaaagagcctgaatgacagcacaaggcgctgggaggtccctgtactcctgctggaaaaacattgaagatgggaactgatctggacggaagtaatcgagcaatcgagctgcgttgttcttttgttcttttctcttttttttaagatttatttatttaacaggtatgtgagttcatgctcgctgtcttcagacccaccagaagagggcattgcatgccatcacagacggttgtgagccatcatgtggttgctgagaattgaactcgtgggacctctgaaagagcagtcagtgctcttaaccactgagccatctcgatttatcattcttttttacaggtgaagaaaatgaggtccagagaagccacaaattctaaagtctgaatttagtagaaaaacgatctataatctttctgtcaagctgatctaaagtagttacaaagtagctttattttaagaattattttgttgttgttattattttgagacagggtcttaccaggtagccctgggtggtccagaattcagttcacgatatagactatgctaccctctaatccaaaaagatctgcctgcctctgcctctccagaactgggattaaaagcacatgctacatacagccgggtggtggcggtgcatgcctttaatcccagcacttgggaggcagaggcaggcggatttctgagttcgaggccagcctggtctacagattgagttccaggacagccagggctacacagagaaaccctgtctcgaaaaaccaaaaaaaaaaaaaaaaaaaactgagccacctccagcccctggagcatactttaaagaaaaaggaaaaaagggggttgtttgtatatgtatacatgggcacaagtcagaggacaactctatgaggcctactccttccaccttggcattgttggggtccaggagtcactccacaaccatatgaacactgatctcagccagacagggatagtttattgagcatgtgccccaggacctgattgatcagggctgcagagcagactcaggagctgactgtgaccctgagcgtggatcctacagagcttttaagtctgaaacccacaaacatctgtgccgagttatcacacccatcagggtttagggataggagacttccttaggagcaggtctttgttgtacatttatcctgttactattggctggggtattcaactgtggtggaggacttgcctcgcctaatattcatgtcttaccttgccaaccaggatgtcagtttcccatgtacatgtctgtttctgccaggcagaatgtcagttccaaggaggtcttgggaacttcaacttcccttgactcctattcaaaatggaagctctactcccaatggtttcttatattggagcaggtgtctctcttacagtgggttccagcttctaaagggaagaaaccataaaagctcacacatagatgcaggaggtacagctgggtggttggtttgggtccaagcttattgaggctaactgtacaaagcagttctacctgaccccattgtgattgttagggtctaggtaagatgttgatggcttgtgagctgttacttgtctagcctgaaacttttccacgagctgttactaggaaaatttctcatacactgttgctgctttaccaggatgttctgtgctttggtgttcttggaaaccaatcacaacagaagtcagaactgctttttacagttagccccagtaagtttggacctgaaccagccacccagcagaacttcctgcacctatgtatgtatgagcttttatggtctcttgcctttataagctgcccctgggatgcaccccaatataagagagacacctgcagcccggcagtgatggcccatgcctttaatcccagcacttgggaggcagaggcaggtgaatttttgagttggaggccagcctggtactacagagtgagtgccaggacagccannnnnnnnnnnnnnnnnnnntgtttcaataagaagctattttgagtaagactttttgagtaggggtcaagtaaagttgaagttcccaagacctccctgggaactgacatcctgcctggcagaaagagacacctgtgtgggtaactgacatcctagttggcaagttaagacaagaatgttaggcaaggcaagtcttctgccacagttgaaataccccaaccaatgggaacaggatacgtctacaagagacaagtttctagggaaatcccctatccctaaatcctgtttggtgggatgacttggcacagatgtttgttgatttttggcataaaagccctataggatcttaacttcacaatcagctcctgagtctggtctgtggccctgatgcatccatccatcctggcgtatggcattcaataagccatccctatttgactgagatctgtgttagggtgatttgagcagcgattcccagactccaacaattggtttccaagaacaccaaagcacagaacataaccgaagatgcaaccaactgaggcatgagagagtttcccagtaatggcatatgacaaagtttccttgtaacattagtaacagcacaaaacggcaggatagacaggcaccagttacccaggctttcacagacatgactatggggacagagctgagttttcagtgtgtgtgtgtttcatgtgcatgtcctttttttcttttttattgatttttttttaaaaatttcatttgcattggtgtttggtcttcctgtttgtctgtgtgagggtgttggatcttgtggaacttgagttacaggcggttgtgatctgttatatggggctgggaattgaacctgggtcctttggaagatcagctggtgctcttaactgtttttttttttttttttttttggaaatatttatttatttattttaagtacactagctgtcttcagacacatcagaagagggcttcggatcccattatagatggctgtgagccaccatgtggttgctgggaattgatctctggacctctggaagaacagtcagtgctcttaactgctgagtcatctctccagcctcttcctttttatttttaaagactagttttctgctcttctggaattcactccgtagactaggctaatttcaaactgggagatttgtctgactctgccccccaagtgctgggactacaagggtgcaccaccatgcctggcagagcctatattcctaactttgcaaatcaagttctagtttaagcattggatgccttcttatttatttatcattaacgttgtaaagtttcagcaaacatttccataacagtccggatgcaaccaggaaactttattacatgaaaaagtagtcctggcaggagtgatggacccttggtttagaacatttgctcttgcagaggccctggggttggccccccgcacccacatggtggctcacagctgtctgtaactccagtttcagaggatctgacactttcttctaacttgcgtgggcaatggacactcatgtggctcacataaacaaacaaacgttttttagaaagaaaatgcagaccagcagtatcacccagtgtcacatgcaggtagttctagctaagctagaggagagctaggaggatacttgaaatgatgagttggaaaccaacctatgcaatgaaacaaaagcctactagattttgttattgaatcacatgggacagcggaggcaggaaggtctcaaattcaaaatcaacctgtaatatcttttttttttttaaatagagtttctttgtacagccatgg

SEQ ID NO: 1321 - DNA, 5057 bp, Mus musculus
gcgggggagtagtagggaaactggaatttcccgcggagctgacggcgctttctctaccccctactcgtttgaattccacgcgctccaaaatatccgccatggagaaatcttggccagaatgtccattctaggttcactggtgctgtcctcctgaaggctgggtcacttgtctgtaggaagcgtggcaagggagggtgtgactccggtctgaccagcggccactatcgtcatgaactttgagggtctggatcctggactggccgaattttccccagctatgcattctaccctggacccagtcctggatgcccacctgaatccaagtttgctacagaatgtggagctagacccagagggagtggccttggaggctcttcctgtccaggagtcagtgcacataatggaagggccacgccacctccttcttcggcccagctctggagcgctactcatcctttcaggtcaatggtggtgacgacattcggcaaatccagagcctggagaacggtatcctcttcctcaccaagaacaacctcaagtacatggcccgtggagggctcattatatttgactatttgctggatgaaaacgaggatatgcacagcgtcctcctgacagacaacagcactctgctcgttggggggctgcagaaccacgtactggagattgacctgaacactgtccaggagactcagaagtatgcagtcgagacacccggagtcaccatcatgagacagacaaatcgtttcttcttctgtggccacacatctggcaaggtttccctgcgagacctccgtagttttaaagtggagcatgaatttgatgccttctcagggagtctgtcagattttgatgttcatggcaacctgctggctgcctgcggcttctccagtcgccttaccggcctggcctgtgaccgtttcctcaaagtgtacgatctgcgcatgatgcgtgccatcacacctcttcaagtgcacgtggatccggccttcttacgattcatccccacatacacttcccgccttgctatcatctcccagtcaggtcaatgccagttttgtgaacccacaggcctggccaacccagccgacattttccatgtgaatcccgtgggacctttgctaatgacgtttgatgtgtcagccagcaagcaggccctggcctttggggattctgagggctgcgtgcatctctggactgattcccctgagccgtccttcaacccctactcccgagagactgagtttgccctgccctgtcttgtggactccttgccgcctctggactggagccaggatctgctgccgctttccctcattcccgtcccacttaccactgatgcactgctctctgactggcctgctgccaactctgctcccgctcccaggcgagcaccacctgtggatgcagaaattcttcgaaccatgaagaaagtgggcttcattggctatgctcccaaccctcgcaccaggctgcgcaaccagattccctatcgactaaaggagtcagaccatgaatttgacaacttcagccaagtcacggagtcaccgacagggcgagaagaggagcctctccacacagtttctaagaaataccggaaggtaaccatcaaatattccaagctaggcctggaagactttgacttcaaacactacaataagactctgtttgctgggttagagcctcacatccccaatgcctactgtaactgcatgatccaggtgctctatttcttggagcctgttcgctgtctgatccagaaccacctttgccaaaaggagttctgcctagcgtgcgagctcggcttcctcttccacatgctagacctctctcgtggcgatccttgtcagggcagtaatttcctccgagctttccggaccatccctgaggcctcagctctgggtctcatccttgctgactcagatgaggcttcaggcaagggcagtctggcccggctcatccagaggtggaaccgcttcatcctcactcagctacatcaggatatgcaggagctggaagtgccccaggcttatcgaggtgctggaggcagtttctgctcatcaggagactccatcattgggcagctgttcagttgtgagatggagaactgcagtctttgccgctgcggcagcgagactgtgcgggcctcgtccaccctactcttcacactctcctaccctgagggtagcatctgtggtataccctgcacctgggttgggaggctccctcagataacttgtaacaccacagaggggtcttggggggaccgtgggtagaggagggagcctggagtgaagtgtcaagtttcccctcagataaaaccgggaagaactatgactttgctcaggtgctgaagcgaagtatctgcctggagcagaacacacaggcctggtgtgacaactgtgagaagtaccagcccacaattcagaccagaaacatccgacatctgccagatattcttgtcattaactgtgaagtgaatagctcaaaagaggctgatttctggagactgcaagctgaggttgccttcaaaatagcggtgaaaaagtacggcggggaaatgaagagcaaagagtttgctttagctgatcggaaggaactgaggagtccagagggctttctgtgttcctccatcgaggagctgaagaatgtctggcttccattttccatccgcatgaagatgaccaagaacaaaggactggatgtttgcaactgggctgacgagcatgagcttagcagcctgggtgccccctcacagtggggtccggccagggcagaggaggagcttggtgtctatgtatatgacctgatggctactgtggtacacatcctggactcacgaacaggcggcagcttggtggctcacatcaaagtcggtgagacctaccaccagcgcaaggagggcgtgactcatcagcagtggtatctcttcaatgacttccttattgaacctattgataagtatgaagccgtgcagtttgacatgaattggaaagtacctgctatcctgtattatgtcaaaaggaatctcaattccagatacaatctgaatatcaagaaccccattgaggccagtgtgctgctggcagaagcctcgctggcacggaagcaacggaaaacacacacgacctttattccattgatgctgaatgagatgccacaggtcggggacctggtgggcctggatgccgagtttgtcactcttaatgaggaagaagcagagttacgcagtgatggtaccaagtccaccattaagccaagccagatgtcagtagcaaggatcacctgtgttcggggccaagggcctaacgagggcatccccttcattgatgactacatctccacgcaggagcaggtagtagattacttgactcagtactcggggataaagccaggagaccttgatgccaaaatctcctcaaagcacctcacaaccctcaagtctacctacttaaagcttcgctttctcattgatattggagtcaagtttgtgggtcatggtctgcagaaggacttccgggtcatcaacctcatggttcgggcagggcttatttcagagtgtgttttttgttgttgttgtcttcctttgtttcttgtttgggttttgttgttgttgttgttttgacacaatgtctcactaagcagctctggctgccctgtaactagttaagttaagcagaccggctttgaactcatagaggttcgcctgcctcctcctgagtgttagaactgaaggtgtatattaccatccctagcacccccctccctctaatatacagccttcttccaacccaacttgctccgaccatcttcattcactcaccatactttaaaaaacaaaattaagtttatttggtgtgtgtgcgctcatacacacctcctcctgcaagtactgagttacacgtgtagaggtcaaagatcagcttgtgcacgtcaactctctccttccatctcgtgggtcctgggaactgaagtaaggttgtcaggcttggtggcaaatgcctttacctgctgagccaccttgctgacctcggagttactcttctggctgactactcagggcatatatctgaattcagagaatgggaggttctggatcatctgtctcaaggcttcttttcttctggtccctgctaggtgcccaaggaccaagttcttgacacagtctacctgttccacatgccccgaaaacgaatgatttccctacgattcctggcctggtattttctagacctgaagattcaaggtgagacccatgacagcattgaggatgcccgcacagcccttcaactctaccggaagtatctggagctgagcaagaacggcaccgagcccgagtccttccacaaggtgctcaagggtctctatgagaagggccgaaagatggactggaaggtgcctgagcctgaaagccagacaagtcccaagaatgcagctgtcttctcctcagtgctggcactgtgagctgccttccctttcagtgctgtccccagaactgagaggtggcttctcaagtcggctttaccctgtccacttccagaactggatctgctcagggtctacagatggtgctattaatagaactggaaagcagcaaaattgttgcaaaggttctagctgccagattccccctttatcctctgcaaaacagtgggccagaaacaaagcctaaagtgacccaggtggagtgattggtgttcgtaataaatatcctgggcaactgatatctgtacaaaagagctctagaaccagaactctcagttcccagtctgctagagaactgaagtcctggacagtcacagggtacagagacccaggcagctccagcatctagctgcttgagagacggtggctgggtggaccagcttgtagagtctcaatgggccaatcaaaccggtgtgcaggaagctgagctactggcttcattcctgaccacagctgagaagtatctgtcttccatacattctatctcgagttttgttttattttttaaaaattttgcttaaaacagcatgttttataaaataaaagtatttttatctcattagaaaaccgct

SEQ ID NO: 1322 - protein, 573 aa, Mus musculus
MRGLIIFDYLLDENEDMHSVLLTDNSTLLVGGLQNHVLEIDLNTVQETQKYAVETPGVTIMRQTNRFFFCGHTSGKVSLRDLRSFKVEHEFDAFSGSLSDFDVHGNLLAACGFSSRLTGLACDRFLKVYDLRMMRAITPLQVHVDPAFLRFIPTYTSRLAIISQSGQCQFCEPTGLANPADIFHVNPVGPLLMTFDVSASKQAFGDSEGCVHLWTDSPEPSFNPYSRETEFALPCLVDSLPPLDWSQDLLPLSLIPVPLTTDALLSDWPAANSAPAPRRAPPVDAEILRTMKKVGFIGYAPNPRTRLRNQIPYRLKESDHEFDNFSQVTESPTGREEEPLHTVSKKYRKVTIKYSKLGLEDFDFKHYNKTLFAGLEPHIPNAYCNCMIQVLYFLEPVRCLIQNHLCQKEFCLACELGFLFHMLDLSRGDPCQGSNFLRAFRTIPEASALGLILADSDEASGKGSLARLIQRWNRFILTQLHQDMQELEVPQAYRGAGGSFCSSGDSIIGQLFSCEMENCSLCRCGSETVRASSTLLFTLSYPEGSICGIPCTWVGRLPQITCNTTEGSWGDRG

SEQ ID NO: 1323 - DNA, 4427 bp, Mus musculus
gcgggggagtagtagggaaactggaatttcccgcggagctgacggcgctttctctaccccctactcgtttgaattccacgcgctccaaaatatccgccatggagaaatcttggccagaatgtccattctaggttcactggtgctgtcctcctgaaggctgggtcacttgtctgtaggaagcgtggcaagggagggtgtgactccggtctgaccagcggccactatcgtcatgaactttgagggtctggatcctggactggccgaattttccccagctatgcattctaccctggacccagtcctggatgcccacctgaatccaagtttgctacagaatgtggagctagacccagagggagtggccttggaggctcttcctgtccaggagtcagtgcacataatggaaggtgtctactctgagttgcacagcgtggtggctgaagtgggagtgcctgtgtctgtctcccactttgatttacatgaggagatgctgtgggtggggagccatgggggccacgccacctccttcttcggcccagctctggagcgctactcatcctttcaggtcaatggtggtgacgacattcggcaaatccagagcctggagaacggtatcctcttcctcaccaagaacaacctcaagtacatggcccgtggagggctcattatatttgactatttgctggatgaaaacgaggatatgcacagcgtcctcctgacagacaacagcactctgctcgttggggggctgcagaaccacgtactggagattgacctgaacactgtccaggagactcagaagtatgcagtcgagacacccggagtcaccatcatgagacagacaaatcgtttcttcttctgtggccacacatctggcaaggtttccctgcgagacctccgtagttttaaagtggagcatgaatttgatgccttctcagggagtctgtcagattttgatgttcatggcaacctgctggctgcctgcggcttctccagtcgccttaccggcctggcctgtgaccgtttcctcaaagtgtacgatctgcgcatgatgcgtgccatcacacctcttcaagtgcacgtggatccggccttcttacgattcatccccacatacacttcccgccttgctatcatctcccagtcaggtcaatgccagttttgtgaacccacaggcctggccaacccagccgacattttccatgtgaatcccgtgggacctttgctaatgacgtttgatgtgtcagccagcaagcaggccctggcctttggggattctgagggctgcgtgcatctctggactgattcccctgagccgtccttcaacccctactcccgagagactgagtttgccctgccctgtcttgtggactccttgccgcctctggactggagccaggatctgctgccgctttccctcattcccgtcccacttaccactgatgcactgctctctgactggcctgctgccaactctgctcccgctcccaggcgagcaccacctgtggatgcagaaattcttcgaaccatgaagaaagtgggcttcattggctatgctcccaaccctcgcaccaggctgcgcaaccagattccctatcgactaaaggagtcagaccatgaatttgacaacttcagccaagtcacggagtcaccgacagggcgagaagaggagcctctccacacagtttctaagaaataccggaaggtaaccatcaaatattccaagctaggcctggaagactttgacttcaaacactacaataagactctgtttgctgggttagagcctcacatccccaatgcctactgtaactgcatgatccaggtgctctatttcttggagcctgttcgctgtctgatccagaaccacctttgccaaaaggagttctgcctagcgtgcgagctcggcttcctcttccacatgctagacctctctcgtggcgatccttgtcagggcagtaatttcctccgagctttccggaccatccctgaggcctcagctctgggtctcatccttgctgactcagatgaggcttcaggcaagggcagtctggcccggctcatccagaggtggaaccgcttcatcctcactcagctacatcaggatatgcaggagctggaagtgccccaggcttatcgaggtgctggaggcagtttctgctcatcaggagactccatcattgggcagctgttcagttgtgagatggagaactgcagtctttgccgctgcggcagcgagactgtgcgggcctcgtccaccctactcttcacactctcctaccctgaggataaaaccgggaagaactatgactttgctcaggtgctgaagcgaagtatctgcctggagcagaacacacaggcctggtgtgacaactgtgagaagtaccagcccacaattcagaccagaaacatccgacatctgccagatattcttgtcattaactgtgaagtgaatagctcaaaagaggctgatttctggagactgcaagctgaggttgccttcaaaatagcggtgaaaaagtacggcggggaaatgaagagcaaagagtttgctttagctgatcggaaggaactgaggagtccagagggctttctgtgttcctccatcgaggagctgaagaatgtctggcttccattttccatccgcatgaagatgaccaagaacaaaggactggatgtttgcaactgggctgacgagcatgagcttagcagcctgggtgccccctcacagtggggtccggccagggcagaggaggagcttggtgtctatgtatatgacctgatggctactgtggtacacatcctggactcacgaacaggcggcagcttggtggctcacatcaaagtcggtgagacctaccaccagcgcaaggagggcgtgactcatcagcagtggtatctcttcaatgacttccttattgaacctattgataagtatgaagccgtgcagtttgacatgaattggaaagtacctgctatcctgtattatgtcaaaaggaatctcaattccagatacaatctgaatatcaagaaccccattgaggccagtgtgctgctggcagaagcctcgctggcacggaagcaacggaaaacacacacgacctttattccattgatgctgaatgagatgccacaggtcggggacctggtgggcctggatgccgagtttgtcactcttaatgaggaagaagcagagttacgcagtgatggtaccaagtccaccattaagccaagccagatgtcagtagcaaggatcacctgtgttcggggccaagggcctaacgagggcatccccttcattgatgactacatctccacgcaggagcaggtagtagattacttgactcagtactcggggataaagccaggagaccttgatgccaaaatctcctcaaagcacctcacaaccctcaagtctacctacttaaagcttcgctttctcattgatattggagtcaagtttgtgggtcatggtctgcagaaggacttccgggtcatcaacctcatggtgcccaaggaccaagttcttgacacagtctacctgttccacatgccccgaaaacgaatgatttccctacgattcctggcctggtattttctagacctgaagattcaaggtgagacccatgacagcattgaggatgcccgcacagcccttcaactctaccggaagtatctggagctgagcaagaacggcaccgagcccgagtccttccacaaggtgctcaagggtctctatgagaagggccgaaagatggactggaaggtgcctgagcctgaaagccagacaagtcccaagaatgcagctgtcttctcctcagtgctggcactgtgagctgccttccctttcagtgctgtccccagaactgagaggtggcttctcaagtcggctttaccctgtccacttccagaactggatctgctcagggtctacagatggtgctattaatagaactggaaagcagcaaaattgttgcaaaggttctagctgccagattccccctttatcctctgcaaaacagtgggccagaaacaaagcctaaagtgacccaggtggagtgattggtgttcgtaataaatatcctgggcaactgatatctgtacaaaagagctctagaaccagaactctcagttcccagtctgctagagaactgaagtcctggacagtcacagggtacagagacccaggcagctccagcatctagctgcttgagagacggtggctgggtggaccagcttgtagagtctcaatgggccaatcaaaccggtgtgcaggaagctgagctactggcttcattcctgaccacagctgagaagtatctgtcttccatacattctatctcgagttttgttttattttttaaaaattttgcttaaaacagcatgttttataaaataaaagtatttttatctcattagaaaaccgc

SEQ ID NO: 1324 - protein, 1191 aa, Mus musculus
MNFEGLDPGLAEFSPAMHSTLDPVLDAHLNPSLLQNVELDPEGVEALPVQESVHIMEGVYSELHSVVAEVGVPVSVSHFDLHEEMLWVGSHGGHATSFFGPALERYSSFQVNGGDDIRQIQSLENGILFLTKNNLKYMRGLIIFDYLLDENEDMHSVLLTDNSTLLVGGLQNHVLEIDLNTVQETQKYAVETPGVTIMRQTNRFFFCGHTSGKVSLRDLRSFKVEHEFDAFSGSLSDFDVHGNLLAACGFSSRLTGLACDRFLKVYDLRMMRAITPLQVHVDPAFLRFIPTYTSRLAIISQSGQCQFCEPTGLANPADIFHVNPVGPLLMTFDVSASKQAFGDSEGCVHLWTDSPEPSFNPYSRETEFALPCLVDSLPPLDWSQDLLPLSLIPVPLTTDALLSDWPAANSAPAPRRAPPVDAEILRTMKKVGFIGYAPNPRTRLRNQIPYRLKESDHEFDNFSQVTESPTGREEEPLHTVSKKYRKVTIKYSKLGLEDFDFKHYNKTLFAGLEPHIPNAYCNCMIQVLYFLEPVRCLIQNHLCQKEFCLACELGFLFHMLDLSRGDPCQGSNFLRAFRTIPEASALGLILADSDEASGKGSLARLIQRWNRFILTQLHQDMQELEVPQAYRGAGGSFCSSGDSIIGQLFSCEMENCSLCRCGSETVRASSTLLFTLSYPEDKTGKNYDFAQVLKRSICLEQNTQAWCDNCEKYQPTIQTRNIRHLPDILVINCEVNSSKEADFWRLQAEVAFKIAVKKYGGEMKSKEFADRKELRSPEGFLCSSIEELKNVWLPFSIRMKMTKNKGLDVCNWADEHELSSLGAPSQWGPARAEEELGVYVYDLMATVVHILDSRTGGSLVAHIKVGETYHQRKEGVTHQQWYLFNDFLIEPIDKYEAVQFDMNWKVPAILYYVKRNLNSRYNLNIKNPIEASVLLAEASLARKQRKTHTTFIPLMLNEMPQVGDLVGLDAEFVTLNEEEAELRSDGTKSTIKPSQMSVARITCVRGQGPNEGIPFIDDYISTQEQVVDYLTQYSGIKPGDLDAKISSKHLTTLKSTYLKLRFLIDIGVKFVGHGLQKDFRVINLMVPKDQVLDTVYLFHMPRKRMISLRFLAWYFLDLKIQGETHDSIEDARTALQLYRKYLELSKNGTEPESFHKVLKGEKGRKMDWKVPEPESQTSPKNAAVFSSVLAL

SEQ ID NO: 1325 - DNA, 24727 bp, Mus musculus
  misc_feature (1)...(24727): n = A,T,C or G
tttaaaaataagaaaaataaaagagtaaagtaggcaccgggtgacatggcatacaccggcaaccctagccttgggtagctggacagttcgagggctttttgggtatatattgaatttaaggccagccttggctacaggagaccctgtctcaaaaaaattaaattaaaaataaaaataaataaaaacagagtcagatgtgatggcacaggcctttaattccactacttataaggcaaaggcagaagttcaaggctagcctggtctacatacggaattccaggccaaccagggctacatagtgagactgtctcagaacaaaacaaaataaaaaacatcagaaaggaaaaaagaaggggaagccaaagatattaaacagtccattggagtttctttctctcttttttttttttaaaaacccaaaacccctagattccctatcgactaaaggagtcagaccatgaatttgacaacttcagccaagtcacggagtcaccgacagggcgagaagaggagcctctccacacagtttctaagaaataccggaaggtgctggggacactgagtcggggtcttgtgggacttgtgggggaagggtatcacgagggattgaatgtggtccataaagtcttcctccacagtctagacccaggaggccctctgtcctcatcctgctccaactgtctgtgccttaggtaaccatcaaatattccaagctaggcctggaagactttgacttcaaacactacaataagactctgtttgctgggttagagcctcacatccccaatgcctactgtaactgcatgatccaggtaagggcaggctctccatgcctgagcctgcacatgtctcctgctctctgtatccctcccctgctctccctaggtcaccttggtgcctcccctggaccttggcctcatctactgtgtaccctcccttgtaccactgtcttctctgtgagctccattgctttactggagtcccgctttgtatccagcgctcacagatcgctcctcccacccccatctttccccactcccagtttccgcaccagctctcctgctcacccccccgcccctgcccctgcaccagctctcctgcccctgcccgcaccagttttcctgctccccctgccccaccaccagctctcctgctaacccctccaggtgctctatttcttggagcctgttcgctgtctgatccagaaccacctttgccaaaaggagttctgcctagcgtgcgagctcggcttcctcttccacatgctagacctctctcgtggcgatccttgtcaggtcagtcctccgagacctgggacactcaaaatggcaagggacagaaggtggatggttgaaaagggcacatttctgtcaacataaccctcttcttccagggcagtaatttcctccgagctttccggaccatccctgaggcctcagctctgggtctcatccttgctgactcagatgaggcttcaggcaagggcagtctggcccggctcatccagaggtggaaccgcttcatcctcactcagctacatcaggatatgcaggagctggaagtgccccaggcttatcgaggtgctggaggcaggtatggaactggacaagaagaaagcccccaaagccagccccctgggactcaaagggtcttctaatgctcggtgtgtgtgtgtgtgtgtgtgtgtgtgtgtgtgtgtgtgtgttgccctcacctctctcagcagtttctgctcatcaggagactccatcattgggcagctgttcagttgtgagatggagaactgcagtctttgccgctgcggcagcgagactgtgcgggcctcgtccaccctactcttcacactctcctaccctgagggtagcatctgtggtataccctgcacctgggttgggaggctccctcagataacttgtaacaccacagaggggtcttggggggaccgtgggtagaggagggagcctggagtgaagtgtcaagtttcccctcagataaaaccgggaagaactatgactttgctcaggtgctgaagcgaagtatctgcctggagcagaacacacaggcctggtgtgacaactgtgagaagtaccagcccacagtgagtaagctggggttctgcttctttgaggactcatgcatggtggcctgccagtgttagcacggctttccaggggcgtacggggagagggaagaactccacttttacagatcctgtcttggcttcttgctttttctgtagacaatgccatttcttgtttccttctctcagattcagaccagaaacatccgacatctgccagatattcttgtcattaactgtgaagtgaatagctcaaaagaggctgatttctggagactgcaagctgaggtagtgaccatgattggaagcaggtcttcccatgactcctttgtctttatatcttgctttacctgggtatatgaatatgttctttcctttgtgttcaggttgccttcaaaatagcggtgaaaaagtacggcggggaaatgaagagcaaagagtttgctttagctgatcggtgggtgcatcttagagtggtcagacggtggagctacttgctggtctctctctccactggttccatatcttgagagcacatttccacttcttctgtcctaataggaaggaactgaggagtccagagggctttctgtgttcctccatcgaggagctgaagaatgtctggcttccattttccatccgcatgaagatgaccaagaacaaaggactggatgtttgcaactgggctgacgagcatgaggtgcaggcagttgaaaagtgggaagaagagagggactgagggagcgaaggtgggcggaaggtgaggcagggcaggggatggaggaacttagaggatcaaggaaaggaataaaacgtacgcttaccagttctggggttgtctagaataattcagtttagagttgggaagtcataggtgggctaaaatggagataccctaccctctgccctttatccccatcccccatcccacaacccatccttaaacttagcttagcagcctgggtgccccctcacagtggggtccggccagggcagaggaggagcttggtgtctatgtatatgacctgatggctactgtggtacacatcctggactcacgaacaggcggcagcttggtggctcacatcaaagtcggtgagacctaccaccagcgcaaggaggtgagtgaaatgacacagggaagaggtggctgcagtacagtcccaggctgtccccgagctcctggccaggagacagatagctctcacttgacttcagcctggctctgtacttgtgcagggcgtgactcatcagcagtggtatctcttcaatgacttccttattgaacctattgataaggtaagtcaaatgtgttctgttccccatattattttggggaggttcagagtgggtgttgctgtgtgacttaggttcgtgaattcactgtgtagcctggggtacccttgacctcgtgatctgtctgcctcagcctctagagtgccatgactgcaggtgtaattacagcccatttccccttcatctgcctctccgttagtgttcttattcttgggctcctatagaatgccgggaagggtcatgatgaatctagagaggcttttcgaataaatggcatcagaagacatatatatatatgtattattattatgtatgtatgtatgtatgtatgtatgtatgtatgtatagctgggcggtggtggcgcacgcctttaatcccagcactcaggaggcagaggcaggcggatttctgtgttcgaggccagcctggtctacagatcgagttccaggacagccagggctacacagagaaaccctgtctccaaaaaccagactgaggcagtgctcagaattaaacccagagccttaggcaccataatgcaagcacactaccactgagctaacttctagcccctgtgttctgtctcctctagtatgaagccgtgcagtttgacatgaattggaaagtacctgctatcctgtattatgtcaaaaggaatctcaattccagatacaatctgaatagtaagtgacacggagtggcccaaaggcttaggcagcctatggtctcaggagagagcctggggggtggataccttagtagtagtattcaggattggtagctggagctaactcttctaaagatactaaagaaattcctgctgatcagatcttaagtttggaagctggctagggatggtagcttacacctgtaatcccaatactcacaaaaggctgtggcaggaggattgttatgagttcatgacctggactatacagttagttcaaggcctacctgggctatagagtaagaaccacttcaaaacaacaaaacaaaattaattttgtagttggaaattgcgagggtggcgtgaaggacactagataagagtggcttaggttaaacttttgattctgaacattcctatcttcttttgtagtggtctgaatgagaatggccaccataggatagccttcttttcagatggcacttattgttgcttatttattgttattattgtgtgtagagaccaaaggacaactttgtaacaccagctctccccttctctgtgtatgctcagattgtcagactagcagagcaagctgccccattccagtcattgccatcacatgactgtctcttctcaggggcatgagttccttcaggggtaccaacttggtacctttaaacaatagtttctctgaagcttgttttttttctggattttgtagctaaggtccaaactgaaaattttattctgtcattcccactatttctgtctttttcttggtctgtttcttgataattttataatttcatctattgtattaccaggtacagtctccttttaatttttttgttagagtttaatttactcagtgtgtgtgcattagcatgtgtaccacagcagaatgtagacatgaggagtttgtgggagtaggtcctttccttcttccatgtggattctgggggtcaacttcaggctgtagacttggccacccaggtacactccttgtccccaaatgctttgtttatcaggagatcacagtatagacggagagcctctgagcagccatcctggggtcttcccctagccttttctctagccccagtcttctctgtattccctttccagtcaagaaccccattgaggccagtgtgctgctggcagaagcctcgctggcacggaagcaacggaaaacacacacgacctttattccattgatgctgaatgagatgccacaggtcggggacctggtgggcctggatgccgagtttgtcactcttaatgaggtaactagggccaaaagatgggacctgaatggggacagaactctggggatattaggaattgtgtttctctggtgtccacattaacctttgtgacataggaagaagcagagttacgcagtgatggtaccaagtccaccattaagccaagccagatgtcagtagcaaggatcacctgtgttcggggccaagggcctaacgagggcatccccttcattgatgactacatctccacgcaggagcaggtgagaagatatgaggggcattgaagtcaaccctgtgcttccatagagtgcttaagaaccctaagaagagtgactggaagagaccacaccttctccagcccagagatttgtctttttctctactcctaggtagtagattacttgactcagtactcggggataaagccaggagaccttgatgccaaaatctcctcaaagcacctcacaaccctcaagtctacctacttaaagcttcgctttctcattgatattggagtcaagtttgtgggtcatggtctgcagaaggacttccgggtcatcaacctcatggttcgggcagggcttatttcagagtgtgttttttgttgttgttgtcttcctttgtttcttgtttgggttttgttgttgttgttgttttgacacaatgtctcactaagcagctctggctgccctgtaactagttaagttaagcagaccggctttgaactcatagaggttcgcctgcctcctcctgagtgttagaactgaaggtgtatattaccatccctagcacccccctccctctaatatacagccttcttccaacccaacttgctccgaccatcttcattcactcaccatactttaaaaaacaaaattaagtttatttggtgtgtgtgcgctcatacacacctcctcctgcaagtactgagttacacgtgtagaggtcaaagatcagcttgtgcacgtcaactctctccttccatctcgtgggtcctgggaactgaagtaaggttgtcaggcttggtggcaaatgcctttacctgctgagccaccttgctgacctcggagttactcttctggctgactactcagggcatatatctgaattcagagaatgggaggttctggatcatctgtctcaaggcttcttttcttctggtccctgctaggtgcccaaggaccaagttcttgacacagtctacctgttccacatgccccgaaaacgaatgatttccctacgattcctggcctggtattttctaggtgagttgctctaccttgtgcgccctacagtaagaactgattacaagcagaaaacattcagggtggagacagggtagatggctcagaggtgcttgcttgtttcttgtttggggttttgtttttgtttttgttttgacacagtgtctcactaagtagctctggctgccctgtaactagttatgttgagcactggctgctcttccagaggtcctgagttcaattcccagcaaccacatggtggctcacaaccatctgtaatgggatcccatgccctcttctggtgcgtctgaagagagagacagtgttttactcacataaaacaaacaaataaatcttaaaagaaaacatcaggggcaggggatacagctcagctggtagagtccttgttgagagctcagcaccacatggaagtggacacaggcggcaggcctgcctagagtcacaactcaggagacacagaagaaacagaactttaaggttagtctcagtacataatgagttcaaggccagcctgggctacaaaaggccatttttgcttttaaaaaggagagtagaaagcaccaggaggcgacactttcaggtctgtaagtttgaagccagtctgggcagtagaggagatactgtcttaacaacgatagcaaaaagctacaacaatctctcaggaggcagaggcaggtggatgtctgaattcgaggccagtctggtctacagtctcagttccaggacagccagggctacacaaagaaaccctgtcttcaaacaaacaaaaaatctacaagaacaacaaaacaggaatcattttagaataaagaatagttatttctcaagttagaattaccatttttttcagctaatggttttagttagatctatcactaatttaagaagacgttttctgggtctgacgagttggcttagagcacctaccactgctcttgcagagggcccaggatcaagccccagtgcttaacatgatagctcacaaccgctcacaaccgtgtgtaacctcagttcaggcaatctgacaccatcttttgaccttcatggtcaccatgcacacccatacatagaccacgcaggcaaaacagtcagtaaacataaaataagaaaagatgtttctaggagactgcgtgggagtgttgtgggtgccaggatagagatggggtgcctgccgcctttgtgagttccttaagtatcggtgtaccccagacctgaagattcaaggtgagacccatgacagcattgaggatgcccgcacagcccttcaactctaccggaagtatctggagctgagcaagaacggcaccgagcccgagtccttccacaaggtgctcaagggtctctatgagaagggccgaaagatggactggaaggtgcctgagcctgaaagccagacaagtcccaagagtaaggctgggctgaggcgagggaaactgggctgggtaggtgttgctggcatatgtcgagcttgtataccaccacctcagattataatacccctacctgctcctgaagtgtctgacagttcacacatcactcagtgtttccaatagtcagtgagagagacactggtgtagccgcttgctcagggaaatgtccatgccttgccctacttccctcatgctctttctgtatagtgagtgtcctggtgcctcctctgctcaccctggtctccgtgattctgtctcctaacagatgcagctgtcttctcctcagtgctggcactgtgagctgccttccctttcagtgctgtccccagaactgagaggtggcttctcaagtcggctttaccctgtccacttccagaactggatctgctcagggtctacagatggtgctattaatagaactggaaagcagcaaaattgttgcaaaggttctagctgccagattccccctttatcctctgcaaaacagtgggccagaaacaaagcctaaagtgacccaggtggagtgattggtgttcgtaataaatatcctgggcaactgatatctgtacaaaagagctctagaaccagaactctcagttcccagtctgctagagaactgaagtcctggacagtcacagggtacagagacccaggcagctccagcatctagctgcttgagagacggtggctgggtggaccagcttgtagagtctcaatgggccaatcaaaccggtgtgcaggaagctgagctactggcttcattcctgaccacagctgagaagtatctgtcttccatacattctatctcgagttttgttttattttttaaaaattttgcttaaaacagcatgttttataaaataaaagtatttttatctcattagaaaaccgctagtgtgggattctttggcttctttctttctttgatttgacttcaccaaacaatgagaaaatgaaaactgtgttttcagatccacacctagaaatgaagattctgagtcccagaatgaatggatccaggaggaacatagtttttttgtttttttgtttgtttggttggtttttggtttgttttttgagacagggtttctctgtagccctggctgtcctggaactcactttgtagactaggctggcctcgagaactcagaaatccgcctgcctctgcctctcaagtgctgggattaaaggcatgcgccaccatgccgggcaccaggaggaacataattgttcttcccctggacggtgttcggtctttgctgtagttgcctagcaccctaaatacataaagcgatcacaaatcccagtttatctcaagaccttaaggcgtggtgtcaacctgttatcctaacagcggagcagttgagaaccacagtccccaaccagcctgcgatggggagttgagttcaaggcatcctgggctacatagcaagacactgcttcactcatgacagtacctgcggtgtgccgaaaattcagagaggaattgctctattcacagcgtgagagctaagaagaatattgaccgtaatataacccacacccccatcctcagaggataaattaagagaaatctccaagaacctgcctgaaaaggcagataataccaaaaatgatattacccaatacatacctaatgacgatcatttattaatttggtacaagaaggaagttgttttaaaaactagtttttttgtttgtttgtttgttttttttttaagaaagaaaaagacctgtagctactggcagagtggtactgcagtgcttcctgggaaatgtagtttgctgtatcatgaaatctttgtgcattgaaacctaggcttctctcccactactaattgcatctgtttgcaagtcctagcccacctggactgatgcaatttccccaggcaccccatgcgctcggtcctcactgtaagctaggctacctttgttctttggttggtcacgtgaaccaattcgccacgcaagtctgggtcctcaagtcttccaaggggtcctcgctgcctcggaggcgctcctaaagctgcctgctcgcgcgagagtttggaggggcgggcttagggtcagtttcggtggggggctcgcacgggaccctcagatctccgcttaggtgcctagttaagtgcgggaagctgggccaggcggtcactggccaccctgaacctggcgggagccggagcgctctggagaagccgggacagccccgtttttcccagccagctgctagggttgggacccacagaaaacaaagtgagagtccggctgctttccagagcctgggccacggcggcggccgtgggagcagaggtgggacagatgcgagcgtcagaggctgtgggcgcactgaggttgggaatggacccgagcaaagcgatggcggagtccttacaaaaggggctggtctgtctgcacgggagctacttacattctagagatggggattccggaacccttggtgctaggtccacataggccctggttatggagtgtgctcgctggcttcatggcctgactggttccttgctggcagctcctttctgcccgtcattctcacgtaatcgataacctccatctcaaagctactgcatagctctgtgagtcctcagtgtcctcaaagtatcaaaacccaggccctcacctgtggaggacatagtttctggatctgagtcccagtcccgagctctcactccctattcccccatcccgaactccggtccctcgggtgtttgtaacgaggttttttcctggaaaacaatccgaatcacaccaaggcctctgaaggccttggaatgaggggtgacggtcatgggggaaatggatcgctctcctcacacctgtgtttcattttcatacaaatccaggtggagcgaccctgttacactaaagatgaaaggctggggttggctagccctacttttgggggtcctgctgggaactgcctgggctcgaaggagccaagatctacactgtggaggtaaaagcacgaagaccagtggagaagtgggaggaagatgacccgtgggagtcatgagatccaaagcttggaacaaggatggatagaaaaaccctcattcccctcaccatccccactccctgttctcttccctgacaccagcttgcagggctctggtggatgaattagagtgggaaattgcccgcgtggaccccaagaagaccattcagatgggatccttccgaatcaatccagatggcagccagtcagttgtggaggtaatttactatccctcaaataaagtagctcactcgggcttagagtatgaacttgttcgaagagaagaaagcaggaagtcattcgacctgtaatgataatgatctcaaccctcagaggcgggaccagaaggatctttctgagttctaattctggtctaccccatagaattaggtactgtcttcgaaaagaaaagaaacagcctggtgtgatggtacatatcattaatcccagcagaggcaggctgatcttgaatttgaggccagcctggtctacaaagagagttccaggacagccaaggctgttatagagagaaaccctatctcaaaaaaccaaccaaacaaacaaacaaccaaggagccagaacattgattgtgtatcagaaggactgggctctaagccacttatggtatttgcatgcctgtaatcctagtacacaaacagcagagcagttgggttctgcctatctggaagagcctggaaagttataaccacgtatttctttgccccaaacctcaattaattgtttctgctgtagaagttaggtcttgattagtctgtttctcctcatccccagtccgcatgtctcttgtttcactatagcagtattgtatatatacatttatttaaaaaaagaataagaggtcttgtccagctgggaatgtagctcagttgatagagtgctagcctcgcatgcacagaaccctgtgtttggcccttaacatcccataaacccagcatactggtacactcctgtgatgcctgccctcaaagtcttccctggagctagagagatggttccgtggttaggagaacatgctgctgttgcagaggacttggctcagattctagcacccatgtagtggctcataactcattctggggaatcaaacatttccttccggtgtctgtgatcaccaggcatgtatacatgcaagcaaacactcgtgcataaaataaaaataaatcatttttttaaaaaaagtctttgtattcaagaaatttatattagctagaagcataagttaaagctatacctagtaagaaatatgcaaggaaatttattttaatgattgatttatttttactttatgtggattggtgttttgcctgaatccatgtctgtgtgagggtggagttaaaaacagttgtgagggctggtgagatggctcagtgggtaagagcacccaactgctcttccaaaggtccggagttcaaatcccagcaaccacatggtggctcacaaccatccataacgagatctgactccctcttctggagtgtctgaagacagctacagtgtacttacatataataaataaataaatcttaaaaaaaaaaaaaaagccaggcgtggtggcgcacgcctttaatcccagcactcgggaggcagaggcaggcggatttctgagttcgaggccagcctggtctacagagtgagttccaggacagccagagctacacagagaaaccctgtctcgaaaaaccaaaaaaaaaaaaaaaacagttgtgagctgccatgtgtaaacccagacccctgggaaatcagccagtgttccctaaacactgagccatctctccagtcccatcaaggaaacatttctgtgacgcatgttggtgtgctgtcatcgaaacctataccccctctttacatttttgtttggttggttttttattttatttccaagactctgcagccctgggtgttccaaggagctcactatgtagaacaggctggccttgaacttacagacatctgcctacctctgcctcctgggtactggaattaaaggtgacaatatatctggcttttaatgttattttaataaataataaatatctatgtccacaaaaaaaaaactaaacaagttcacggggggaaaaaaaccatagttcattatagttgatcaaagtggtttttgcctataattcggagctaaggatattggtgcgtgttttataatcaggcaaaataggattgtacatttgcctggagtgcaggttgtgagttacgctgtgcactgctggttcttggaagttaatagggattctcggggacacagattgggagttgggggtagatttctatgagttcaaggccagcctggtctacatagttgcaggccaccaaccaaggctacagggtgagaccctgttccaaaggatgggcaaacaaaatgtgcacatttgaaagtaacttgagaggaagaaagaatgggcagatgtcgccacaggatatcattagggaaggtttctttgtttttagaatgagttgtttgagctagattcgaaaggaaaggaaagagttcaaatgagtaacatctgaggtagaagggagtgaccaaaggctgagttcatttctaggtaccttatgcccgctcagaggcccacctcacagagttgcttgaggaggtgtgtgaccgaatgaaggagtacggggaacagattgacccttctacccaccgcaagaactacgtacgcgtcgtgagccggaatggagaatccagtgaactagacttacagggcatccgaattgactcagatatcagcggcaccctcaagtttgcggtgagttaccgctgtgccgtgagtagctgtttcttgggagttatagggattccctggcacaggatgggagatggatgcggaagtggtgttgcctgcttgtaacctgagcactccaggagcaccggttggaagatcagcttaagtttgaggctgggcctagttcatagtgagttcgaggccagctgggcagatatagtaaggccctgtctataaaatccccacccccaccccaaaaccaagtagagagctgagccagtgtctttgcccagctcgggatctgggtcaattctctgtcttcttggtccgcagtgtgagagcattgtggaagaatacgaggatgagcttatcgaattcttctccagagaggctgacaacgttaaagacaaactttgcagtaagcggacaggtgagcacccccgactttccgtcccacgctcacagccctgtgtaactcggcttgcggccctgaccctcgccacacagaatgtgtggccacacgctcagacctctgacaggtgtcccacactgctggcttccatttcccttggcttagggtttggagtgatttctctccagtctctgcctaatagttctcagagtatgtgtctctgttaccctgggttcaggagagggagctgtgggaggtggttggccacggtgattgttggttggcgcgggtgctttctggtgaggggtgtatgtgtgtgtgagggtggctgtttccttcacactgttacgtactatttgcagatctatgtgaccatgccctgcacagatctcacgatgagctatgaatcactggagcaagcagcctacaccaaacgtgatggaacacccccaggaggggaagatggcagcattgccttttatattacgtttttatggaaatgaactgaaaaaaactcttgaaaccgaaagtacaaactgtgttgtcttttttttttctcattttggttttttgagacaggttttttctgttgttttgtttttttgttttttatatagccctggccatcctggaactcactctgtagacaaggctggcctcgaattcagaaatccacctgcctctgcctccctggtgctgggattaaaggcagcgccaccactgcccggcactgtgttgtcttttatgcccaaaggcagcctttgtaccaggcttgaaggttgggggctacagatgggaagaaaatgaagggatgggttgtaatagcgtacatttaaaagggccctggcccattaattctctgtcatgtggaattctgttcacttacaaactggagatgagtatttattcagtgtgtacttaatgatgtgttagcagctgtggtgctgtggagaaagagcctgaatgacagcacaaggcgctgggaggtccctgtactcctgctggaaaaacattgaagatgggaactgatctggacggaagtaatcgagcaatcgagctgcgttgttcttttgttcttttctcttttttttaagatttatttatttaacaggtatgtgagttcatgctcgctgtcttcagacccaccagaagagggcattgcatgccatcacagacggttgtgagccatcatgtggttgctgagaattgaactcgtgggacctctgaaagagcagtcagtgctcttaaccactgagccatctcgatttatcattcttttttacaggtgaagaaaatgaggtccagagaagccacaaattctaaagtctgaatttagtagaaaaacgatctataatctttctgtcaagctgatctaaagtagttacaaagtagctttattttaagaattattttgttgttgttattattttgagacagggtcttaccaggtagccctgggtggtccagaattcagttcacgatatagactatgctaccctctaatccaaaaagatctgcctgcctctgcctctccagaactgggattaaaagcacatgctacatacagccgggtggtggcggtgcatgcctttaatcccagcacttgggaggcagaggcaggcggatttctgagttcgaggccagcctggtctacagattgagttccaggacagccagggctacacagagaaaccctgtctcgaaaaaccaaaaaaaaaaaaaaaaaaaactgagccacctccagcccctggagcatactttaaagaaaaaggaaaaaagggggttgtttgtatatgtatacatgggcacaagtcagaggacaactctatgaggcctactccttccaccttggcattgttggggtccaggagtcactccacaaccatatgaacactgatctcagccagacagggatagtttattgagcatgtgccccaggacctgattgatcagggctgcagagcagactcaggagctgactgtgaccctgagcgtggatcctacagagcttttaagtctgaaacccacaaacatctgtgccgagttatcacacccatcagggtttagggataggagacttccttaggagcaggtctttgttgtacatttatcctgttactattggctggggtattcaactgtggtggaggacttgcctcgcctaatattcatgtcttaccttgccaaccaggatgtcagtttcccatgtacatgtctgtttctgccaggcagaatgtcagttccaaggaggtcttgggaacttcaacttcccttgactcctattcaaaatggaagctctactcccaatggtttcttatattggagcaggtgtctctcttacagtgggttccagcttctaaagggaagaaaccataaaagctcacacatagatgcaggaggtacagctgggtggttggtttgggtccaagcttattgaggctaactgtacaaagcagttctacctgaccccattgtgattgttagggtctaggtaagatgttgatggcttgtgagctgttacttgtctagcctgaaacttttccacgagctgttactaggaaaatttctcatacactgttgctgctttaccaggatgttctgtgctttggtgttcttggaaaccaatcacaacagaagtcagaactgctttttacagttagccccagtaagtttggacctgaaccagccacccagcagaacttcctgcacctatgtatgtatgagcttttatggtctcttgcctttataagctgcccctgggatgcaccccaatataagagagacacctgcagcccggcagtgatggcccatgcctttaatcccagcacttgggaggcagaggcaggtgaatttttgagttggaggccagcctggtactacagagtgagtgccaggacagccannnnnnnnnnnnnnnnnnnntgtttcaataagaagctattttgagtaagactttttgagtaggggtcaagtaaagttgaagttcccaagacctccctgggaactgacatcctgcctggcagaaagagacacctgtgtgggtaactgacatcctagttggcaagttaagacaagaatgttaggcaaggcaagtcttctgccacagttgaaataccccaaccaatgggaacaggatacgtctacaagagacaagtttctagggaaatcccctatccctaaatcctgtttggtgggatgacttggcacagatgtttgttgatttttggcataaaagccctataggatcttaacttcacaatcagctcctgagtctggtctgtggccctgatgcatccatccatcctggcgtatggcattcaataagccatccctatttgactgagatctgtgttagggtgatttgagcagcgattcccagactccaacaattggtttccaagaacaccaaagcacagaacataaccgaagatgcaaccaactgaggcatgagagagtttcccagtaatggcatatgacaaagtttccttgtaacattagtaacagcacaaaacggcaggatagacaggcaccagttacccaggctttcacagacatgactatggggacagagctgagttttcagtgtgtgtgtgtttcatgtgcatgtcctttttttcttttttattgatttttttttaaaaatttcatttgcattggtgtttggtcttcctgtttgtctgtgtgagggtgttggatcttgtggaacttgagttacaggcggttgtgatctgttatatggggctgggaattgaacctgggtcctttggaagatcagctggtgctcttaactgtttttttttttttttttttttggaaatatttatttatttattttaagtacactagctgtcttcagacacatcagaagagggcttcggatcccattatagatggctgtgagccaccatgtggttgctgggaattgatctctggacctctggaagaacagtcagtgctcttaactgctgagtcatctctccagcctcttcctttttatttttaaagactagttttctgctcttctggaattcactccgtagactaggctaatttcaaactgggagatttgtctgactctgccccccaagtgctgggactacaagggtgcaccaccatgcctggcagagcctatattcctaactttgcaaatcaagttctagtttaagcattggatgccttcttatttatttatcattaacgttgtaaagtttcagcaaacatttccataacagtccggatgcaaccaggaaactttattacatgaaaaagtagtcctggcaggagtgatggacccttggtttagaacatttgctcttgcagaggccctggggttggccccccgcacccacatggtggctcacagctgtctgtaactccagtttcagaggatctgacactttcttctaacttgcgtgggcaatggacactcatgtggctcacataaacaaacaaacgttttttagaaagaaaatgcagaccagcagtatcacccagtgtcacatgcaggtagttctagctaagctagaggagagctaggaggatacttgaaatgatgagttggaaaccaacctatgcaatgaaacaaaagcctactagattttgttattgaatcacatgggacagcggaggcaggaaggtctcaaattcaaaatcaacctgtaatatcttttttttttttaaatagagtttctttgtacagccatggctgtcctggaactcactctgtagaccaagctggcctcaaactcgaaggtccaccagcctctgcctcccaagtgctgggatcaaagatgtgagccaccatgcccaactgacaatgttttaaagaggtcaagcccacagctttgcccatgctaagcaagcgttctaccgttaagctatgtatgcccagcttagaactctttgctgttgagaaagagcagacacaaaattctttactatgatttttgtttgtttgaggcaaggtcttgctctacactgaggctgatacagtgtgtctacatagtgccagctcttctggattctgtgactcccaagctgatgtttaactcgaggactttctgcttcaacttcctaaatgatgaaatcacaaatatataccaccatgaacagcgtgatttcacttgacttttgcgactctgattttatattaaaaaataatgtttttagtttctgtgtttctgtgtgagtatgtgcacctgagcacgggtgtccatagaagtggcagagccccgtggagttggagttataggtggttgtgaacctcttggtgtagttctagaaatcagacttgggttcttgaaagagcagtacatagtcttaactgctgagtcatctcttcagcccctcatttatttttctgttgtttgcttgctttttgaggcagcgtttcactgtatagtcctggcagccctggtctccgtggccttgaatttaccaacaaccacctgcctctgtcttctgagttctgggattaaaggtgtgtgccaccatgctacatttctttaaaattttatacatatatgtgagtgttttttacatgaacatatatatgccgatgtgatgcacacaggggctagaagagggaatcagatttcctagttggagttacaggcgattgtgagccattagatgtgggtgctgaaaatgggnnnnnnnnnnnnnnnnnnnntcagttgctgtgagcccctatgaatcctgcctcgttgattctgtggacagtgttctcatggtgtcctcaccccttctgcctcctaccgtccctcctccccctcttctgcatggttcctcccccccccccccgccccctgccaaaaaaaaaaaagcaattaaatgattcctagtgattattctgctgtactcagatcagtgtctaggggcttcctgtggcagctggtgggagcaagatgaagaagatatttatttatgtatttatttatttatatgtaagtacactgtagctgtccccagacactccaaaaaagggcatcagatcatgttacagatggttgtgagccaccatgtggttgctgggatttgaactttggaccttcggaagagcagtcagtgctcttaaccgctgagccatctctccagccctgcaagagatcttaactgctgagtcatttctcctgctctttgtaactttttcttttttttttttcctaaagatttatttatttattttatgtacatgagtacattgttgctatcttcagacacaccagaaaaggtcatcaaatcccactacagatggttgtgagccaccatgatgtagttgctgggaattgaactcaggacctctggaagagcagtcagtgctcttacccactgagccatctctccaagccctctttgtaactctttaaaaagagagatgttattgctattttacagccgctcagtgctaaagaacttacctagcacacgcaaggctctgaattccattctcaataatggaaagaaaacactgaaatagatgttattcctttgatggattttatttctctttcttattttgtgtcaggatctcaccatgtagtcctagctgactgaaccagatctcattattgctgggttttgacttgttggttggttggttttttttgagacagggtttctctgtgtagctctggctgtcctggaactcactctgtagatcagattggcctgtgtgtcaccacacccagctttggttttggctttttttttttttttaagatttttatttatttattttatgtatgtgaacacactgtagctatacagatggttgtgagccttcatgtggttgttgggaattgaatttttagaacctttgcttgctctgattggccccactctctggcccaaagatttatttatgattataagtacactgtagctgacttcagatgcaccagaagagggtgtcagatctcattacaggtggttgtgagccaccatgtggttgctgggaattgaactcaggaccttcagaagaccagtcagtgctcttaccagctgagccaacttggctgccctggctttgacttttgagatagggtcttgcttagtacctctggctgacttcccacaatcctcctgcttcagctgcactgctagttacaagcatgtacccccacacccagagataaattattctttgttttatttctactttaaaaatgttttaaagttagtttatttttttatgtgtattggtattttgcttacatatatgtctttgtaaaggtgccatatctcctggaactgaagttagagacagttgtaaggtgccatgtggatgctaggaattgaacccaggtcctttggaaaaacagctagtgctgagacatctcttcagccccccacccccacccctttttgtgacacagggtttctctggctgtcctagaacttgcttggtttacaaggctggtcttgaattcagagattgacatgcccctgcctcaagaatactgagattcaaagcattttccatacctggtctcattattctattttatagataaagaagcaagttcagagaggttaagtggtcttgctagtcaacaaggaaccgagaatccatctatgatcatcttagccagtgatctgtctgctacacctcactttaggaagtacagtctgcatgtattctctagtagttgtataaagtagtatttctaagatgtgtttgcaaacccccctgggagcttggatgtgcgagtgcagggttctaacaatcaccagtgtagaagcattgcgtcctctggtccccttttccagactgtttctcatcagactcccattttgagggttaggaaagaggatagtcagggctgaattgtctaaaagaagcagcctgatttagagctgggtgcagtagtacatgcctgttgcctgagtttttcgaaaggatgaggcagaaggattgcttgagtttaggaatttgaagtcagcctgggcaatagtttaagaccctgtttcttcaaaatattttagggttgaggttgtagttcacgtgtttaatgctctcctagtattcatgagctctgctatcttgttcaccaaagtcatttcagctgctacaccgttctctctctctctctccctctctctctctctgtctctgtctctgtctctctcttccttatctgtatatgttctagggtgggtgtctccagttccttacgtcagttatggatgtgcaaaggttttacagatgggcgaaactgcatagttcttatcttttaaagtacctttatagcaacacattgtgctgatgtctccaggagactgcagacagtgattcccgggtgtggttcagtggaacgacatttgcccagtatgcagggtgccttggattcctggtagctagggagtagatggtaaagcttggcagagcttgacgtgagctctggaatgaggttgtgaattctagctaggccagctatgagcaatggcccttggccggacattttatctgagttgccttctctttaaaggtactattacctacatattatagagttgcaaggattaattaaggtgactcatgcactatagttagatagtgacttgaaacagtaagcactgcattgtagctttgttcagctaagcgtggcagtgtgtgtgtgcctgggatccaggaggatcacaagttctccaccaacttaagcaatttagcgagattttttttttgcctcaaaataaatttaatttttcttttagataggatctctttatatactccaggccatccttgaacttactgtgtagccaaagatgaccttgaactccagagtttcctgcttccacctcccaaatgttggggttatagatacatgtgccattcctggttcctcaccatttttaaaaacagggctttgatgtagctcatggcttagcatatgtgagactcatgtaaccatatacacgttcctgtacacacacacacatacagagagagagagagagagagagagagagagagagagagagagagagagagagagcaaactactgtctactgtctactgaagtttgtttacctataggagataatgttaagacgattctagagcccgaattctcccacttgatcttgaccaccagggggcaccgttgtccctgagcattttgaatcttcccaaggtcacaattatgtcaagtcttttctgtggccccttcctgttctcatgcaggtatatttggacctagagttttcttagctgttatattcatgccagtcttaactttcccacctatgttcagaaagaaactgtagggctaggggtgtggtttgatgtttgagtattagtaatagcatgttacaaaccgcattcactcccagcaatgagggacagactgatacagactcagcttttgggcgaaaccacttaacccccttcatctctgggctttcacattgattttataacaatggacatcaggattaaataacttcaaataaataaaaattggacgttaaagtacagaatcctatcaaggggcttaaaaaggatggcattctctctgtagttattaaaactccagttaccattatggccacccaataattgtcccttcagcagcctcacctgatggggacagcctctggttacttacggcactggagttcaggcctctgatctgctagctagtctctgtggataattaactatgggggaaggaaccaggtcagactattctggggttatgaggaaaccccatgtgagatgctaaattgggagccaatattgatcagtgaagctttgaagtccccggggaggtggtctaaggttattgcttctcaagaggcgcagcttctcttgataaagttctctcataagaactacctgacttccaagctagaacaacactactgggcagatatgaatatgtatatgagaaaacttgaggaaataggggttttctttctcttttccaagtctaagccacaaactacatcctctataaacaaggactatctgaacttggcttacatggatactgagacctctgcactttgttactgtcatgtggtgagataaaaggattgtacatttgaggcttggtggttacagataaggtgctctgatcattgggtcagcttctctccacccttaggccaatttcacagtaggcacaggaaagtacagaagttctgaggtgttctaccccggggcatttaagagtgatgtgtaagatcattaaatccttgtgtcattcactgcaatgttttctgagggagaaataagagagagagccaagtaggataaacgtcctcgagtcctttggaaatactgtgaatgatgggacgaaaagagagtgtctaacacctgatcttgagtggagagttgcagctcctgctcctgtgtctgaggtgggctggctctatggggttttatgatatggggttttatgaagaatgtcagaatcataaggcccaggacccaaagactgaaaggttccttcatattaagggggcttttgtaagacttagactccatatagttcacaaacatcactaaacattcaggcttctg

SEQ ID NO: 1326 - DNA, 1017 bp, Mus musculus
ggggtcctcgctgcctcggaggcgctcctaaagctgcctgctcgcgcgagagtttggaggggcgggcttagggtcagtttcggtggggggctcgcacgggaccctcagatctccgcttaggtgcctagttaagtgcgggaagctgggccaggcggtcactggccaccctgaacctggcgggagccggagcgctctggagaagccgggacagccccgtttttcccagccagctgctagggttgggacccacagaaaacaaagtgagagtccggctgctttccagagcctgggccacggcggcggccgtgggagcagaggtggagcgaccctgttacactaaagatgaaaggctggggttggctagccctacttttgggggtcctgctgggaactgcctgggctcgaaggagccaagatctacactgtggagcttgcagggctctggtggatgaattagagtgggaaattgcccgcgtggaccccaagaagaccattcagatgggatccttccgaatcaatccagatggcagccagtcagttgtggaggtaccttatgcccgctcagaggcccacctcacagagttgcttgaggaggtgtgtgaccgaatgaaggagtacggggaacagattgacccttctacccaccgcaagaactacgtacgcgtcgtgagccggaatggagaatccagtgaactagacttacagggcatccgaattgactcagatatcagcggcaccctcaagtttgcgtgtgagagcattgtggaagaatacgaggatgagcttatcgaattcttctccagagaggctgacaacgttaaagacaaactttgcagtaagcggacagatctatgtgaccatgccctgcacagatctcacgatgagctatgaatcactggagcaagcagcctacaccaaacgtgatggaacacccccaggaggggaagatggcagcattgccttttatattacgtttttatggaaatgaactgaaaaaaactcttgaaaccgaaagta

SEQ ID NO: 1327 - protein, 180 aa, Mus musculus
MKGWGWLALLLGVLLGTAWARRSQDLHCGACRALVDELEWEIARVDPKKTIQMGSFRINPDGSQSVVEVPYARSEAHLTELLEEVCDRMKEYGEQIDPSTKNYVRVVSRNGESSELDLQGIRIDSDISGTLKFACESIVEEYEDELIEFFSREADNVKDKLCSKRTDLCDHALHRSHDEL

SEQ ID NO: 1328 - DNA, 46912 bp, Homo sapiens
  misc_feature (1)...(46912): n = A,T,C or G
gatgaactgcaacaaccgctggagcttaagccagagccagagctggagtcattagagctggaactagggctggtgccagagccagagctcagcctggacttagagccactgctgaaggcagggctggatctggggccagagctagagtctgtgctggagtccactctggagcctgtgatagagcccacactatgcatggtatcacaaacagtgccagagccagaccaaggacctgtatcacagccagtgccagagccagatttgccctgtgatctgagacatttgaacactgagccaatggaaagtaagtgatgagatggagctatggaagatggcacacattccctttcctacctcttctccctctcccattacagaaaaagctgaactccaagctcctcattggagagaggtccattctgtgattcctttttttaggaattacacatgccttcccccacctccctgctctttcatcccacaagttcccactcaggctcttcccaggcctttcctgccatcctccctccctttccctgctgggttgggaactcctaactaagatcggggcctcacttttctctctggattacctagtcttcagaaactgtgtaaagattgaagaaatcatgccgaatggtgacccactgttggctggccagaacaccgtggatgaggtttacgtctcccgccccagccacttctacactgatggacccttgatgccttctgacttctaggaaccacatttcctctgttcttttcatatctcttgcccttcctactcctcatagcatgatattgttctccaaggatgggaatcaggcatgtgtcccttccaagctgtgttaactgttcaaactcaggcctgtgtgactccattggggtgagaggtgaaagcataacatgggtacagaggggacaacaatgaatcagaacagatgctgagccataggtctaaataggatcctggaggctgcctgctgtgctgggaggtataggggtcctgggggcaggccagggcagttgacaggtacttggagggctcagggcagtggcttctttccagtatggaaggatttcaacattttaatagttggttaggctaaactggtgcatactggcattggcccttggtggggagcacagacacaggataggactccatttctttcttccattccttcatgtctaggataacttgctttcttctttcctttactcctggctcaagccctgaatttcttcttttcctgcaggggttgagagctttctgccttagcctaccatgtgaaactctaccctgaagaaagggatggataggaagtagacctctttttcttaccagtctcctcccctactctgcccctaagctggctgtacctgttcctcccccataaaatgatcctgccaatctaatgtgagtgtgaagctttgcacactagtttatgctacctagtctccactttctcaatgcttaggagacagatcactcctggaggctggggatggtaggattgctggggatttttttttttttaaacagggtctcactctgttgcccaggctagagtgcaatggtgcaatcacagctcactgcagcctcaacctcctgggttcaagcaatcctcctacctcagcctcctgggtagctagcaccatggcatgcgccaccatgccctattttttttttttaaagacagggtcttgctatattgcccaggctggtcttgaactgggctcaagtgatcctcacgccttggcctcccaaagtgctgggattataggcatgagccactgtgcttggccaggatttttttttttttttttttgagatggagtttctctcttgttgtccaggctggagtgcaatggtgtgatctcggctcactgcaacctccgccttccgggttcaagtgactctcctgcctcagcctccccagtagctgggattacagatctgcaccaccatgcccagctaattttgtatttttagtagagacggggtttctccatgttggtcaggctggtctcgaactcctgacctcaagtgatctgtccacctcggcctcccagagtgctgggattacaggcgtgagccactgttcccagcaggaatttcttttttatagtattggataaagtttggtgtttttacagaggagaagcaatgggtcttagctctttctctattatgttatcatcctcccttttttgtacaatatgttgtttacctgaaaggaaggtttctattcgttggttgtggacctggacaaagtccaagtctgtggaacttaaaaccttgaaggtctgtcataggactctggacaatctcacaccttagctattcccagggaaccccagggggcaactgacattgctccaagatgttctcctgatgtagcttgagatataaaggaaaggccctgcacaggtggctgtttcttgtctgttatgtcagaggaacagtcctgttcagaaaggggctcttctgagcagaaatggctaataaactttgtgctgatctggaaatgtctcatctctgatcctctttatttccctgctcacaaaggctaatgttcttagggacaccaacaagctgcacaggaatgaagtcagaaaattgtggcctctcttccatccacccctctacattcctcttgtcatatttcttcttcccttcctgtttggagtagcccctcctgtccgttagactcttctaggggtgctgggagctatatatgcattgtggggggagggatgagtagttatataactgtctcattgtcactcagctgattgttggcaaagccaaaacacaaacctgtctggatttttctgacttcaaacccacactttttgatgctgtgactatggaaaaaaaaggaaaggaaataatcactagccacttcccctcatcttttctttttttcaaagaatttcagctacccttgagttaccaaacttccaaagggactccaaggccgggcatggtggctcatgcctgtaatcccagcactttgggaggccgaggcaggtggatcacctgaggtcaggagttcaagaccagcctgaccaacatggtgaaaccccatctctactaaaaatacaaaaattagccaggcgtggtggtgcgtgcctgtagtcccagctgcttgggaggctgaggcaggagaatcgcttcaacgtgggaggcggaggttgcagtgagcagagatcacgccactgcactccagcctgggcaacagaatgagactccatctcaaaaaaaaaaaaaaaaaaaaaaaaaaaaagggattccaattgtcctttgagaggaaagtcccattattctaggatatttatcttcatttccctggaatgcccttcctgctcaaagctgaactctgacttttgatcctgcaatgatcaggactcccgtctttgatcagatatactcttggccaagaaagcagggaaggagacactggatcagggagcaagtgacccttaggtatgatcccacttcctaatctggtaatcccattctgcttgctcagccatataggaattaatactaaagagatcccagttattctatacaccagggggtcatgagaaaatatcattctccaccatagcccttcagaatagaagaaagggatgcatattgtagtctcttggccttatttttccatcgatttctctttcccaattgagcctagaaattagactcatatagccacaaaaataagactttattgaaaaaagtacataattcaatataaatacaataaataatcctccccaaactgtccccaggaggataaataatccccaaatttcccttcccatctaataaatactcaaccttatcataggtcagcatcacatgtcagtcagtattggtaattttcaacatatgcaggtcccactaaaattaatggactaattaacctgttggctcacaggtgcctggggtggtagatttatcttggccttgctgggccatggagatctgagtgccatccttgagctgctgcctttagggactcagggttgctgctccatgggcaaagacccgggcggctacagccacaaaggcctggaggctgcgaaggattttgaagcggagaaggagacgctgccatggctggctgggactgaggcttggaatctgctgagtctcccagtggtgaccctcaggctgaaaggacataggacacagtcagagaagactctaaacccttaacccccaaccctctgtctctgacacctgcaagcccccatcctccacgcccctacttcatacctgcaggagttggctgaggcccagtagggaggcatgaagctggcccacagggctatcagggagcagagaaggctcccctgtgaaaatatccgatcctagcagcttctcataaaaaatcagaccctggtggatcctttgcaagcagaactagggagaaaagaaagcaatgaaagaggacaccctcttcctactccattcactgaagactcacccagtttcttactattttcagacacaacttctggtttaccatggtacccagccatgttctcagtcccctctccttcattgcccagccacatcccagtggtacctgactgttgtccctgagtccttgggggtcacagccatctccacactggatatggggaacatcatttgtagtctcttcatctccctcttctcttagatcctggaatgaaggaagaggtggaaagaatgaagaagtaagatagtacttctgaagccaacctggaccctcaggcccatgactctcccaggaaccctactctcttgtcctctcttactccctaatggccttcaaccctccagcttccactcaaggtcacggtcttctgccacagccttggagagcctggactcctgttaggctccaggggctgccactcaccatgtgtcccactagtggatgtgcactccaggccagtgtgcagagcttctgtgaaagctgctggcactgagtccaggcagggctgctgcccccaggcacagctctgccctgagctgtccagggcagcagcaacagcagcattacagctctgctccccagcatctttttgccttcttctcaaatctggctggctctgcgccttgcaccagtcctggtggaatctctgcccacttccacttgctttgagcctgattctctctgttcagcgcgtctctggtttggttccctcagttgttcaccgagtttgtaagctgcttcctgttgtttttctccctttgtctctgagtcttttaaggtccctgcattgtaaggcccgccctttataccagcaggtgactcacagcaggtgggattcccctccctgcatcatccccctctgtggggagcccaggtatgcagcctcagttccaggggaaatgagtagtgtggttgctgtggctagaggcctgggatgggacacatgtgtaatgctctccaggaatcgaaatagctatagaaggggcggggatggggggcacagcggggatggggtgggaggggtaagggagaacaaatatttaaattaatctggtctcaagttccttcctgtttgatctttccctgatctttttgcctctcaaagctatacccctaccccaccccaaacctaatttcctcacttcctcctgcttgaggaaaaagcaaaacagagaaacatccattcatctcccaataggatggtgagctgtttgcaatgaagtttgattcctacctgatgccccctattaggaataaacgggcttctttttctcagttggaaacaacattatttcaactggatggtcctggtttcatgggagagaatgcgcatgaaggaacttggagaactgggaagccagtatgaggtcttattgctccccatttcaggcctcacagtggaggttagaaaggctcttgtgggaagagggttattgactaagaaccacctgactcctcaaccctagtggcccaagatttcataggctctataagagttggatgatgtttttttcaggactagtgcaaataaggcctggaagttcaacttagacattccagcacctagtcccatggcctcattctgacgtcatccaaattgttctgggaccctccactggggtcggggcagtcccagctttggaccccatggctaggaagcccaggagttctgggtagtcgaaggtgcactgtcaatgactctggctggtcttcagcttgtnnnnnnnnnnnnnnnnnnnnnnnnnnnnnnnnnnnnnnnnnnnnnnnnnnnnnnnnnnnnnnnnnnnnnnnnnnnnnnnnnnnnnnnnnnnnnnnnnnnnnnnnnnnnnnnnnnnnnnnnnnnnnnnnnnnnnnnnnnnnnnnnnnnaaatgaggccatcggtgaccacacagctggctcccaaagcctcccccaagaggttgacccttttcttctgagaaacttgtcctgaatggaggtctcccttcccttagagctattcaaaactgcccaatgacacttctggttcaaatattatgattctgtaggtatgagctaagagaagaaaaaaaaatattacgattctaagttaaatctaccaagggccgggtacagtggctcacgcctgtaatcccagtactttgggaggccgaggcaggcggatcatgaggtcaggagttcgagaccagcctggccatcatggtgaaatcctgtctctactaaaaatacaaaaatgagccagcacggtggtgggcgcctatagtcccagctactcgggaggctgaggcaagagaatcgcttgaagccaggaggcagaggttgcagtgagccgagatggcgccactgcactccagcctgggtgacagagcaagactctgtctcaaaaaaaaaaaaaaaaaaatggaaatctaccctttagattaaacatttccagcatcagagaattatctgagtttgggtgagaactgttttgcctctctccctaataaggtggacaccaatggaataaggaaaggggagggggcaggatagggagttcaccttacttgtgtacaacgtctcctatgttcttcccatctctggtccccattctgggagccctaaaagataagagatgaaagaaagatgaaaaggaggaggaagtagagcctgggggatgggatgagagggacaagggtgagttggaggcacagggctctgcctctttgtttcacttcctggtgctgcaggagttgggtaggaagaagggttggtggggagattgtgggactgttgcgtggcaggaactacatccagggctacaactgacctggagctataaggagcccttgacgtcagctgggcctaaaccgttatgcaaatcgcattcacaagacactcctaggcaggtctttccagttgtatgcctagactccaaatcagttgaagttcccccaggtggttaataatgatggctaatatatccaactctcgcttaatgccaaatactttgtctaagcactttacatgtactaaactatttaattttcacaacaaccctttaaggtagatactattaccctatattacagaggaggaggctgaggtgcaaagataagcaatttgcccaagatcacagagcttctaagtggctagaattcctttttttttttttttttttttgagatggagtttcgctcttgttgcccaggctggagtgcaatggtgccatctcatctcaccgtaacctctgcctcccgggttcaagtgattctcctgcctcagcctcccaagtagctgggattacaggcatgcaccaccatgcccggtggctaattttgtatttttagtagaaacagggtttctccatgttggtcaggctggtcttgaactcccaatttcaggtgatccacccgcctgcggcctccaaaagtgttgggatctcaggcatgagccaccacacccagcttaagtggctagagttctaatgcagacaatctagcatcagatcctgcattcttttttgttcttggtttttggggggttttgttgagacagggtctcactctgtcacccaggctggaatgcagtggcaccatttccgttcactgcaacctccacccctgggactacaggcacaagccaccatcccggtctggatcctgaatttttaatcactgcattacactggatactgtacgccaggtatggtggctcatgcctgtaatcccagaactttggggggccgaggcaggaggatcgcttgagcttaagagttcaagaccagcctgggtaacgtggcaaaaccccacctctacaggaaaaaaaaaattatctgggtttggtggccagtgcctgtagttacagctagttgggaggctgaagtgggaggatcgcttgagcccaggaggttgaggctacagtgagtgagagggccaatgcgcttaagcatgggcaacagagtgagatcctgtctcaaaaaaaaaaaaaaaaaaaggctgggcgcggtggctcacacctgtaatcccagaactttgggaggccgaggcaggcagatcaccatctaatattactgtattagaaacagtaattacagctgagctaaataatctatgtcatggatgctcttgtgtctcctcacagtatccttttttcttttctttttttttttcttttttttgagacggagtttcgctcttactgaccaggctggagtgcaatggtgccatctcggctcactgcaacctccgcctcccaggttcaaatgattctcctgcctcagcctcccaagtagctgggattacaggctcccgtcaccaggcccggctaattttgtatttttagtggagacggggtttctccatattggtcaggttggtctcgaactcccgacctcaggtgatccgcccacctcggcctcccaaagtgctgggattacaggcgtgagccactgcgcccggcagacatggattatttagcccaggttattagggatctgtaactctcatgggtctgttaagtctttctcaatttgagacctcaagatggagatttcttaaagtgtaggaactgtctatgtctctcagcatccacctttttcggagattctatatctaatgacctgcgaagtcagatcaaatcagtttgagagaccatctgtgtttttctcttggtctaggctctaggtaggatctctgactgggtataggaccccacccctctgagtcctagaaatttaaattcttggttcctttaatgaaggtctatttaccagcctttattgagagaaatgttatagaattgaatcctccatgaggaatgtctcccatcagagtccctttatgtggcctttagaaacagtaataacagctgagctaaagtgctctgagacatctcacaacctagacccatttcaaagtaattagagttcacaggacccacgaatccttcagaataacaagtcccaatttgccatgctcatccccctctgagggataacgtccagccagcctcaagagctaggggaatttgataaccaggggcatcttgttacccgggaatgttaccggggtctctggggagggaacaatcacggatgggagtttcagatggatgcctgtagaagatgcagccacttggactgtgtcaggagtccggctcccgcttccttttttttctctcccatatctggaaataataggaaatgccagcgagttttgggggcaacagggtcagaggtggcggagtggctcactagggcaccgcaggaagaggaggtagactaagccccgctgggaatacccaacagcgactcctagtgctttgccttgtgtgtcccttattttagagttcctaaagttatagaaagcataaaagtttggttttcaaacctagacgtaattttgttcaagaagactaaaaacagagttactttctaacgccacccaacaagtccggcgtctggctgcgtttgtcccaccggcgccccgtaacctctttttccggcgcgtgcgtcacacgctctctcctggggtcgccgtacctggctccttctgattggcttagatgcgcccggagcccttctgattggctaaaatatgccccgagcccttcttgattggaagaagcgcctcggaccccggtccttggcgccgtagtggttaggttgagccctaggcgtgggggagaactggggaaactggaatttcccgcggagctgacagcgcttgcgctccccctactcgttctaattccacgcgctccaaaatatccgccatggagaaatcttggtaatgacccattccccgtaagcatcccaggaacacatctgacccttgccctatccccctcctcaccgctgccgtgggagaattctagataaccgatttttctggttcccccagagaattctgggtaactagccgtttccgtcaccttcccctgcccccgccccaattgtgggtaactggccattattgttttcctctagagaatcctgggtagctattggagaggattctaggaaactgacttctcgttctccccaccgtccaatccacccgttttcacccccaattctgggagaaagcaccttaaatccctctacctaactccaacccccgcaattctcgctcccttcacctgatgattcagggctgaacaaggcaagtgagcagtccgaagtgagaagaaagggaagtcaaggattaggttagataatggggtggtggagagtacagagggcctagcggaggagggatagggacaacagttctaccacctccacccccactgcccatccctcccccgcctgcttcatcctttggctggcagtctcatccctcatgcctgcctcatctccctcctgcccccataacctagaagaccctaagtaccagtacctgggcctacccttgactcagctacctctttccccttacaggccaggatgtccattctaggcccatcggtgctgtcttgctgaaggttgggtcaggcatctaaagggactgtggtaagggagggtgtgacacaggtgtaagctgccatcgtcatcatgaactttgagggtctggaccctggactggcagaatatgccccagccatgcattctgccctggaccctgtcttggatgcccacctgaacccaagtctgctacagaatgtggagctggacccagagggagtggccttggaggctcttcccgtccaggaatcagtgcacataatggaaggtgtctactctgaattgcacagcgtggtggctgaagtgggtgtacctgtttccgtctcccactttgacttgcacgaggagatgctgtgggtggggagccacggggtaagaactgtacccctttgtgagggttgaaagatgttgaaggtctttatctggtcttaacccaaggaagctgctttgtagatagccagtaccgaggagttgtagtgatgagacagctgggtctggttggagggataaagggagaatctaggatctaggagtaaatgacatattctttctcaggaggcatccctttttttttttttttttttcgagacagggtcttgctctgtcgcctaggccagagtgcaatggcgtaatgtgatcatggctcactgcagcctcaatctcctgggctcacacaatcctcccactttagcatctcaagtagctgggactacaggcatgcgcaaccaagaccagctaatttttaaaaaattttttagtcttactatgttgcccaggcttgtctcaaactcctgagctcaaatggtcctcctgcatagagctgccaaagtgctggggttacaggtgtgagccacggcacctggccagcatcccacttttgtcacaattgcccatccagtgttttgatttatcttgatagttgtacccatcacttagtctgtagccatccaaatctaatctcaattgctgttgccccacctgtgttttctatttttattattatagaatatttaatgaatgattctgcatatcttccattgaatcattttgtcttctctggctgattttaatatctctcagagcagttatcaatcttaattttttaaaatctgtacccgtattgccaatatgctatggtgcccaaagactttgtaagaaatactgtgctgtccggccgggaccggtggctcactcctgtaatcccagcactttgggaggctgaggcaggcggatcacgaggtcaggagatcgagaccatcctggctaacatggtgaaaccctgtctctactaaaaatgcaaaaaattagctgggcatggtggcaggcgcctgtagtcccagctactcggaaggctgaggcaggagaatcgcttgaacctgggaggcagaggttgcagtgagccgagatcacgccactgcactccagcctgggtgacagagcgagactccgtctcaaaaaaaaacaaaaaacaaaaaaaaaaaaaaacgctgtccttcatttactgattgacttctttggtcatgaattgtttttccattagaagggatgaatttttgtgtgtgattcattcagtttaataggcagtgtctactgctatgctaggcactgtgaataaagctaaataaaacataatccttgccctcaaggagtttacaggacagtgaggtaaaaaacatatacaaaaccagataatttcatggtactaagcgccagtgtgaaaatctgtactggatgctggacaggatggagaatagtcagaaagggcatcgaggaggaagtaacccttgaactgagtcttgcaacatgagtagaaatcaggtgagaaagatgggaaaaggcgtcttagcataggataaacaaagattcccaagatactacaaagcttgctgagtacaaaattcaggaactacaagcaattaggatttaccggactggaagaggtagacatttattcattcaaccagtgtttttttgagccacatgctaggtgtcagaccttgccctaaggtctaggtttggaataagcagtaaacagaaaaacattacaatacatcaggtgttgattagtactgttaagaaaaatgctggctgggcatggtgactcacacctgtaatcccagcactttgggaggccgaagcaggcggatcacctgaggtcaggaattcaagaccaacctggccaacatggtgaaacccccgtctctactgaaaatataaaaattagctgggtgtggtggcaggttcctataatcccagctacttgggaggctgaagcaggagaattgcttgaacctgggaggcagaggttgcagtgagctgagatcacaccactgcactcctgcctgggtgacagggcaagactccgtctcaaaaaaaagaaaaagaaaaatacaatgaggccaggcacagtggcacctgtaatcccggcactttgataagccaaggtgggagggttgcttgagcctaagagttcaataccagtctgggcaacatagcaagaccccatctctattaaaagaaaaatacaggccgggcgcggtggctcacgcctgtaatcccagcactttgggaggccgaggcgggcggatcacgaggtcaggagatcgagaccatccccggctaaaacggtgaaaccccgtctctactaaaaatacaaaaaattagccgggcgtagtggcgggcgcctgtagtcccagctacttgggaggctgaggcaggagaatggcgtgaacccgggaggcggagcttgcagtgagccgagatcccgccactgcactccagcctgggcgacagagcgagactccgtctcaaaaaaaaaaaaaaaaaaaaaaaagaaaaatacagttgagtaagggggttgaggtaatgaagggtgggaaatgttgctattttgtttggttttgtagtgttttgttttaattttaatcttttttcctaatggctcttttagaaacaatgttgctactttaaatagttggtcaggagttctctctgataaagtaacatttgaatagagacttggatgcagcaccaaaaaggggaacaaagaggcagagctccatgcctctaacttatccttgtgcctctcctttactattctaggccctctagaagggagggaaggagccatgtagatatctggggaaggaacattctagagaacttcatatgctgtgttaaaagagcttggaccttggacttgaaccttcaggccactgaagggctttttttttttttttttttagatggaatctcactctgttgcccaggttggagtgaagtggtgccatctcagctcactgcaacctctgcctcccaggttaaagtaatcctcctgcctcagcctcctgagtagctgggactacaggtgtgtgccaccatgctcagctaatttttgtatttttagtagagatgacgtttcaccatgttggccaggctggtgtcaaactcctggcctcaagtgatccacctgccttggcctcccaaagtgctgggattacagtgtgagccacagcacccagcctcagatttgggaaatatttaggaagcaaaataggccaggtgcggtgactgatgcctgtaatcctagaattttgggaggccgaggcaggtggatcacctgaggtcaggagttcgaaaccagcctggccaacatggtgaaaccccctttctactaaaaatacaaaaaattagctaggtgtggtggtgcatgcctgtaatcctggctacttgggaggcaggagaattgcttgaacctgggaggcagaggttgcagtgagctgagatcgtgccattgcactccagcctgggcaacaagagtgaaactccatctcaaaaaataaatacataaataaaaattttaaaaaatccttggttatctagtggttaggaaaaaaatacataggacttgactgtcagatatatggcttggtcaactaggtagatcttggtaccatagagaatacagtaagaaaaatagaaataaaaatggtgaatttaatttaggatgtcatgagtttgaggttatgatgggatgtttaaggaggtttagtagttaccatcatcttcttggtatccatgtgggattggttccaagatctaaagataccagataccaaaattcaaggatgcctaaatccattatagaaaatgatatagtatttgcatataaccttatgcacatcctcccagatgtgaaacataagaaagccagctggccagtagagaattggaccatgtccctgaccttctatatactgttctaaccaagtgagccattacctattcagcagggtcattgtgaggacaaaatgaggtagagtttaccaaaatgctgtgtaacacattaaacaaacataagacagtattatcagtgtctttatcactaagattgactggttcctagccttttgccccagttgctcctagtcacaaaggccaagcaagaaaggatccaagctgagccatgttcagtccctgacctggccgtagggtggcccttgcccctccactctaagtgtctctgttgtctttgtcctctatagggccatgccacttcattttttggcccagccttggagcgctactcatcctttcaagtcaatggcagtgatgatattcggcagatccagagcctggagaatggtatcctttttctcaccaagaacaacctcaagtatatggcccgtgggggcctcattatatttgattacctgtaagtggcttctcagctctggactaggaacgaggatgcctcatagggtgggaaggctaagggattggcagcttgtaaggcctgggccccttagcctttcctctccccaccaggctggatgagaatgaggatatgcacagtctcctactgactgacagcagcactctactcgttggtgggctgcagaatcacatactagagattgatcttaacactgtccaggagactcagaaggtacaagcttggggcaagaaagacctatgtggggtctgaggttgttgcgggggcagggtatgcttgggctggtaatgtgcctgagatgtgggtgtgacctttctgttcccttggtctgtgggaaaaatcattcttctcactggtttttcctgcttccctctccagtatgcagtagagacgcctggagtcaccatcatgagacagacaaatcgcttcttcttctgcggccacacgtctggcaaggtggccaagttccatttctcctcccactgcagggccctgtttcactagatacctgattgcgatctgctttcccttaactctggggtgtagttggattggaggtgagggatgagtggagtgaattcacttcctactcagtgatgttctactatgagattattttgcagcttgatgttttctatgataatgaagtctccctgaagccccttctggctctgggcttctctgtttgccttttctgtgctttaactttccctgtcctaaagccctagttcctttggtagggaccccactgggttaggtaggtggcaggtatttttcctgataacagaatttgcagataactgaattttttttttctaggtttccctgagagacctccgtacttttaaggtggaacatgagtttgatgccttctcaggaagtctgtcagactttgatgtgcatggcaacctgctagctgcctgtggcttctccagccgcctcactggcctggcctgcgaccgtttcctcaaggtgtatgatttgcgcatgatgcgtgccatcacaccacttcaagtacatgtggatcctgccttcttgcgcttcattcctacatatacttctcgtcttgctatcatctctcagtcaggtatgaagggcatatgggattgggtaggagggatcgatgagcaaaggagagctagaacccgaaggagtactcatcctgaaacctctttgttggggaaagaagtaacctttcatcagggtcccaaggttttacttgggtttggccagagattagagcttttattttcttgaatatgaggaacatggaaaaaggtaaagataaagtaggcaaaataactgtagaattgctctttgctgagtagcgaaccatctgtggtttatggaaggcacgaagtggcattctgtctctaggcatggatttggggcccatcttgtcctgaaatcaggggaagaggataggaagggcataagaatatggctccctttcactttctagggctcagtgggtttcttcctcctttgtagggcagtgccaattctgtgaacccacaggcctggccaacccagccgatatctttcatgtgaatcctgtggggcctctgctaatgacatttgatgtgtcagccagcaagcaggctctggcctttggggattctgagggctgtgtgcacctctggactgattccccggagccttccttcaacccctactcccgtgagactgagtttgctttgccgtgtctcgtggactcactgcctcctctggactggagccaggacctgctgcctctttccctcatccctgtcccactcaccactgacacacttctctctgattggcctgctgccaactctgctccagctcccaggttgtaccctacctctgggccaaaaggcgggagggacagggaaagggccaagataccagaattctctgctagccctgttgttattctactactttcctgatttttgtctaccttcagtattttctttttctctggacccttggggattggggagtggaccagtgtacaccacaactctttaagtcctagaactatgctggattgtaggcgagcaccacccgtggatgcagagattctgcgcaccatgaagaaggtgggcttcattggctatgcgcccaatccccgcaccaggctgcgcaatcaggtgtgttcagagtggagggtcagccccgaccccggcccactgaagtttctcctatctttttcctttactagtctttcttttgtttttagatcctgttggtaaccaaccaaattgatggaactatgctaggtgttagggaggattcaaagatagagaagctagggtccttgctgttaggaagtttagtatttggttggtgaagagaagacatagccatatcagaaattacgttctgttgttaaatgctgaaggaatgtcataagcatttagtgccagagctgtttggaggaaaaatgttattccaggctaaagtgaccaaggaaggtgtaatgaaagagctgggtattaagctggaaaggtgggatatcagttaagtagatagtaacagaggagaatatccaagatgagagaagagtgttagtaaagatctcaagaggcataaatgcaaaacacatatctgagggggactatatgagtataccagtctggccggagtagctgttggtattgggatgtagtgagcgattaaaattagaagtggccagattgcgaagctttgaacaccagtctataatagaggaagtaatacacagaaagcagcattctgcaagggttaatttggtagtggtgtgctggacagagtgaacatagggagaccagtgtggacgccatcacagttgtccatctgtgctgaagcagagtgatggcagtggaaatagaaaggaagcagcggatgctgagagtgctatgaatatagaaggttcaggacttggtggctgtttcaatgttgggataaatgagtgtgaagccaaagatgacaagacatccaacaaggttacctcttcctaaaatccctagataccctacagactcaaggagtcagacagtgaatttgacagcttcagccaggtcactgagtcaccagtaggacgagaagaggaaccacatctccacatggtttctaagaaataccgcaaggtgctgggggacatcagggcctgtgggatgtggggaaaggtaccctgggaaggaagtcatatgagaaaggattgaaggactcagtcaggaggccttcaactaccaccctggacccaggaggaaggctctaggaaaggctgtggctactggaaagatttggggactctgagaatatccttgtcttgctcagacaatttctaccttaggtgaccatcaaatattccaagctagggctggaggactttgacttcaaacactacaataagaccttgtttgctggattagagccccacattcccaacgcctactgtaactgcatgatccaggtaagggttgggtattcctgtaacttgaacgtgcctgctgcttttcttcttccctatggctctcgaccctgctctttccaggtctcctcagccgtgttctctttaccatggtctcctctacaattctttcttgcctctacaactttcaagtctcctctgagctccaccggtttggtggactcactgcttcggtggactcctgcttctgggacattttctccaccagctcacttaacctccatatttctcctcacccccaggccagtttcctacatcagttcttctgcttttccctccaggtgctctatttcctggagcctgtacgctgtctaattcaaaaccacctttgccagaaggagttctgtctggcatgtgagctgggcttcctgtttcacatgttggacctctctcgtggtgacccttgccaggtcagtacttggagacacttaaaatggaaggggaaggaaggtggacacaaaagacaaaataacccctttccaccaacacatttccagggcaataattttcttcgggcattccgtactattcctgaggcctcagccctcggtctaatcctggctgactcagatgaggcctcaggcaagggcaatctggccaggctcattcagaggtggaatcgcttcattctcactcaactgcatcaagatatgcaggagctggaaataccacaggcttatcgaggtgctggaggcaggtatgaaatcaggatagaaatagttaaagccatcatgacaggcccctctgtgatttaaaaggtctcctaacttcctcaatgtgcatatatcatcctctccactcttagcagcttttgctcatcgggggactctgttattgggcagctcttcagctgtgagatggagaactgcagcctctgccgctgtggcagtgagaccgtgcgagcctcatccactctgcttttcacactctcctaccctgatggtagcaaaagtggtatacccttcagctcagttgggaaggctccccaaaatgtcctgtaatatcagggagagggtgttggggactaactgtgggtagaggggagaaccaggagtatagcatctaattttccctcagataaaactgggaagaactatgactttgctcaggtgctgaagcgaagcatctgcctggaccagaatacacaggcctggtgtgacacctgtgaaaagtaccagcccacggtgagtggactgttggactggactagagtcctggtcctgccatggagattcagccactatcccatgtggggctggctctgtcagcactgccatccagggatctctggtggagtgaggaatcccaatttgaagacgcagacccaggtccctgtccagactccttttcctgtacattccctgccattccttgtttgtttcttcctctcagattcagacccgcaacatccgccatctgccagatattcttgtcatcaattgtgaggtgaacagctcaaaagaggctgatttctggagaatgcaggctgaggtaaggactcagactagaaacaaggcttccggaataatttttcattttatcccccttctgacctccatatatgattacattcctgaagaactggatgtttttcttctgtgttcaggttgccttcaagatggcagtaaagaaacacggtggggaaatctccaagaacaaggaatttgctttggctgattggtaggtgctgtcttgggagttgtcaaaggattgaattgcccagtggttcctcttatcaagacctctttcggaacaaatttccaattcttctgacctgataggaaggaactagggagtccagagggtgtgctggtgtgtccctccattgaggagttgaagaacgtctggcttcctttctccattcgcatgaagatgaccaaaaacaaagggctggatgtttgcaattggactgatggggatgagatgcaggttgttgaaaaaccgggaagaggaaagggaataagggagagaaggtggggcagaaggtaaaggagggcaggggaaggtgaaacttagcagagggaaaaggaagagaataaggcctagtatttacctgttaggggattttccatagtcactcagttcagtgttggggtcctagatgggctaggatggagataacccaccctggtcccccatcccccatacccccaactccctgtcctctgtccccattcccctcccttccccatccttaaacttagcttagcagcctgggtacccccctcacagtggggcccagccagggcagaggaggagcatggtgtctatgtgtatgacctgatggctactgtggtacacatcctggactcacgcacagggggcagcctggtggctcacatcaaagttggagagacctaccaccagcgcaaggaggtgagtgaggttgtagagggcaggaacactcctgggatggccacagtgagtcccagatctgtccttgagtctgagacagagtggtccagccatcaatttgtatcgccacaggctttctttgtatttccatagggcgttactcaccagcagtggtatctgttcaatgactttcttattgaacctattgataaggttagttgcaacatgttctgtttcttctttcatttccccttttcctagcatccttatctttagggctctatagaatgccaggcagattcaacagggagggaggaaggaatcctcaggaataaaaaccattagcacttaaaaatagcacctgaaaaaaaacaaaaactagcacctgagtcctggcctccgtctgaagtgggggaaaaggaaaagggtgatatacattagccataagtgctttttctcttctatagcatgaagctgtgcagtttgacatgaattggaaagtacctgcaatcctttattatgtcaaacggaatctcaattccagatacaacctgaacagtaagtgctacatagtagacccaagtgtgtggacagtttagattgggcttcagggtgagatctgggacattgcttgcaagtacttaggattggtaaccagtgttaatatttctggagatactaaagagattcctgctcatcagaccttaaatttagaagtgcgaaatccagcctgagcaacatagcaagatcccatctctttgaaaaaaaattttttttttttttttgagatgcagtcttgctctgtcacccaggctggagtgcaattgcgcaatctcggctcactgcaacctctgcctcctgggttcaagcgattctcctgcctcagcctcctgagtagctgggattacagacgcccaccaccacacccggctaatttttttgtatttttagtagagacagggtttcaccatgttggtcaggctggcctcgaactcctgacctcatgatctgcccgcctcagcctcccaaagtgctgggattacaggcgtgagccactgtacccggcacctttaaatatcttactacccaaccttagccatgccaaaaaggccaactgaaccatggagtagagaatacagtgatttatatcattcctgcaaccagtttgcatggagagagagaagccagaagtcccacaacttttacccttttactggcatgtcaggcttctgggttcccttcccccaagccatggagccctattggccctgaagtcctgtgaaggggaaaaagcttttttctttctccagagtctgagggtcaaaggagtccagtgatgtaggatgcactccacccatgaagtgggggggactaatcagcaggaattagccatgctcacctgtgctgtgccctgactcctgctgtcatctgcctcaggtctagtgttccattcaaaagattnnnnnnnnnnnnnnnnnnnncgcgcgcgggggcgcgaacacaaacccccccaacaccacagttgcgtggctcgcaatcaccaaaagggaaaaggagtatgagcatctacgcaataccgattgaacccacgcggctcccatcgtctaatcgccgactgccgcgcccctggctcactcggccaaccccaaacatcccctcctccctcccctacaaccactggatgcaggccagcaccaaatagcctacctccccacaccctatcgtcaaagcaggttcagtgcgacatattcttccatactcccaaaacccgccctaagtcacgccaacacaactaacccctttctctcccagagatacaaaaagtagctgggtatggtcatgtgctcctgttgtcccagctacttgggaggctcaggcaggagaatcgcttcagcctgggagtcagagatttcagtgagtcaagattgcatcattgcactccagcctgggtgacgagagtgaaaccctgtctcaaaaaaaaaaaaaaaaatttagctgagtgtggtggcatatacttgtggtcccagctattggagaagctgaggcgggaggatcacttgagcccaggaggtcaaggctgcagtgagtgagccatgattgcaccagtgtactccagcctgggcaacaggatgagactgcttttttttttttttttggacagagtttcactcttgtcacccaggctggagtgcaatggcacaattttggctcactgcgacctccacctcccgggttcaagcagttctcctgcctcagcctcccgagtagctgggactacaggcacctgccaccatgtccggctaattttttgtatttttagtagagacagggtttcaccatgttggccaggttggtcttgaactcctgacctcgtgatccaccctccttggccttccaaagtgctgggtttacaggcgtgagccacagtgcccagcctgagaccctgtcttaaaaaaaaaaaaaaaaaaaaaaagcagctgtaagtcttgagagtggagtggaaatgagatgagggggggatgtttgatcagaatggcttaggttatgatgttacatctaattattcttttttttgagacagagtttcgctcttgttgcccaggctggagtgcaatggcatgatctcagctcactgcgacctctgcctcccgggttcaagcgattcccctgcctcagcctcccaagtagctgggattacaggcatgtgccaccacgcccggctaatttttttttgtgtctaattagtagagacggggtttcaccatgttgggcaggctggtctcaaactcctgacctcaggtgatccgcccgcctcggcctcccaaagtgctgggattacaggcattagccaccgcgcctggctatgagctccttattaagtacctatttggtacctttaaaccatagtttctctgtaacctttttctggattctgtaaactaaggtccaagtgaaaatcttattctttcttctctgtggtcttttctggttttttctcagcatgtttgttgataattttgtgatgtgacctgctctgtctacctgtcccatttatcagacatgatcttttttctcacgtgctttgattattgagggatcacagtgaagacccagagtcgatgatcagccacactgggcttctctcccctagtcacttccctatccaagccctgtgtcctctgcattctcccttctagtcaagaaccctattgaggcaagtgtcttgctggctgaagcctcgctggcacggaagcagcggaaaacacatactacctttattccactgatgctgaatgagatgccacagattggggacctggtgggtctggatgctgagtttgtcacccttaatgaggtaaccaagaccaaagggatggggcattggaagagaacgctgaggatattaggagttgtaagcatttctctgatttccttattaactcttctcatgtaggaggaagcagagttacgcagtgatggtaccaagtctaccattaaaccaagccagatgtcagtagccaggattacctgtgttcggggccagggacccaatgagggtatccccttcattgatgactacatctctacccaggagcaggtattaggatatggagatgcaagtgaggcacaccctggtgcttacttacagtgctcaagaacccagggaagagtgataggggaagactccatctcacttcctgaaaaaggcttgtccttttctctattcctaggtggtggattacttgactcaatactcgggtataaagcctggtgacctcgatgccaaaatttcctccaagcacctaacaactctcaagtctacctacttaaagcttcgttttctcattgacattggagtcaagtttgtgggtcatggcctgcagaaggacttccgggtcatcaacctgatggtttggcagggctcttttaagagtcttcttgtgagagtgggcccctcagggtatacattgtgcctttagagaatggggaattataggtcccctaccttaagtctccccctcttttatccttgccaggtgcccaaggaccaagtccttgacactgtctacctgttccatatgccccgaaaacgaatgatttccctgcgattccttgcttggtactttctgggtgagttgctctgccttgtaggcccctgctacattaatagcagaagcagccatttaaaaaaaaagaaatcatgttctttgcggcaacatggatggagctgtgggccatcatactaagtgaactaactcagaaacagaaaatcaaataccacatattctcacttataagttggaactaaacaatgagtacatatggacataagaatgacattagggactctaaaagttggggtggtgggtgaggggtgagggttgaaaattacgtattgggtgcatagttcactatttgcatattagggataccagaagcccagtccccaccagtacacgatacacccatgtaacaaacatgcacatgtaccccaaatctaaaataaaatttaaatataaaaaataaaagcatggggggaaaagaaaaagtaggaaaagtgttagaggacaaaatgggagtaggggagaccctcagttagtggtgacagttactaatggatttaattaacttcaatatcccttctgtgcactgaggaagatgtctgacaattttccttaagggcagtcaggctttttagttttctggagtcaggtaggagtggggagacatgttcctacctccctttgctgggtcccaaactattccacctttacttaccccagacctgaagattcaaggggaaacccatgacagtattgaggatgcccgcacagcccttcagctgtaccgaaagtatctggagctaagcaaaaatggcactgagcctgagtctttccacaaggtgctcaagggtctttatgagaagggcagaaagatggactggaaggtgcctgagcctgagggccaaacaagtcccaagagtaagacctgggatgggacaagggaaactggactgggtggattttgtattttgtttgtttgtgacagggtctcactctgtcacccaggctgaagtgcagtagcgtgattacagctcactgcagcctcgacttcctgggctcaagtgattctcccacctcagcctcccaagtacctgggacaacaggcacacaccaccacacccagctaatttttgtactttttgtagaaacaggattttgccatgttgcccaggctggtcttaaactcctgggctcaagcgatccacccaccttgggctcacaaagtgctgggattacaggcatgagcctgagcgcccccaattgggtggattttgattgcacatatggagaatagcacttaacagtttacaaagcacttcatcctcctaacattcagtaaaatacattttatcgaaactctccattaactataacttcctcttgcccaagtctaaaatgttcagggaaggtccatgcccttttttctcttgcatttttccttcataggaagtatgagaagatgctttttctccactcagcttgaatcatgcttttggttttgtctctgacagatgcagctgtcttctcctcagtgctggcgctctgactacccttcccaaagaaccacggccctctccctttactgttctatagccccagaactgggagatggcttcctaagttggctataccttgtccacttccagtactggacgtgctcagggtctagggtcacagatggtgctattaattgaactggaacacagcagaattgttgcaaaggttctaggagccagattcattccttcttcattctttgcaaaacagtggtacagacatggagtctagaattgacccagatggaaagtaattggtattcttaatatcctgggtgactaatatccaggcagagaagctcctggaaccataactgtaagttcctagctggctagggattgaagtcctggacagtgacagaggataccacagtagttcaagacttagcacaagtcaccaactgcttcagggatacctggaggggccagcaagtagagtgttggtggcccaagcaaaccagtgttgccaataccattgccaaaagggcctttggatcctggacaaagcttggctgccggcttcatttattcctgctgatggctgagaagcatctgtcttccatcccacttgcctgtcccaagttttgttccattttttaaaaatttgttgtaaactgcatgttttataaaataaaaataaaatatcgtttgttatttatctcattagagaactgctagtgtgggttctctggcttcagtcttcctctccttcctttgaaggtaaaggtccggaatccaaagttatggatatgaaagggtataattaggccgggcgcggtggctcacttctgtaatcctagcactttgggaggcagaggtgggtggaacacgaggtcaggagttaaagaccagcctgaccaagatggtgaaaccccgtctctactaaaaatacaaaaattagctgggagtggtggatggcgactgtaaccctagctgaggcagaaaattgcttcaacccgggaggcggaggttgcagtgagccgagatcacgccactgtatgccagcctgggcgatagggcgagactccgtctcaaaaaaaggggaaaaaggtataatttatgccttttctgggcaatgctgggtctttgctatagctgcccagtaccctaagtcagactgaagatgtacagtatggtttccgttaattgtgtaagccgacaaactacaggtcccaggatagcttgagacttgtagttgctcacaaagatgggtccggtgctgcggtgcttcctgggagatgtagtttcctgtgtattgaaacctggactgctcgctggccggcagcgcaccgttttgaaggtcctagcccacctgggctggctcacgcgcacgactagccgctcccatacagcacgcccggactctgtcgtcgcttaaggccactcctattctacggctgacccctggtggtcacgtggatctgttcgccacgcaagtctgggtccttcggcgattgaccggggtccttgctgttcgggagcctctcctaagctgcctgttcgcgcgagagtttggaggggcgggtttggggtcggtgtctgattggggctcgcaccgcagcacgctggagtcccgcttaggtaccagttagcgtcaggggagctgggtcaggcggtcgccgggacaccccgtgtgtggcaggcggcgaagcgctctggagaatcccggacagccctgctccctgcagccaggtgtagtttcgggagccactggggccaaagtgagagtccagcggtcttccagcgcttgggccacggcggcggccctgggagcagaggtgggacggatgcgggcggcgaggcgctgggcgctgagggttggggatggactgaagcgaaagcaatggcggagtccttagaaagggggctggtgtccgtacgggtaatcacttacgggctggaggtggggacgcaggaatcttcggtgcaggatccaaatgggccctagttattgctctcctcgctggcctcctggcctgactgagggctccctgccggcagttccctagtgcctgtagtcctcacgtaatcgccaacttacctcctgtagctgccacaaagccccgtgaaccctaggcatgcagtgctaaagtaccaacacttagggcctcacctatccacgtagagtctggggctgagccgcaagtcctgagctcgcgctcccacccaccaccctgggggaatcagagccctcaagcgctggaacagagaagcccctttgtgtcccggccatttcctggaaagtagagccagagtcacaatgaggcctttgaaagccttggggtgaggattgggggggtcagggaaaaatggagtcggctcctcacacttatgttttattcccactcaaacccaggtggagcgaccccattacgctaaagatgaaaggctggggttggctggccctgcttctgggggccctgctgggaaccgcctgggctcggaggagccaggatctccactgtggaggtaaaggcacaacgggaaaaagaagtggaggaagcagagccttgggagggcatgagatccaaggcctgggagaaggatgaatggaaatcctgggttgatcccattctcctcacaccctaccccctaccctgtcccctgctctcattctctcctcttccaccagcatgcagggctctggtggatgaactagaatgggaaattgcccaggtggaccccaagaagaccattcagatgggatctttccggatcaatccagatggcagccagtcagtggtggaggtaactgttactgttcccccaaacaaagtagctcactctggctttggatgaaattcgactgcttaaaaaggaccttggtttaatagaaatgaagaaaacagactcagaaaaaagatttggctctgtctcatttggaagaagctgcaggcttattccccatgcacttgcttcctggctgcaaaccttaatactttgtttctgctgtagaatttgttagcaaacagggagtcctgatcagcacccttctccacatccacatgactggtttttaatgtagcactgtggtatacatgcaaacatccgttcaaaatctgagtcggagctaaaaataaaaaatgaaaaaacagaaataagaataaaaggtcttatcctcataattaggaaattttaatcgaaaacaacacacatgtacacaaaggtgtatctaataagcaatatataaggcagtgttaagattacagtgctagcctgggcatcatggcaaaacaccaactctacaaaaaaatgcaaaagttagcagtgcatggtggcatgtgcctgtagtgacagctgcttggaaggctgaggtgggaggatcacttgagcccaggaggtcgaggctgcagtaagccgtgattgtgccactgcactccagcctgggaaacacagcaagaccctgtctcaaaaaaaaaccaaaacccagcactttgggaggccaaggcaggcggatcacctgaggttagaagttcgagaccagcctggccaacatggtgaaactccgtctctactaaaaatacaaaaaagtagccaggcgtggtggctcatgcctatagtcccagctactcaggaggctgaggcaggagaatcacttgaacccaggaggcagaggttgcagtgagccaagatcgcaccactgcactccagtctggttgacaagaacaaaactctgtcttgaaaaaaaaaaaaggccgggcgcggtggctcacgcccgtaatgccagcactttgggaggctgaggtgggcagatcacaaggtcaggagatcgaaaccatcctggctaacatggtgaaaccccgtctctactaaaaatacaaaaaattagccgggcgtggtggtgggtgcctgtagtcccagctactcaggaggctgagacgaaaagaatggcgtgaactcgggaggcagagcttgcagtgagctgagatggtgccactgcactctagcctgggcgacacagcgagactcctctcaaaaaaaaaaaaagaaaagaaaaaagattatggtactttaatagctgttgttcacagagcctacactacatctttaatactgtgcttactgaggatattagtctcaatttaaacaaaattattattatttttttgagatggagtttagggcttgggtctcaggnnnnnnnnnnnnnnnnnnnnnnnnnnnnnnnnnnnnnnnnnnnnnnnnnnnnnnnnnnnnnnnnnnnnnnnnnnnnnnnnnnnnnnnnncatccaccacacctggataattttgtatttttagtagagacagggtttctccatgttggtcaggatggtctcgaactcctgacctcaagtgagccaccctcctcggcctctcaaagtgctgggattacaggcgtgagccaccacgcccggccaaaaataaaatattaatgaacacatggacacagggaggggaacgtcacacatcaggtcctgttggggtgttgggggctaggggagggatagcattaggagaaatacctaatgtagatgacaggttgatgggtgtagcaaaccaccatggcacatgtatacctatgcaacaaacctgcacgttctgcacatgtatctcagaacttaaactataatttaaaaaaaaattatcttcatctatagaaattagaagtataagttgatcaggttaatcaaaaaattctgtttataacttggagctaatgttaactgtcttgtttcttagaattgtacaatgaggtgccgggcacggtggttcatgcctgtagtcccagcactttgggaggctgaggcgggtggattacctgaagttgggagtttgagaccagcctgaccaacatggagaaaccccgtctctactaaaaatacaaaattagctgggcgtggtggcacatgcctgtaatcccaactactcgggaagctgaggcaggagaatcacttgaacccgggaggtggagcttgcggtgagccgagatcgcgccattgcactccagcctgggcaacaagagtgaaactccatctcaaaaaaaaaaagaaaaaaaaaaagaattgtacaatgaggtaaaataaaatcatatagttgaaactactgccaagtacagtggctcatacctgtaatcccagcactcttggaggccaaggcaggcagatcacttgagcacaggagttcgagaccagcctgggcaacatggcaagaccccgtctctacaaaaaaatataaaaaagtagctgggtgtggtggtgtgcatctgtgtgaggctgagatgggaggatcacctaagcctgggagatccaagctgtagtgagcctcagtcatcacaccactgcactccagcctgggcaacggagtgaggcctgtctcaaaaaaaaaaaaagaagtactttgaaactatcaagtaaaccatattaatttaaaaccaggccgggcgcggtggctcatgcctgtaatcccagcacctggggaggccaaggtgggcggatcacgaggtcaggagatcgagaccatcctggctagcacggtgaaacccgtctctactaaaaatacaaaaaattagctgggcgtggtggtgggcgcctgtagtcccagctacccgggaggctgaggcaggagaatggtgtgaaccctggaggcggagcttgcactgagccaagatagtgccactgcgtccggcctgggcgaaagagtgagactccgtctcaaaaaaataaataaataaataaaataaaataaatgaaaaccacactaggccaggcacagtggctcacgtctgtaatcccagcactttgggatgccgaggcaggcagatcacctgaggtctggagtttgagaccagcccgaccaacacagagaaaccccatctctactaaaaatacaaaagttagctgggtgtggtggtgcatgcctgtagtcccagctactcaggaggctgaggcaggagaatcacttgaacccaggaggcagaggttgcaataagccgagatggcgccaatgcactccagcctgggcaacaagagcaaaaccccatctcaaaaaacaaacaaacaaacaaaactaattaaaatcaattagggaaagctttttagaataggttgttggagctagatttggaaagaaaagtaaggatataaattactaatgtacagaggtagaagagagtgacccaaggctgaggacatttctaggtgccttatgcccgctcagaggcccacctcacagagctgctggaggagatatgtgaccggatgaaggagtatggggaacagattgatccttccacccatcgcaagaactacgtacgtgtagtgggccggaatggagaatccagtgaactggacctacaaggcatccgaatcgactcagatattagcggcaccctcaagtttgcggtgagctatgggaatcggtagctggttcttggacattaaggggttgttggagaaccaattagaaagttaggctgatatccttgtcctcctctttggaagtgaaggcaagaggcctcttattgccctgtgtcacccatttctcccttgggttggcagtgtgagagcattgtggaggaatacgaggatgaactcattgaattcttttcccgagaggctgacaatgttaaagacaaactttgcagtaagcgaacaggtaagctgcccccactttatctcctgttctagtagctctgtggaacctgacattccctaactcacccatacacccccatcccagaaacctctggtattaggtcaagagctgtcttccatttcccttggcttagggacttggggtgttcctccacattttctgtcagctttcagaatttgtgtccccttgaccctgagatacaggtgagaggacagtggggatgttttatcatttataagcatatattctgcagaatggtggttggtgtgtgtttgtgtcagcttggtctgggaaattttcttgatactggcagatatcagtatgagaatggcatattcctttaaattgtttgccatttgcagatctttgtgaccatgccctgcacatatcgcatgatgagctatgaaccactggagcagcccacactggcttgatggatcacccccaggaggggaaaatggtggcaatgccttttatatattatgtttttactgaaattaactgaaaaaatatgaaaccaaaagtacaaactgtgttgtcttttcatgcctggaattgcccttacattaagcttgaagataaggagttatatagacaggaaagataatggaggagaaagaagagttttgggattgatacaggataaaggtaggagaggcctgaacctttaattcttctaccttctgagattccactccactcataaactagataagctttcagtcagtgcccactcaataccacgtctttagagtctaattgtggagaatagaggaacctccatgaggaagcaggggaacatagtgtatggtagtgtagaattctagaaatcccttgtgttcatggctgttgaaacataaagtaagacagggcttggtcttgaaggaaataacggatatgcattattcttccttccctgcccatccagatggagggaccagcaagaacagagacaggaaggggaaaatggatgtgaccaactcagctgaaaagtaagggctttatcggatagggacagacgaggtaaggaaggttgtttaatgagaggccttgcttgccagcctaagcttttaaatttgatgccagtggcaacaataaagtgtatctatcactagccattgtcaatctggactataagtctgtccacaattctgtgtgtagagattccagactggggcatagggatgaaaacctaaaggataccttcttttgggaaattctttttttctttttttttctgagatggagtcccgctctgtcgcctaggctggagtacagtggcgcgatctcggctcactacaagctctgcctcccaggttcacgccattatcctgactcagcctcccgagtagctgggactacaggcgcccgccaccacaccggctaatttttttttttttttttttgtgagacagagtctcgctctatcgcccaggctggagtacagtggcgcgatctcggcttactgcaagcttcgcctcccgggttcacaccattctcctgcctcagcctcccaagtagctgggactataggcacccgccaccacgcccggctaattttttgtatttttagtagagacggggtttcaccatgttagccaggatggtctcgatctcctgacttcgtgatccgcccgccttggcctcccaaactgctgggattacaggcgtgagccaccgcgcccggcctgcactggctaatttttttgtatttttagtagaggcagggtttcaccgtgttagccaggatggtctcgatctcctgacctcatgatccgcccgccttggcctccccaaatgctgggattactggtgtgagccaccgcacctggcagaaaattcttaagcactctgagcttgaggtatggttgtctcagggtttcaaatggaatatctccggtcccaagaacacctcaaggagagaagacctgaataaacatttcaaaggttttaaaaattacatcattttagaatctaaaggaaccttagaggtcgtctggttcacctctgcccattttattgatgaagaagctgaggcccagagaagccatagaactttatgaagttctgtatttaatggcaaaactgggtctataagctaactttcccaagtgctgacctgatctaatatagctatagagtaccttctattttaagtcttttttctctaataataccttgcactaagcctggcgcatagaatgcatatattccacaaagctttcttgtaccaaaaatccctgtgaaatctgacaaattaactagagcacagagcaagcactctgatatttgttgtcaactaatatcagcctggtgttaattccatcttctcccatcatccataagaaatgctgtgttcgctctagttttccaaaccaactattataaagcttattttttcttctatgatgcatataagtaataattacattttttcatgtccctgaaagtatacccaaggtgctgtccatttcgtgcttcgtgcctaaaaatgcctttcttttccatcagaaagcttatcagaagtataaatgagagtactcttcaagccaaatgcggtggctcatgcccataatcccaacactttgggaggccaaggtggaaggatcatgatcactcgagtccaggagtttgagaccagcctaggcaatatagtgagaccccattgctacaaaaaatacaaaaattagccggcataatggtgtgcacctgtggttccagcgactctggaggccaaggtggcaagatctctcgaacccaggaggctgaggctgcactgagctgtgattgcactactgcactctagcctaggcaacagagtgagaccctgtctcaaatacaataaagagagttctcttctggaaacttagaactgttttaatttagaaaacaaattattcatagttttaaataaataaatttaatgttaatcagtaacaagttacttgtgatgcacctttctggtttgtcaaagtacagctgttaagaactctccagctggagagactttgtcattggtacacaaaggatatgtcctatataggaaagggtggatgttaccttctaggcttgattaaggatacactttgtggggtttttttgttttttgttttttttttcctgagggagagtctcgctctgtcgcccaggctgaagtgcagtggtgcaatctcggcttactgcaacctccacctcctggttcaagtgattttcctgactcagcctcccaagtagctgggattacaagcatgtgccatcatgcccagctaatttttgagttttttgtagagacagtgtttcaccatgttggccaggctggtctcaaactcctggcttcaagtaacccgcctgcctcagcctcccaaagtgttgggattacaggcgtgagccaccgtgcccagcaggaagatacactttgtaaacctcttattttttttattattatcattattattattactatcttagcgagacaggggtcttgctctgttgcccaggctggagtgaaatggcatgatcataactcattgcagcctctaactcctggcttcaagcaatcctcctgccttggcctcctgagtttctaggattacaggcaagcaccaccatgcctggctttgcacatgttttaattcatatcacaaggaatgcatgaatttatctgaaccctctggaggttcattataataaattatagcccagtatttggtagagcatatgctcttaaccttgtaaatctgatcaagcttcagatgccttctaacttagtttatcagtaaaatgttagaacttaacaaacatttccgaagacagtgttaaatgaggtacagatataacaggaaagtttattatgtgaaaatttagtcctttagaaatacgttttagggctgggcccagtggatcatgcctgtaatcccagcacttggggatgctgaggtggacagatcaattgaggccaggagttcgagaccaagcctgggcaacatgccaaaaacccatctctaccaaaaatacaaaaattagccaggtgtagtggcatgcgcctataatcccagctactagggaggcagaggttacagtgaagattgcgccactgcacttcagcctgggcaataaagtgcgactcaaaaaaaggtttnnnnnnnnnnnnnnnnnnnncagtggctcacacctataatcccaacactttgggaggctgaggcaggaggatcttttgagcccaggagtttgagaccaccctggtcaacatagcagggaccctgtctatgcaaaaaaattagctgggtatagtggcaggcatctgtagtcctagctactcagtaggctaaggtgggaggactgcttgagccagggagatcgagattgcagtgagtcatgatctcgccactgcactccagcctgggcaacagaagcaagaccctgtctcaaaaaaaaaaaaaaaaaaaagtgaagtggcatgatctcgactcactgcaacctccacctcccaggttcaagtgattctcctgcctcagcctcccaagtagctgggactacaggtgcctgccaccatgcccggctaatttttgtatttttaatagaggtggggtttcaccatgttggccagactggtcttgaactcctgatctgaaatgatccacccactttggcctcccgaagtgctgggattacaggcatgagccactgcctggccgaaaaaaaaaaaaaaaaaacttttataggattttttaacttaaaaagcattcataggtacaatattcctttaaatataggacaggggccaggtgcagtggttcacgcctgtaatcccagcagttttgggggctgaggcagcggatcacttgagttcagaaattcaagaccagtctgggcaacatggagaaaccccatctctacaaaaaatacaaaaattaaccaggcagggcacacctgtagtcccagccacccaggaggctgaggtgggagggtggcttgggcccaggaggttgccgtgagctgagatcttgccactgcactccagcctgggtgacagagccagaccctgtcataaataaataggaataaatagcatggggaagggaaataatatatgctgaatacttgtataacaagcacatacacactcatttaaccttttttttcttttttttttttttttttttgagacagggttttgctgtgttgtccaggctggagtacagtggtgagattatggctcactgcaacctccacctcccaggctccagcaatgctcccacctcagcctcctgagtagctgggactacagacgcgcatcaccaggcccaactaacttaaaaaatgtttcgtagagatgggatcttgctgttttgcccaggctggtctcaaactcctgggctccagtgatcctcttggcctcccaaagtgccaggattacaaatgtgagccaccttgcctggcctcatttaatctttgcaactctaagaaatagatgttattcctattttatagatgaagaaactaagctcagagagattaagtgtcttgctagtcagcgaggagccaagacttcaaccccagtgatcctctaatccgtagtccagtcatcctctaatccctagtccagtcatctttctgttatacctcattctatgtagtggagtctccaagtggctgtataaagtagcactttttaaatatggcttgaaaaactgtctccaagtttgaatgtatgccctctgattctagtaatctgtagtggaaaagcattatatcctctgttcagccatttttcctgactattccttataagacaccccttttacctttctggtcattttttgtttgtttttgctgttgttgttgtttgagacagagtctcgctcttgcccaggctggagcgcagtgatgcaatctcggctcactgcaacctctgcttcccctgctcatgtgattctcctacctgagcctcccaagtagctgggattacagacgtgcaccaccatgcccggctaattctgtatttttagtaaagacagggtttctccatgttggtcaggctggtctcaaactcccaacctcaggtgatctgcccgcctcagtctcccaaagtgctgggattacaggcatgagccactgcgcccagcctaatttttgtatttttagtagagacggggtttcaacatgttggccaggctggtctcaaactcctgacctcaagtaatctgcctgtcttggcctcccaaaattctgggattacaggagtgagccacaatgcctgggctgtagtatttgagacaagcttgctcagtcgcccaggctggaatggagtacatggagtgcagtggtatgatcatggctcactgtagcctcaacctcctcagctcaactgatcctccaacctcagccgccccagtagctgggactataggcgcacaccacctggactggctaatttttacattttttgtagaggtggaatttcatcatgttgcccagggtggacttgaattcctggtctcaggtgatcctcctgccttggccttccaaagtgctgagactaccacgcctggattataggcatgagaaaccacacccagccccctttctggtcatttcaaatgctgaatgtttgtctctcctacctttatgtattctgggagtcaccatttattatctagttcacatatggatgtgaaagtctttacagatgagtaagactatagttccttatcttttatttttatgttttttttagagaaaaggtctcactatgttgcccaatctggagtacagtggctgttcacaggcatgatcattaggcactatagcctcaaactcctgggctcaagcaatcctcctgcctcagcctccctagcaactgaaactacaggcacattccaccttgcttggcttaaatatctttttatttatttatttatttttgagacggagtctcgctctgttgcccaggctggagtgcagtggcacaatcttggctccctgcaagctccgcctcctgggtttgcgccattctcctgtctcagcctcccgagtagctgggactacaggcgcccgccaccacacccggctaactttttgtatttttagtagagacagggtttcaccgtgttaaccaggatggtctcaatctcctgaccttgtgatccacccgcctcggcctcccaaagtgctgggattataggcgtgagccaccatgcccggccgaaatatctttatagcaacacagtgagttgatgtctccaggagacagttgacagtgactcaaaaatccccttactgagttgcagctgatagttcacaattgccagatgtggtggctcatgcttgtaatcccaacactttgggagaccaaggaaggaggatcacttgagcccagaagttcaagaccagcctgggcaacatggcaagaccctgtctctaaaaaaaaaaaaaaaaaaaaaaaaaaaaatgaaaaattagccaggtgtggtggtgagtacctgtagtcccagctacttgggagagtgaggtgggaggatcgcttgaggccaggaagttgggcagcagtgagcaacgatcatgccactgcgttccagcctgggttacagagcaagaccttctctcaaaaaaaaaaaaaaaatcataatcatcatgtaagacatacagcttagggccaggtgcagtggccaacctggccaacatagtgaaaccttgtctctactaaaaatacaaaaattagctgagtgtggtggcatgcgcccgtaatcccagctacttgggaggcggaggcagaagaatcgcttgaaccagggaggcagaggttgcagtgagctgagattgtgccactgcgctccagcctgggctacacagtgagactccatctcaaaaaaaaaaaaagaaaaagaaatacagcctagtaatgctgaccttggtctgaatttatagccatgccaattacaagctatgacactgggtaggatacttcatctaagtcttggttttctcttctttttattttttaataccttgaaacttagagttgttgcaaagattaagataatgcacattccaggccaggcacagtggctcatgcctgtaatcctagcactttggagaccagcctgggcaacatggtgaaaccccatctctactaaaatagaaaaaaaaaaaaaaattagccaggcgtggcggcgtgtgccacctaggaggtggaggttgcagtgagccgagatcataccactgcactccaggctgggcaacagaacaagactctatctccaaaaaaaaaaaaaaaaaaaaaaagataatgcatgttccacatttagatagtatctgcaaatagtaagggatcctccagtttaagttttagctattatctattaaatagaggcgtttggtttaccttgtagtttaagggtttaaatttagattttattagcccacttgtcctttgccactagggggtgctattgcctccctacactttaaagaggtcctcccaaggtcacaacaacctaaattctcagccttctctcccttgccccttcaagttcccaagcacttagttatacctggacctagagctcacttggctgctttattcatgccaatctttcttccttaacattctctccaacctccccaggtcccatcagtgttgagaaggaatctaggccagctcctgggagatgccagttagccgctttgatcctgtgctttccaattgcccttatagcagtcgatgtcaggattggacaacttcaaaacaagtccataaagtccccatggcactaggggctctgggacccagtgtcgagaggcttagagcattgctgttccccacccaatcactaaagctccaagacagatgatcctgtggcctctcaataattgtccctttggtagtctcatcctggggcactgaagttcagtcctgtggtctgctggttagtctctgtggataattaaccagagaaaaggaaccaggtcagactattctagggttatgtggaaatcctttatgagatgctaaatggggagcaaatattgatcagtgaagctttgaagtcaccggggtcttcaaaggtagctgaggtcagtgctcctctggagcattgcctaaagttttttcctgagacctaactatctgatccccaggccagaagagcattggttgttaggtgtgaagctgagtataaagaaaattaagaagagaaaataggggttttctatctctttttccaagtccaagctagaaactcggttctttgtaaaggagatctatctaaacctggcttaggtggatactgagacctgtgatccttgttactgctatgtggtgagataaaagggctattcacagctgggcacggtggctcacgcctgtaatcccagtactttgggagcccgaggcgggtggatcacctgaggtcaggatttcgagaccagtctgaccaacatggcaaaaccccatctctactaagaatacaaaaattagctgggcgtggtggcgggcgcctataatcccagctactcaggaggctgagatcgcaccactgcaatccagcctcagctacagagcaagatctgtctccaaaaaaaaaaaaggcttttcacttggggctggaggtttgtagataagatgctcttgtccttggggtcaatgactacgacaggcttagggaggcacaaaagtcctgaagcctcgtctacccagaggatttagaaagtggtgcggaatatcacttcagggtcgtgtcatggtctctggggagcacaagataagagagcatagaagactgccaagtaggagaagtggcccagaggccctagagaatgtgaccaaaggggatcttcgatgaggggctagtctgcggctcctaatctgtggctaaagtggggtgagctgctgtgtggggttacgtgaccagagtggcagtgagactaatgcccatgacccagaagctgtggctggctcggaaagccttcatagtaagggcgcagttaagacttggatttcctgccattacacacagaactgacagctcacaaagcactggatattcaggctcctgcttttgcttttctccccatatcggggtctgttagtatctataatatcgtggcctctgctgacctcaaatgatctccaccgagcagctaactctggcatcctagcctgttgtccacatgatgtcacctccatggccgtgaagccattaaccaaagacattcctcaagaaagcgcgccaaggcggtagaaggatcaggcaatgatcagtttccatgatcatattacggaattggctccaaggaccttcagaggtcgagtcctggagcgtctcctttagcattcgcctcagagataaccccaaaagtgttaaggtcaaagggaaaagccaagagggaagttaactgagttatcaggcacctatttagccacccgcacttccccgcccgccacccatccacccttaattagccctaatccgggcggtccaatcctccccgtcacaactgctgtcaagtgctaaggtcccgccccgcttccataccggaccaatggccgggcccggggagagtcccttgagaggggcgggctcgggttccggccagtgggcggggcctccttgaggaccccgggctgggcgccgccgccggttcgtctactctttccttcagccgcctcctttcaaccttgtcaacccgtcggcgcggcctctggtgcagcggcggcggctcctgttcctgccgcagctctctccctttcttacctccccaccagatcccggagatcgcccgccatggctttacttactgcggccgcccggctcttgggaaccaaggtgagcagcgaggggagggagcacgccgtcccagggtggggctgaggcgaccgcaggccctccggcgccggggtctccctcccacacccgtgcgcaccctgcgcgccttaaagggccctgcgcttggctggccgccagccctgcgtgaagctacaggaccatgtgccgcgcttcccttctggctcctgggggtgaagtgcacgccgcccgccctcggcccgcagtccagaacgcgtgaggaggccgaccctgctgtcaccccgcatgtctgaaatgaaaggggaagggatgcgtggccctgaaatagcaaggagccgagacaggaacctctggtagagactagagatgtggtgttccactggagttacagtcagtttggtggagggagcgggagtgaagatatgtgctcactctggagcagtggctaatttcgtcctctgctttgtaggaagggccttgtcagttcccgaactgcctgtttccatttctccaagcctattatttaagccttcggtgaccacgccgagcacaagagtgggtccttcaggccctcctctttgtccttgggactcttgcactttttatataggaggagcttgggtggggtggagcacttctgtacaacctcctgcatgactatcatacatgattgcagaaagaaccagaaaggtgtttccaccaaactgcaagccaataaatgaagatcctcggcaagagatactaatgccaaggtcacatgaccgtcatactacttgcttacccaggttatgccgttgatcttaagtctactttatccaggaactttctctccttctttggggtcctttacttggtattgattgccttttgggacatagaaatactgttgcaggtaatgatgccttcaatttcaaattgcagtacttttagttctaagtaacttggcccttttagacagaaactgctgtgctgagggagtcccagccctctaatccaagcaggggacagtcccacaagtgaccttgacttctgcaaagaacttagtttttcctgcggataatttaaagctgacagcatctgaaggaaaggaaagccttaggatggttttggcttgctgtatgtaatttttttttttttttgagacaggatattgctctgtcactcaagctggagtcttgtggtgtgaccaaggctccctgcagcctccacctcctgggctcaagcaatcctcccacttcagcttcccgagtagctgggaccacaggtgtgcaccgccacgcctggctaatcttttttgatttttagtagaggcagcgtctccttatgttgcccaggctggtcttgaactcctgagctcaagtaatcttcctgcctcggcctcccaaagtgctgggattacaggtgtgaaccactgcacctggcctgctgtgcgttatttttcatggttggcacaaagtgaaatttgtaagatttaccttggttcttccaggcacccagtggcaagtactagctgagcatttgggagatgcttgtcttacttggctgttgcttctcctgctgctggggaaaagggtaaggaaacctcttgggaaatgaagcaagttctagatagcgttttggcagaatgggggacactataattagctcatttctgagctgctaacccagaccagatagtctaaccctgcagtgaatgtgaaaaagccttgggatttacctattgaatttattttcctccttaagcccatagggaagctcagaacacttttgggatgacagagctacataattatggtaccattattttcctgttagagatggcctgacgatcctagtcacctatcagttgaaagccattagaaggcttttgacccttaaaagtaggtcaggtgcagtggctcacacctgtaatctcagcactttgggaggcagaggcgggtggatcacctgaggtcgggaatttgagaccagcctgaccaacatggagaaacctcatctctacgaaaaatacaaaattagccagacatggtggcacatgcctgtaatcatagctacttgggaggctgaggcaggaggatcgctcaaacccaggaggcggatgttgtggtgagcccagatcgctccattgcactccagcctgggcaacaagagcgaaactccgtttcaaagagaaaaaaaagggcggggggggtagcaaagcccaataatgagtttattggactggaaatctcctgagaaataagcaatatgaccagggtaccaagaagcttgttggcttgtcagcattgctagcacctgcctgtgctttctagattagcctgtggataatgctagtcataattggtaattttacttttgctagtaaggtagactttgggaggcagtaatttcctaccag

SEQ ID NO: 1329 - DNA, 7124 bp, Homo sapiens
ctggctccttctgattggcttagatgcgcccggagcccttctgattggctaaaatatgccccgagcccttcttgattggaagaagcgcctcggaccccggtccttggcgccgtagtggttaggttgagccctaggcgtgggggagaactggggaaactggaatttcccgcggagctgacagcgcttgcgctccccctactcgttctaattccacgcgctccaaaatatccgccatggagaaatcttggccaggatgtccattctaggcccatcggtgctgtcttgctgaaggttgggtcaggcatctaaagggactgtggtaagggagggtgtgacacaggtgtaagctgccatcgtcatcatgaactttgagggtctggaccctggactggcagaatatgccccagccatgcattctgccctggaccctgtcttggatgcccacctgaacccaagtctgctacagaatgtggagctggacccagagggagtggccttggaggctcttcccgtccaggaatcagtgcacataatggaaggtgtctactctgaattgcacagcgtggtggctgaagtgggtgtacctgtttccgtctcccactttgacttgcacgaggagatgctgtgggtggggagccacgggggccatgccacttcattttttggcccagccttggagcgctactcatcctttcaagtcaatggcagtgatgatattcggcagatccagagcctggagaatggtatcctttttctcaccaagaacaacctcaagtatatggcccgtgggggcctcattatatttgattacctgctggatgagaatgaggatatgcacagtctcctactgactgacagcagcactctactcgttggtgggctgcagaatcacatactagagattgatcttaacactgtccaggagactcagaagtatgcagtagagacgcctggagtcaccatcatgagacagacaaatcgcttcttcttctgcggccacacgtctggcaaggtttccctgagagacctccgtacttttaaggtggaacatgagtttgatgccttctcaggaagtctgtcagactttgatgtgcatggcaacctgctagctgcctgtggcttctccagccgcctcactggcctggcctgcgaccgtttcctcaaggtgtatgatttgcgcatgatgcgtgccatcacaccacttcaagtacatgtggatcctgccttcttgcgcttcattcctacatatacttctcgtcttgctatcatctctcagtcagggcagtgccaattctgtgaacccacaggcctggccaacccagccgatatctttcatgtgaatcctgtggggcctctgctaatgacatttgatgtgtcagccagcaagcaggctctggcctttggggattctgagggctgtgtgcacctctggactgattccccggagccttccttcaacccctactcccgtgagactgagtttgctttgccgtgtctcgtggactcactgcctcctctggactggagccaggacctgctgcctctttccctcatccctgtcccactcaccactgacacacttctctctgattggcctgctgccaactctgctccagctcccaggcgagcaccacccgtggatgcagagattctgcgcaccatgaagaaggtgggcttcattggctatgcgcccaatccccgcaccaggctgcgcaatcagataccctacagactcaaggagtcagacagtgaatttgacagcttcagccaggtcactgagtcaccagtaggacgagaagaggaaccacatctccacatggtttctaagaaataccgcaaggtgaccatcaaatattccaagctagggctggaggactttgacttcaaacactacaataagaccttgtttgctggattagagccccacattcccaacgcctactgtaactgcatgatccaggtgctctatttcctggagcctgtacgctgtctaattcaaaaccacctttgccagaaggagttctgtctggcatgtgagctgggcttcctgtttcacatgttggacctctctcgtggtgacccttgccagggcaataattttcttcgggcattccgtactattcctgaggcctcagccctcggtctaatcctggctgactcagatgaggcctcaggcaagggcaatctggccaggctcattcagaggtggaatcgcttcattctcactcaactgcatcaagatatgcaggagctggaaataccacaggcttatcgaggtgctggaggcagcagcttttgctcatcgggggactctgttattgggcagctcttcagctgtgagatggagaactgcagcctctgccgctgtggcagtgagaccgtgcgagcctcatccactctgcttttcacactctcctaccctgatgataaaactgggaagaactatgactttgctcaggtgctgaagcgaagcatctgcctggaccagaatacacaggcctggtgtgacacctgtgaaaagtaccagcccacgattcagacccgcaacatccgccatctgccagatattcttgtcatcaattgtgaggtgaacagctcaaaagaggctgatttctggagaatgcaggctgaggttgccttcaagatggcagtaaagaaacacggtggggaaatctccaagaacaaggaatttgctttggctgattggaaggaactagggagtccagagggtgtgctggtgtgtccctccattgaggagttgaagaacgtctggcttcctttctccattcgcatgaagatgaccaaaaacaaagggctggatgtttgcaattggactgatggggatgagatgcagtggggcccagccagggcagaggaggagcatggtgtctatgtgtatgacctgatggctactgtggtacacatcctggactcacgcacagggggcagcctggtggctcacatcaaagttggagagacctaccaccagcgcaaggagggcgttactcaccagcagtggtatctgttcaatgactttcttattgaacctattgataagcatgaagctgtgcagtttgacatgaattggaaagtacctgcaatcctttattatgtcaaacggaatctcaattccagatacaacctgaacatcaagaaccctattgaggcaagtgtcttgctggctgaagcctcgctggcacggaagcagcggaaaacacatactacctttattccactgatgctgaatgagatgccacagattggggacctggtgggtctggatgctgagtttgtcacccttaatgaggaggaagcagagttacgcagtgatggtaccaagtctaccattaaaccaagccagatgtcagtagccaggattacctgtgttcggggccagggacccaatgagggtatccccttcattgatgactacatctctacccaggagcaggtggtggattacttgactcaatactcgggtataaagcctggtgacctcgatgccaaaatttcctccaagcacctaacaactctcaagtctacctacttaaagcttcgttttctcattgacattggagtcaagtttgtgggtcatggcctgcagaaggacttccgggtcatcaacctgatggtgcccaaggaccaagtccttgacactgtctacctgttccatatgccccgaaaacgaatgatttccctgcgattccttgcttggtactttctggacctgaagattcaaggggaaacccatgacagtattgaggatgcccgcacagcccttcagctgtaccgaaagtatctggagctaagcaaaaatggcactgagcctgagtctttccacaaggtgctcaagggtctttatgagaagggcagaaagatggactggaaggtgcctgagcctgagggccaaacaagtcccaagaatgcagctgtcttctcctcagtgctggcgctctgactacccttcccaaagaaccacggccctctccctttactgttctatagccccagaactgggagatggcttcctaagttggctataccttgtccacttccagtactggacgtgctcagggtctagggtcacagatggtgctattaattgaactggaacacagcagaattgttgcaaaggttctaggagccagattcattccttcttcattctttgcaaaacagtggtacagacatggagtctagaattgacccagatggaaagtaattggtattcttaatatcctgggtgactaatatccaggcagagaagctcctggaaccataactgtaagttcctagctggctagggattgaagtcctggacagtgacagaggataccacagtagttcaagacttagcacaagtcaccaactgcttcagggatacctggaggggccagcaagtagagtgttggtggcccaagcaaaccagtgttgccaataccattgccaaaagggcctttggatcctggacaaagcttggctgccggcttcatttattcctgctgatggctgagaagcatctgtcttccatcccacttgcctgtcccaagttttgttccattttttaaaaatttgttgtaaactgcatgttttataaaataaaaataaaatatcgtttgttatttatctcattagagaactgctagtgtgggttctctggcttcagtcttcctctccttcctttgaaggtaaaggtccggaatccaaagttatggatatgaaagggtataattaggccgggcgcggtggctcacttctgtaatcctagcactttgggaggcagaggtgggtggaacacgaggtcaggagttaaagaccagcctgaccaagatggtgaaaccccgtctctactaaaaatacaaaaattagctgggagtggtggatggcgactgtaaccctagctgaggcagaaaattgcttcaacccgggaggcggaggttgcagtgagccgagatcacgccactgtatgccagcctgggcgatagggcgagactccgtctcaaaaaaaggggaaaaaggtataatttatgccttttctgggcaatgctgggtctttgctatagctgcccagtaccctaagtcagactgaagatgtacagtatggtttccgttaattgtgtaagccgacaaactacaggtcccaggatagcttgagacttgtagttgctcacaaagatgggtccggtgctgcggtgcttcctgggagatgtagtttcctgtgtattgaaacctggactgctcgctggccggcagcgcaccgttttgaaggtcctagcccacctgggctggctcacgcgcacgactagccgctcccatacagcacgcccggactctgtcgtcgcttaaggccactcctattctacggctgacccctggtggtcacgtggatctgttcgccacgcaagtctgggtccttcggcgattgaccggggtccttgctgttcgggagcctctcctaagctgcctgttcgcgcgagagtttggaggggcgggtttggggtcggtgtctgattggggctcgcaccgcagcacgctggagtcccgcttaggtaccagttagcgtcaggggagctgggtcaggcggtcgccgggacaccccgtgtgtggcaggcggcgaagcgctctggagaatcccggacagccctgctccctgcagccaggtgtagtttcgggagccactggggccaaagtgagagtccagcggtcttccagcgcttgggccacggcggcggccctgggagcagaggtggagcgaccccattacgctaaagatgaaaggctggggttggctggccctgcttctgggggccctgctgggaaccgcctgggctcggaggagccaggatctccactgtggagcatgcagggctctggtggatgaactagaatgggaaattgcccaggtggaccccaagaagaccattcagatgggatctttccggatcaatccagatggcagccagtcagtggtggaggtgccttatgcccgctcagaggcccacctcacagagctgctggaggagatatgtgaccggatgaaggagtatggggaacagattgatccttccacccatcgcaagaactacgtacgtgtagtgggccggaatggagaatccagtgaactggacctacaaggcatccgaatcgactcagatattagcggcaccctcaagtttgcgtgtgagagcattgtggaggaatacgaggatgaactcattgaattcttttcccgagaggctgacaatgttaaagacaaactttgcagtaagcgaacagatctttgtgaccatgccctgcacatatcgcatgatgagctatgaaccactggagcagcccacactggcttgatggatcacccccaggaggggaaaatggtggcaatgccttttatatattatgtttttactgaaattaactgaaaaaatatgaaaccaaaagtacaaactgtgttgtcttttcatgcctggaattgcccttacattaagcttgaagataaggagttatatagacaggaaagataatggaggagaaagaagagttttgggattgatacaggataaagatggagggaccagcaagaacagagacaggaaggggaaaatggatgtgaccaactcagctgaaaagtaagggctttatcggatagggacagacgaggtaaggaaggttgtttaatgagaggccttgcttgccagcctaagcttttaaatttgatgccagtggcaacaataaagtgtatctatcactagccattgtcaatctggactataagtctgtccacaattctgtgtgtagagattccagactggggcatagggatgaaaacctaaaggataccttcttttgggaaattctttttttctttttttttctgagatggagtcccgctctgtcgcctaggctggagtacagtggcgcgatctcggctcactacaagctctgcctcccaggttcacgccattatcctgactcagcctcccgagtagctgggactacaggcgcccgccaccacaccggctaatttttttttttttttttttgtgagacagaagtctcgctctgtcgcccaggctgaagtgcagtggtgcaatctcggcttactgcaacctccacctcctggttca

SEQ ID NO: 1330 - protein, 1186 aa, Homo sapiens
MNFEGLDPGLAEYAPAMHSALDPVLDAHLNPSLLQNVELDPEGVEALPVQESVHIMEGVYSELHSVVAEVGVPVSVSHFDLHEEMLWVGSHGGHATSFFGPALERYSSFQVNGSDDIRQIQSLENGILFLTKNNLKYMRGLIIFDYLLDENEDMHSLLLTDSSTLLVGGLQNHIIDLNTVQETQKYAVETPGVTIMRQTNRFFFCGHTSGKVSLRDLRTFKVEHEFDAFSGSLSDFDVHGNLLAACGFSSRLTGLACDRFLKVYDLRMMRAITPLQVHVDPAFLRFIPTYTSRLAIISQSGQCQFCEPTGLANPADIFHVNPVGPLLMTFDVSASKQAFGDSEGCVHLWTDSPEPSFNPYSRETEFALPCLVDSLPPLDWSQDLLPLSLIPVPLTTDTLLSDWPAANSAPAPRRAPPVDAEILRTMKKVGFIGYAPNPRTRLRNQIPYRLKESDSEFDSFSQVTESPVGREEEPHLHMVSKKYRKVTIKYSKLGLEDFDFKHYNKTLFAGLEPHIPNAYCNCMIQVLYFLEPVRCLIQNHLCQKEFCLACELGFLFHMLDLSRGDPCQGNNFLRAFRTIPEASALGLILADSDEASGKGNLARLIQRWNRFILTQLHQDMQELEIPQAYRGAGGSSFCSSGDSVIGQLFSCEMENCSLCRCGSETVRASSTLLFTLSYPDDKTGKNYDFAQVLKRSICLDQNTQAWCDTCEKYQPTIQTRNIRHLPDILVINCEVNSSKEADFWRMQAEVAFKMAVKKHGGEISKNKEFADWKELGSPEGVLVCPSIEELKNVWLPFSIRMKMTKNKGLDVCNWTDGDEMQWGPARAEEEHGVYVYDLMATVVHILDSRTGGSLVAHIKVGETYHQRKEGVTHQQWYLFNDFLIEPIDKHEAVQFDMNWKVPAILYYVKRNLNSRYNLNIKNPIEASVLLAEASLARKQRKTHTTFIPLMLNEMPQIGDLVGLDAEFVTLNEEEAELRSDGTKSTIKPSQMSVARITCVRGQGPNEGIPFIDDYISTQEQVVDYLTQYSGIKPGDLDAKISSKHLTTLKSTYLKLRFLIDIGVKFVGHGLQKDFRVINLMVPKDQVLDTVYLFHMPRKRMISLRFLAWYFLDLKIQGETHDSIEDARTALQLYRKYLELSKNGTEPESFHKVLKGEKGRKMDWKVPEPEGQTSPKNAAVFSSVLAL

SEQ ID NO: 1331 - DNA, 2639 bp, Homo sapiens
atgcagctgtcttctcctcagtgctggcgctctgactacccttcccaaagaaccacggccctctccctttactgttctatagccccagaactgggagatggcttcctaagttggctataccttgtccacttccagtactggacgtgctcagggtctagggtcacagatggtgctattaattgaactggaacacagcagaattgttgcaaaggttctaggagccagattcattccttcttcattctttgcaaaacagtggtacagacatggagtctagaattgacccagatggaaagtaattggtattcttaatatcctgggtgactaatatccaggcagagaagctcctggaaccataactgtaagttcctagctggctagggattgaagtcctggacagtgacagaggataccacagtagttcaagacttagcacaagtcaccaactgcttcagggatacctggaggggccagcaagtagagtgttggtggcccaagcaaaccagtgttgccaataccattgccaaaagggcctttggatcctggacaaagcttggctgccggcttcatttattcctgctgatggctgagaagcatctgtcttccatcccacttgcctgtcccaagttttgttccattttttaaaaatttgttgtaaactgcatgttttataaaataaaaataaaatatcgtttgttatttatctcattagagaactgctagtgtgggttctctggcttcagtcttcctctccttcctttgaaggtaaaggtccggaatccaaagttatggatatgaaagggtataattaggccgggcgcggtggctcacttctgtaatcctagcactttgggaggcagaggtgggtggaacacgaggtcaggagttaaagaccagcctgaccaagatggtgaaaccccgtctctactaaaaatacaaaaattagctgggagtggtggatggcgactgtaaccctagctgaggcagaaaattgcttcaacccgggaggcggaggttgcagtgagccgagatcacgccactgtatgccagcctgggcgatagggcgagactccgtctcaaaaaaaggggaaaaaggtataatttatgccttttctgggcaatgctgggtctttgctatagctgcccagtaccctaagtcagactgaagatgtacagtatggtttccgttaattgtgtaagccgacaaactacaggtcccaggatagcttgagacttgtagttgctcacaaagatgggtccggtgctgcggtgcttcctgggagatgtagtttcctgtgtattgaaacctggactgctcgctggccggcagcgcaccgttttgaaggtcctagcccacctgggctggctcacgcgcacgactagccgctcccatacagcacgcccggactctgtcgtcgcttaaggccactcctattctacggctgacccctggtggtcacgtggatctgttcgccacgcaagtctgggtccttcggcgattgaccggggtccttgctgttcgggagcctctcctaagctgcctgttcgcgcgagagtttggaggggcgggtttggggtcggtgtctgattggggctcgcaccgcagcacgctggagtcccgcttaggtaccagttagcgtcaggggagctgggtcaggcggtcgccgggacaccccgtgtgtggcaggcggcgaagcgctctggagaatcccggacagccctgctccctgcagccaggtgtagtttcgggagccactggggccaaagtgagagtccagcggtcttccagcgcttgggccacggcggcggccctgggagcagaggtggagcgaccccattacgctaaagatgaaaggctggggttggctggccctgcttctgggggccctgctgggaaccgcctgggctcggaggagccaggatctccactgtggagcatgcagggctctggtggatgaactagaatgggaaattgcccaggtggaccccaagaagaccattcagatgggatctttccggatcaatccagatggcagccagtcagtggtggaggtgccttatgcccgctcagaggcccacctcacagagctgctggaggagatatgtgaccggatgaaggagtatggggaacagattgatccttccacccatcgcaagaactacgtacgtgtagtgggccggaatggagaatccagtgaactggacctacaaggcatccgaatcgactcagatattagcggcaccctcaagtttgcgtgtgagagcattgtggaggaatacgaggatgaactcattgaattcttttcccgagaggctgacaatgttaaagacaaactttgcagtaagcgaacagatctttgtgaccatgccctgcacatatcgcatgatgagctatgaaccactggagcagcccacactggcttgatggatcacccccaggaggggaaaatggtggcaatgccttttatatattatgtttttactgaaattaactgaaaaaatatgaaaccaaaagtacaaactgtgttgtcttttcatgcctggaattgcccttacattaagcttgaagataaggagttatatagacaggaaagataatggaggagaaagaagagttttgggattgatacaggataaag

SEQ ID NO: 1332 - protein, 178 aa, Homo sapiens
MKGWGWLALLLGALLGTAWARRSQDLHCGACRALVDELEWEIAQVDPKKTIQMGSFRINPDGSQSVVEVPYARSEAHLTELLEEICDRMKEYGEQIDPSTKNYVRVVGRNGESSELDLQGIRIDSDISGTLKFACESIVEEYEDELIEFFSREADNVKDKLCSKRTDLCDHALHHDEL

SEQ ID NO: 1333 - DNA, 7259 bp, Homo sapiens
ctggctccttctgattggcttagatgcgcccggagcccttctgattggctaaaatatgccccgagcccttcttgattggaagaagcgcctcggaccccggtccttggcgccgtagtggttaggttgagccctaggcgtgggggagaactggggaaactggaatttcccgcggagctgacagcgcttgcgctccccctactcgttctaattccacgcgctccaaaatatccgccatggagaaatcttggccaggatgtccattctaggcccatcggtgctgtcttgctgaaggttgggtcaggcatctaaagggactgtggtaagggagggtgtgacacaggtgtaagctgccatcgtcatcatgaactttgagggtctggaccctggactggcagaatatgccccagccatgcattctgccctggaccctgtcttggatgcccacctgaacccaagtctgctacagaatgtggagctggacccagagggagtggccttggaggctcttcccgtccaggaatcagtgcacataatggaaggtgtctactctgaattgcacagcgtggtggctgaagtgggtgtacctgtttccgtctcccactttgacttgcacgaggagatgctgtgggtggggagccacgggggccatgccacttcattttttggcccagccttggagcgctactcatcctttcaagtcaatggcagtgatgatattcggcagatccagagcctggagaatggtatcctttttctcaccaagaacaacctcaagtatatggcccgtgggggcctcattatatttgattacctgctggatgagaatgaggatatgcacagtctcctactgactgacagcagcactctactcgttggtgggctgcagaatcacatactagagattgatcttaacactgtccaggagactcagaagtatgcagtagagacgcctggagtcaccatcatgagacagacaaatcgcttcttcttctgcggccacacgtctggcaaggtttccctgagagacctccgtacttttaaggtggaacatgagtttgatgccttctcaggaagtctgtcagactttgatgtgcatggcaacctgctagctgcctgtggcttctccagccgcctcactggcctggcctgcgaccgtttcctcaaggtgtatgatttgcgcatgatgcgtgccatcacaccacttcaagtacatgtggatcctgccttcttgcgcttcattcctacatatacttctcgtcttgctatcatctctcagtcagggcagtgccaattctgtgaacccacaggcctggccaacccagccgatatctttcatgtgaatcctgtggggcctctgctaatgacatttgatgtgtcagccagcaagcaggctctggcctttggggattctgagggctgtgtgcacctctggactgattccccggagccttccttcaacccctactcccgtgagactgagtttgctttgccgtgtctcgtggactcactgcctcctctggactggagccaggacctgctgcctctttccctcatccctgtcccactcaccactgacacacttctctctgattggcctgctgccaactctgctccagctcccaggcgagcaccacccgtggatgcagagattctgcgcaccatgaagaaggtgggcttcattggctatgcgcccaatccccgcaccaggctgcgcaatcagataccctacagactcaaggagtcagacagtgaatttgacagcttcagccaggtcactgagtcaccagtaggacgagaagaggaaccacatctccacatggtttctaagaaataccgcaaggtgaccatcaaatattccaagctagggctggaggactttgacttcaaacactacaataagaccttgtttgctggattagagccccacattcccaacgcctactgtaactgcatgatccaggtgctctatttcctggagcctgtacgctgtctaattcaaaaccacctttgccagaaggagttctgtctggcatgtgagctgggcttcctgtttcacatgttggacctctctcgtggtgacccttgccagggcaataattttcttcgggcattccgtactattcctgaggcctcagccctcggtctaatcctggctgactcagatgaggcctcaggcaagggcaatctggccaggctcattcagaggtggaatcgcttcattctcactcaactgcatcaagatatgcaggagctggaaataccacaggcttatcgaggtgctggaggcagcttttgctcatcgggggactctgttattgggcagctcttcagctgtgagatggagaactgcagcctctgccgctgtggcagtgagaccgtgcgagcctcatccactctgcttttcacactctcctaccctgatggtagcaaaagtgataaaactgggaagaactatgactttgctcaggtgctgaagcgaagcatctgcctggaccagaatacacaggcctggtgtgacacctgtgaaaagtaccagcccacgattcagacccgcaacatccgccatctgccagatattcttgtcatcaattgtgaggtgaacagctcaaaagaggctgatttctggagaatgcaggctgaggttgccttcaagatggcagtaaagaaacacggtggggaaatctccaagaacaaggaatttgctttggctgattggaaggaactagggagtccagagggtgtgctggtgtgtccctccattgaggagttgaagaacgtctggcttcctttctccattcgcatgaagatgaccaaaaacaaagggctggatgtttgcaattggactgatggggatgagatgcagtggggcccagccagggcagaggaggagcatggtgtctatgtgtatgacctgatggctactgtggtacacatcctggactcacgcacagggggcagcctggtggctcacatcaaagttggagagacctaccaccagcgcaaggagggcgttactcaccagcagtggtatctgttcaatgactttcttattgaacctattgataagcatgaagctgtgcagtttgacatgaattggaaagtacctgcaatcctttattatgtcaaacggaatctcaattccagatacaacctgaacatcaagaaccctattgaggcaagtgtcttgctggctgaagcctcgctggcacggaagcagcggaaaacacatactacctttattccactgatgctgaatgagatgccacagattggggacctggtgggtctggatgctgagtttgtcacccttaatgaggaggaagcagagttacgcagtgatggtaccaagtctaccattaaaccaagccagatgtcagtagccaggattacctgtgttcggggccagggacccaatgagggtatccccttcattgatgactacatctctacccaggagcaggtggtggattacttgactcaatactcgggtataaagcctggtgacctcgatgccaaaatttcctccaagcacctaacaactctcaagtctacctacttaaagcttcgttttctcattgacattggagtcaagtttgtgggtcatggcctgcagaaggacttccgggtcatcaacctgatggtttggcagggctcttttaagagtcttcttgtgagagtgggcccctcagggtatacattgtgcctttagagaatggggaattataggtcccctaccttaagtctccccctcttttatccttgccaggtgcccaaggaccaagtccttgacactgtctacctgttccatatgccccgaaaacgaatgatttccctgcgattccttgcttggtactttctggacctgaagattcaaggggaaacccatgacagtattgaggatgcccgcacagcccttcagctgtaccgaaagtatctggagctaagcaaaaatggcactgagcctgagtctttccacaaggtgctcaagggtctttatgagaagggcagaaagatggactggaaggtgcctgagcctgagggccaaacaagtcccaagaatgcagctgtcttctcctcagtgctggcgctctgactacccttcccaaagaaccacggccctctccctttactgttctatagccccagaactgggagatggcttcctaagttggctataccttgtccacttccagtactggacgtgctcagggtctagggtcacagatggtgctattaattgaactggaacacagcagaattgttgcaaaggttctaggagccagattcattccttcttcattctttgcaaaacagtggtacagacatggagtctagaattgacccagatggaaagtaattggtattcttaatatcctgggtgactaatatccaggcagagaagctcctggaaccataactgtaagttcctagctggctagggattgaagtcctggacagtgacagaggataccacagtagttcaagacttagcacaagtcaccaactgcttcagggatacctggaggggccagcaagtagagtgttggtggcccaagcaaaccagtgttgccaataccattgccaaaagggcctttggatcctggacaaagcttggctgccggcttcatttattcctgctgatggctgagaagcatctgtcttccatcccacttgcctgtcccaagttttgttccattttttaaaaatttgttgtaaactgcatgttttataaaataaaaataaaatatcgtttgttatttatctcattagagaactgctagtgtgggttctctggcttcagtcttcctctccttcctttgaaggtaaaggtccggaatccaaagttatggatatgaaagggtataattaggccgggcgcggtggctcacttctgtaatcctagcactttgggaggcagaggtgggtggaacacgaggtcaggagttaaagaccagcctgaccaagatggtgaaaccccgtctctactaaaaatacaaaaattagctgggagtggtggatggcgactgtaaccctagctgaggcagaaaattgcttcaacccgggaggcggaggttgcagtgagccgagatcacgccactgtatgccagcctgggcgatagggcgagactccgtctcaaaaaaaggggaaaaaggtataatttatgccttttctgggcaatgctgggtctttgctatagctgcccagtaccctaagtcagactgaagatgtacagtatggtttccgttaattgtgtaagccgacaaactacaggtcccaggatagcttgagacttgtagttgctcacaaagatgggtccggtgctgcggtgcttcctgggagatgtagtttcctgtgtattgaaacctggactgctcgctggccggcagcgcaccgttttgaaggtcctagcccacctgggctggctcacgcgcacgactagccgctcccatacagcacgcccggactctgtcgtcgcttaaggccactcctattctacggctgacccctggtggtcacgtggatctgttcgccacgcaagtctgggtccttcggcgattgaccggggtccttgctgttcgggagcctctcctaagctgcctgttcgcgcgagagtttggaggggcgggtttggggtcggtgtctgattggggctcgcaccgcagcacgctggagtcccgcttaggtaccagttagcgtcaggggagctgggtcaggcggtcgccgggacaccccgtgtgtggcaggcggcgaagcgctctggagaatcccggacagccctgctccctgcagccaggtgtagtttcgggagccactggggccaaagtgagagtccagcggtcttccagcgcttgggccacggcggcggccctgggagcagaggtggagcgaccccattacgctaaagatgaaaggctggggttggctggccctgcttctgggggccctgctgggaaccgcctgggctcggaggagccaggatctccactgtggagcatgcagggctctggtggatgaactagaatgggaaattgcccaggtggaccccaagaagaccattcagatgggatctttccggatcaatccagatggcagccagtcagtggtggaggtgccttatgcccgctcagaggcccacctcacagagctgctggaggagatatgtgaccggatgaaggagtatggggaacagattgatccttccacccatcgcaagaactacgtacgtgtagtgggccggaatggagaatccagtgaactggacctacaaggcatccgaatcgactcagatattagcggcaccctcaagtttgcgtgtgagagcattgtggaggaatacgaggatgaactcattgaattcttttcccgagaggctgacaatgttaaagacaaactttgcagtaagcgaacagatctttgtgaccatgccctgcacatatcgcatgatgagctatgaaccactggagcagcccacactggcttgatggatcacccccaggaggggaaaatggtggcaatgccttttatatattatgtttttactgaaattaactgaaaaaatatgaaaccaaaagtacaaactgtgttgtcttttcatgcctggaattgcccttacattaagcttgaagataaggagttatatagacaggaaagataatggaggagaaagaagagttttgggattgatacaggataaagatggagggaccagcaagaacagagacaggaaggggaaaatggatgtgaccaactcagctgaaaagtaagggctttatcggatagggacagacgaggtaaggaaggttgtttaatgagaggccttgcttgccagcctaagcttttaaatttgatgccagtggcaacaataaagtgtatctatcactagccattgtcaatctggactataagtctgtccacaattctgtgtgtagagattccagactggggcatagggatgaaaacctaaaggataccttcttttgggaaattctttttttctttttttttctgagatggagtcccgctctgtcgcctaggctggagtacagtggcgcgatctcggctcactacaagctctgcctcccaggttcacgccattatcctgactcagcctcccgagtagctgggactacaggcgcccgccaccacaccggctaatttttttttttttttttttgtgagacagaagtctcgctctgtcgcccaggctgaagtgcagtggtgcaatctcggcttactgcaacctccacctcctggttca

SEQ ID NO: 1334 - protein, 1105 aa, Homo sapiens
MNFEGLDPGLAEYAPAMHSALDPVLDAHLNPSLLQNVELDPEGVEALPVQESVHIMEGVYSELHSVVAEVGVPVSVSHFDLHEEMLWVGSHGGHATSFFGPALERYSSFQVNGSDDIRQIQSLENGILFLTKNNLKYMRGLIIFDYLLDENEDMHSLLLTDSSTLLVGGLQNHIIDLNTVQETQKYAVETPGVTIMRQTNRFFFCGHTSGKVSLRDLRTFKVEHEFDAFSGSLSDFDVHGNLLAACGFSSRLTGLACDRFLKVYDLRMMRAITPLQVHVDPAFLRFIPTYTSRLAIISQSGQCQFCEPTGLANPADIFHVNPVGPLLMTFDVSASKQAFGDSEGCVHLWTDSPEPSFNPYSRETEFALPCLVDSLPPLDWSQDLLPLSLIPVPLTTDTLLSDWPAANSAPAPRRAPPVDAEILRTMKKVGFIGYAPNPRTRLRNQIPYRLKESDSEFDSFSQVTESPVGREEEPHLHMVSKKYRKVTIKYSKLGLEDFDFKHYNKTLFAGLEPHIPNAYCNCMIQVLYFLEPVRCLIQNHLCQKEFCLACELGFLFHMLDLSRGDPCQGNNFLRAFRTIPEASALGLILADSDEASGKGNLARLIQRWNRFILTQLHQDMQELEIPQAYRGAGGSFCSSGDSVIGQLFSCEMENCSLCRCGSETVRASSTLLFTLSYPDGSKSDKTGKNYDFAQVLKRSICLDQNTQAWCDTCEKYQPTIQTRNIRHLPDILVINCEVNSSKEADFWRMQAEVAFKMAVKKHGGEISKNKEFADWKELGSPEGVLVCPSIEELKNVWLPFSIRMKMTKNKGLDVCNWTDGDEMQWGPARAEEEHGVYVYDLMATVVHILDSRTGGSLVAHIKVGETYHQRKEGVTHQQWYLFNDFLIEPIDKHEAVQFDMNWKVPAILYYVKRNLNSRYNLNIKNPIEASVLLAEASLARKQRKTHTTFIPLMLNEMPQIGDLVGLDAEFVTLNEEEAELRSDGTKSTIKPSQMSVARITCVRGQGPNEGIPFIDDYISTQEQVVDYLTQYSGIKPGDLDAKISSKHLTTLKSTYLKLRFLIDIGVKFVGHGLQKDFRVINLMVWQGSFKSLLVRVGPSGYTLCL

SEQ ID NO: 1335 - DNA, 7166 bp, Homo sapiens
ctggctccttctgattggcttagatgcgcccggagcccttctgattggctaaaatatgccccgagcccttcttgattggaagaagcgcctcggaccccggtccttggcgccgtagtggttaggttgagccctaggcgtgggggagaactggggaaactggaatttcccgcggagctgacagcgcttgcgctccccctactcgttctaattccacgcgctccaaaatatccgccatggagaaatcttggccaggatgtccattctaggcccatcggtgctgtcttgctgaaggttgggtcaggcatctaaagggactgtggtaagggagggtgtgacacaggtgtaagctgccatcgtcatcatgaactttgagggtctggaccctggactggcagaatatgccccagccatgcattctgccctggaccctgtcttggatgcccacctgaacccaagtctgctacagaatgtggagctggacccagagggagtggccttggaggctcttcccgtccaggaatcagtgcacataatggaaggtgtctactctgaattgcacagcgtggtggctgaagtgggtgtacctgtttccgtctcccactttgacttgcacgaggagatgctgtgggtggggagccacgggggccatgccacttcattttttggcccagccttggagcgctactcatcctttcaagtcaatggcagtgatgatattcggcagatccagagcctggagaatggtatcctttttctcaccaagaacaacctcaagtatatggcccgtgggggcctcattatatttgattacctgctggatgagaatgaggatatgcacagtctcctactgactgacagcagcactctactcgttggtgggctgcagaatcacatactagagattgatcttaacactgtccaggagactcagaagtatgcagtagagacgcctggagtcaccatcatgagacagacaaatcgcttcttcttctgcggccacacgtctggcaaggtttccctgagagacctccgtacttttaaggtggaacatgagtttgatgccttctcaggaagtctgtcagactttgatgtgcatggcaacctgctagctgcctgtggcttctccagccgcctcactggcctggcctgcgaccgtttcctcaaggtgtatgatttgcgcatgatgcgtgccatcacaccacttcaagtacatgtggatcctgccttcttgcgcttcattcctacatatacttctcgtcttgctatcatctctcagtcagggcagtgccaattctgtgaacccacaggcctggccaacccagccgatatctttcatgtgaatcctgtggggcctctgctaatgacatttgatgtgtcagccagcaagcaggctctggcctttggggattctgagggctgtgtgcacctctggactgattccccggagccttccttcaacccctactcccgtgagactgagtttgctttgccgtgtctcgtggactcactgcctcctctggactggagccaggacctgctgcctctttccctcatccctgtcccactcaccactgacacacttctctctgattggcctgctgccaactctgctccagctcccaggcgagcaccacccgtggatgcagagattctgcgcaccatgaagaaggtgggcttcattggctatgcgcccaatccccgcaccaggctgcgcaatcagataccctacagactcaaggagtcagacagtgaatttgacagcttcagccaggtcactgagtcaccagtaggacgagaagaggaaccacatctccacatggtttctaagaaataccgcaaggtgaccatcaaatattccaagctagggctggaggactttgacttcaaacactacaataagaccttgtttgctggattagagccccacattcccaacgcctactgtaactgcatgatccaggtgctctatttcctggagcctgtacgctgtctaattcaaaaccacctttgccagaaggagttctgtctggcatgtgagctgggcttcctgtttcacatgttggacctctctcgtggtgacccttgccagggcaataattttcttcgggcattccgtactattcctgaggcctcagccctcggtctaatcctggctgactcagatgaggcctcaggcaagggcaatctggccaggctcattcagaggtggaatcgcttcattctcactcaactgcatcaagatatgcaggagctggaaataccacaggcttatcgaggtgctggaggcagcagcttttgctcatcgggggactctgttattgggcagctcttcagctgtgagatggagaactgcagcctctgccgctgtggcagtgagaccgtgcgagcctcatccactctgcttttcacactctcctaccctgatggtagcaaaagtgataaaactgggaagaactatgactttgctcaggtgctgaagcgaagcatctgcctggaccagaatacacaggcctggtgtgacacctgtgaaaagtaccagcccacgattcagacccgcaacatccgccatctgccagatattcttgtcatcaattgtgaggtgaacagctcaaaagaggctgatttctggagaatgcaggctgaggttgccttcaagatggcagtaaagaaacacggtggggaaatctccaagaacaaggaatttgctttggctgattggaaggaactagggagtccagagggtgtgctggtgtgtccctccattgaggagttgaagaacgtctggcttcctttctccattcgcatgaagatgaccaaaaacaaagggctggatgtttgcaattggactgatggggatgagatgcagtggggcccagccagggcagaggaggagcatggtgtctatgtgtatgacctgatggctactgtggtacacatcctggactcacgcacagggggcagcctggtggctcacatcaaagttggagagacctaccaccagcgcaaggagggcgttactcaccagcagtggtatctgttcaatgactttcttattgaacctattgataagcatgaagctgtgcagtttgacatgaattggaaagtacctgcaatcctttattatgtcaaacggaatctcaattccagatacaacctgaacatcaagaaccctattgaggcaagtgtcttgctggctgaagcctcgctggcacggaagcagcggaaaacacatactacctttattccactgatgctgaatgagatgccacagattggggacctggtgggtctggatgctgagtttgtcacccttaatgaggaggaagcagagttacgcagtgatggtaccaagtctaccattaaaccaagccagatgtcagtagccaggattacctgtgttcggggccagggacccaatgagggtatccccttcattgatgactacatctctacccaggagcaggtggtggattacttgactcaatactcgggtataaagcctggtgacctcgatgccaaaatttcctccaagcacctaacaactctcaagtctacctacttaaagcttcgttttctcattgacattggagtcaagtttgtgggtcatggcctgcagaaggacttccgggtcatcaacctgatggtttggcagggctcttttaagagtcttcttgtgcccaaggaccaagtccttgacactgtctacctgttccatatgccccgaaaacgaatgatttccctgcgattccttgcttggtactttctggacctgaagattcaaggggaaacccatgacagtattgaggatgcccgcacagcccttcagctgtaccgaaagtatctggagctaagcaaaaatggcactgagcctgagtctttccacaaggtgctcaagggtctttatgagaagggcagaaagatggactggaaggtgcctgagcctgagggccaaacaagtcccaagaatgcagctgtcttctcctcagtgctggcgctctgactacccttcccaaagaaccacggccctctccctttactgttctatagccccagaactgggagatggcttcctaagttggctataccttgtccacttccagtactggacgtgctcagggtctagggtcacagatggtgctattaattgaactggaacacagcagaattgttgcaaaggttctaggagccagattcattccttcttcattctttgcaaaacagtggtacagacatggagtctagaattgacccagatggaaagtaattggtattcttaatatcctgggtgactaatatccaggcagagaagctcctggaaccataactgtaagttcctagctggctagggattgaagtcctggacagtgacagaggataccacagtagttcaagacttagcacaagtcaccaactgcttcagggatacctggaggggccagcaagtagagtgttggtggcccaagcaaaccagtgttgccaataccattgccaaaagggcctttggatcctggacaaagcttggctgccggcttcatttattcctgctgatggctgagaagcatctgtcttccatcccacttgcctgtcccaagttttgttccattttttaaaaatttgttgtaaactgcatgttttataaaataaaaataaaatatcgtttgttatttatctcattagagaactgctagtgtgggttctctggcttcagtcttcctctccttcctttgaaggtaaaggtccggaatccaaagttatggatatgaaagggtataattaggccgggcgcggtggctcacttctgtaatcctagcactttgggaggcagaggtgggtggaacacgaggtcaggagttaaagaccagcctgaccaagatggtgaaaccccgtctctactaaaaatacaaaaattagctgggagtggtggatggcgactgtaaccctagctgaggcagaaaattgcttcaacccgggaggcggaggttgcagtgagccgagatcacgccactgtatgccagcctgggcgatagggcgagactccgtctcaaaaaaaggggaaaaaggtataatttatgccttttctgggcaatgctgggtctttgctatagctgcccagtaccctaagtcagactgaagatgtacagtatggtttccgttaattgtgtaagccgacaaactacaggtcccaggatagcttgagacttgtagttgctcacaaagatgggtccggtgctgcggtgcttcctgggagatgtagtttcctgtgtattgaaacctggactgctcgctggccggcagcgcaccgttttgaaggtcctagcccacctgggctggctcacgcgcacgactagccgctcccatacagcacgcccggactctgtcgtcgcttaaggccactcctattctacggctgacccctggtggtcacgtggatctgttcgccacgcaagtctgggtccttcggcgattgaccggggtccttgctgttcgggagcctctcctaagctgcctgttcgcgcgagagtttggaggggcgggtttggggtcggtgtctgattggggctcgcaccgcagcacgctggagtcccgcttaggtaccagttagcgtcaggggagctgggtcaggcggtcgccgggacaccccgtgtgtggcaggcggcgaagcgctctggagaatcccggacagccctgctccctgcagccaggtgtagtttcgggagccactggggccaaagtgagagtccagcggtcttccagcgcttgggccacggcggcggccctgggagcagaggtggagcgaccccattacgctaaagatgaaaggctggggttggctggccctgcttctgggggccctgctgggaaccgcctgggctcggaggagccaggatctccactgtggagcatgcagggctctggtggatgaactagaatgggaaattgcccaggtggaccccaagaagaccattcagatgggatctttccggatcaatccagatggcagccagtcagtggtggaggtgccttatgcccgctcagaggcccacctcacagagctgctggaggagatatgtgaccggatgaaggagtatggggaacagattgatccttccacccatcgcaagaactacgtacgtgtagtgggccggaatggagaatccagtgaactggacctacaaggcatccgaatcgactcagatattagcggcaccctcaagtttgcgtgtgagagcattgtggaggaatacgaggatgaactcattgaattcttttcccgagaggctgacaatgttaaagacaaactttgcagtaagcgaacagatctttgtgaccatgccctgcacatatcgcatgatgagctatgaaccactggagcagcccacactggcttgatggatcacccccaggaggggaaaatggtggcaatgccttttatatattatgtttttactgaaattaactgaaaaaatatgaaaccaaaagtacaaactgtgttgtcttttcatgcctggaattgcccttacattaagcttgaagataaggagttatatagacaggaaagataatggaggagaaagaagagttttgggattgatacaggataaagatggagggaccagcaagaacagagacaggaaggggaaaatggatgtgaccaactcagctgaaaagtaagggctttatcggatagggacagacgaggtaaggaaggttgtttaatgagaggccttgcttgccagcctaagcttttaaatttgatgccagtggcaacaataaagtgtatctatcactagccattgtcaatctggactataagtctgtccacaattctgtgtgtagagattccagactggggcatagggatgaaaacctaaaggataccttcttttgggaaattctttttttctttttttttctgagatggagtcccgctctgtcgcctaggctggagtacagtggcgcgatctcggctcactacaagctctgcctcccaggttcacgccattatcctgactcagcctcccgagtagctgggactacaggcgcccgccaccacaccggctaatttttttttttttttttttgtgagacagaagtctcgctctgtcgcccaggctgaagtgcagtggtgcaatctcggcttactgcaacctccacctcctggttca

SEQ ID NO: 1336 - protein, 1200 aa, Homo sapiens
MNFEGLDPGLAEYAPAMHSALDPVLDAHLNPSLLQNVELDPEGVEALPVQESVHIMEGVYSELHSVVAEVGVPVSVSHFDLHEEMLWVGSHGGHATSFFGPALERYSSFQVNGSDDIRQIQSLENGILFLTKNNLKYMRGLIIFDYLLDENEDMHSLLLTDSSTLLVGGLQNHIIDLNTVQETQKYAVETPGVTIMRQTNRFFFCGHTSGKVSLRDLRTFKVEHEFDAFSGSLSDFDVHGNLLAACGFSSRLTGLACDRFLKVYDLRMMRAITPLQVHVDPAFLRFIPTYTSRLAIISQSGQCQFCEPTGLANPADIFHVNPVGPLLMTFDVSASKQAFGDSEGCVHLWTDSPEPSFNPYSRETEFALPCLVDSLPPLDWSQDLLPLSLIPVPLTTDTLLSDWPAANSAPAPRRAPPVDAEILRTMKKVGFIGYAPNPRTRLRNQIPYRLKESDSEFDSFSQVTESPVGREEEPHLHMVSKKYRKVTIKYSKLGLEDFDFKHYNKTLFAGLEPHIPNAYCNCMIQVLYFLEPVRCLIQNHLCQKEFCLACELGFLFHMLDLSRGDPCQGNNFLRAFRTIPEASALGLILADSDEASGKGNLARLIQRWNRFILTQLHQDMQELEIPQAYRGAGGSSFCSSGDSVIGQLFSCEMENCSLCRCGSETVRASSTLLFTLSYPDGSKSDKTGKNYDFAQVLKRSICLDQNTQAWCDTCEKYQPTIQTRNIRHLPDILVINCEVNSSKEADFWRMQAEVAFKMAVKKHGGEISKNKEFADWKELGSPEGVLVCPSIEELKNVWLPFSIRMKMTKNKGLDVCNWTDGDEMQWGPARAEEEHGVYVYDLMATVVHILDSRTGGSLVAHIKVGETYHQRKEGVTHQQWYLFNDFLIEPIDKHEAVQFDMNWKVPAILYYVKRNLNSRYNLNIKNPIEASVLLAEASLARKQRKTHTTFIPLMLNEMPQIGDLVGLDAEFVTLNEEEAELRSDGTKSTIKPSQMSVARITCVRGQGPNEGIPFIDDYISTQEQVVDYLTQYSGIKPGDLDAKISSKHLTTLKSTYLKLRFLIDIGVKFVGHGLQKDFRVINLMVWQGSFKSLLVPKDQVLDTVYLFHMPRKRMISLRFLAWYFLDLKIQGETHDSIEDARTALQLYRKYLELSKNGTEPESFHKVLKGEKGRKMDWKVPEPEGQTSPKNAAVFSSVLAL

SEQ ID NO: 1337 - DNA, 3851 bp, Homo sapiens
ctggctccttctgattggcttagatgcgcccggagcccttctgattggctaaaatatgccccgagcccttcttgattggaagaagcgcctcggaccccggtccttggcgccgtagtggttaggttgagccctaggcgtgggggagaactggggaaactggaatttcccgcggagctgacagcgcttgcgctccccctactcgttctaattccacgcgctccaaaatatccgccatggagaaatcttggccaggatgtccattctaggcccatcggtgctgtcttgctgaaggttgggtcaggcatctaaagggactgtggtaagggagggtgtgacacaggtgtaagctgccatcgtcatcatgaactttgagggtctggaccctggactggcagaatatgccccagccatgcattctgccctggaccctgtcttggatgcccacctgaacccaagtctgctacagaatgtggagctggacccagagggagtggccttggaggctcttcccgtccaggaatcagtgcacataatggaaggtgtctactctgaattgcacagcgtggtggctgaagtgggtgtacctgtttccgtctcccactttgacttgcacgaggagatgctgtgggtggggagccacgggggccatgccacttcattttttggcccagccttggagcgctactcatcctttcaagtcaatggcagtgatgatattcggcagatccagagcctggagaatggtatcctttttctcaccaagaacaacctcaagtatatggcccgtgggggcctcattatatttgattacctgctggatgagaatgaggatatgcacagtctcctactgactgacagcagcactctactcgttggtgggctgcagaatcacatactagagattgatcttaacactgtccaggagactcagaagtatgcagtagagacgcctggagtcaccatcatgagacagacaaatcgcttcttcttctgcggccacacgtctggcaaggtttccctgagagacctccgtacttttaaggtggaacatgagtttgatgccttctcaggaagtctgtcagactttgatgtgcatggcaacctgctagctgcctgtggcttctccagccgcctcactggcctggcctgcgaccgtttcctcaaggtgtatgatttgcgcatgatgcgtgccatcacaccacttcaagtacatgtggatcctgccttcttgcgcttcattcctacatatacttctcgtcttgctatcatctctcagtcagggcagtgccaattctgtgaacccacaggcctggccaacccagccgatatctttcatgtgaatcctgtggggcctctgctaatgacatttgatgtgtcagccagcaagcaggctctggcctttggggattctgagggctgtgtgcacctctggactgattccccggagccttccttcaacccctactcccgtgagactgagtttgctttgccgtgtctcgtggactcactgcctcctctggactggagccaggacctgctgcctctttccctcatccctgtcccactcaccactgacacacttctctctgattggcctgctgccaactctgctccagctcccaggcgagcaccacccgtggatgcagagattctgcgcaccatgaagaaggtgggcttcattggctatgcgcccaatccccgcaccaggctgcgcaatcagataccctacagactcaaggagtcagacagtgaatttgacagcttcagccaggtcactgagtcaccagtaggacgagaagaggaaccacatctccacatggtttctaagaaataccgcaaggtgaccatcaaatattccaagctagggctggaggactttgacttcaaacactacaataagaccttgtttgctggattagagccccacattcccaacgcctactgtaactgcatgatccaggtgctctatttcctggagcctgtacgctgtctaattcaaaaccacctttgccagaaggagttctgtctggcatgtgagctgggcttcctgtttcacatgttggacctctctcgtggtgacccttgccagggcaataattttcttcgggcattccgtactattcctgaggcctcagccctcggtctaatcctggctgactcagatgaggcctcaggcaagggcaatctggccaggctcattcagaggtggaatcgcttcattctcactcaactgcatcaagatatgcaggagctggaaataccacaggcttatcgaggtgctggaggcagcagcttttgctcatcgggggactctgttattgggcagctcttcagctgtgagatggagaactgcagcctctgccgctgtggcagtgagaccgtgcgagcctcatccactctgcttttcacactctcctaccctgatgataaaactgggaagaactatgactttgctcaggtgctgaagcgaagcatctgcctggaccagaatacacaggcctggtgtgacacctgtgaaaagtaccagcccacgattcagacccgcaacatccgccatctgccagatattcttgtcatcaattgtgaggtgaacagctcaaaagaggctgatttctggagaatgcaggctgaggttgccttcaagatggcagtaaagaaacacggtggggaaatctccaagaacaaggaatttgctttggctgattggaaggaactagggagtccagagggtgtgctggtgtgtccctccattgaggagttgaagaacgtctggcttcctttctccattcgcatgaagatgaccaaaaacaaagggctggatgtttgcaattggactgatggggatgagatgcagtggggcccagccagggcagaggaggagcatggtgtctatgtgtatgacctgatggctactgtggtacacatcctggactcacgcacagggggcagcctggtggctcacatcaaagttggagagacctaccaccagcgcaaggagggcgttactcaccagcagtggtatctgttcaatgactttcttattgaacctattgataagcatgaagctgtgcagtttgacatgaattggaaagtacctgcaatcctttattatgtcaaacggaatctcaattccagatacaacctgaacatcaagaaccctattgaggcaagtgtcttgctggctgaagcctcgctggcacggaagcagcggaaaacacatactacctttattccactgatgctgaatgagatgccacagattggggacctggtgggtctggatgctgagtttgtcacccttaatgaggaggaagcagagttacgcagtgatggtaccaagtctaccattaaaccaagccagatgtcagtagccaggattacctgtgttcggggccagggacccaatgagggtatccccttcattgatgactacatctctacccaggagcaggtggtggattacttgactcaatactcgggtataaagcctggtgacctcgatgccaaaatttcctccaagcacctaacaactctcaagtctacctacttaaagcttcgttttctcattgacattggagtcaagtttgtgggtcatggcctgcagaaggacttccgggtcatcaacctgatggtttggcagggctcttttaagagtcttcttgtgagagtgggcccctcagggtatacattgtgcctttagagaatggggaattataggtcccctaccttaagtctccccctcttttatccttgccaggtgcccaaggaccaagtccttgacactgtctacctgttccatatgccccgaaaacgaatgatttccctgcgattccttgcttggtactttctgg

SEQ ID NO: 1338 - protein, 1102 aa, Homo sapiens
MNFEGLDPGLAEYAPAMHSALDPVLDAHLNPSLLQNVELDPEGVEALPVQESVHIMEGVYSELHSVVAEVGVPVSVSHFDLHEEMLWVGSHGGHATSFFGPALERYSSFQVNGSDDIRQIQSLENGILFLTKNNLKYMRGLIIFDYLLDENEDMHSLLLTDSSTLLVGGLQNHIIDLNTVQETQKYAVETPGVTIMRQTNRFFFCGHTSGKVSLRDLRTFKVEHEFDAFSGSLSDFDVHGNLLAACGFSSRLTGLACDRFLKVYDLRMMRAITPLQVHVDPAFLRFIPTYTSRLAIISQSGQCQFCEPTGLANPADIFHVNPVGPLLMTFDVSASKQAFGDSEGCVHLWTDSPEPSFNPYSRETEFALPCLVDSLPPLDWSQDLLPLSLIPVPLTTDTLLSDWPAANSAPAPRRAPPVDAEILRTMKKVGFIGYAPNPRTRLRNQIPYRLKESDSEFDSFSQVTESPVGREEEPHLHMVSKKYRKVTIKYSKLGLEDFDFKHYNKTLFAGLEPHIPNAYCNCMIQVLYFLEPVRCLIQNHLCQKEFCLACELGFLFHMLDLSRGDPCQGNNFLRAFRTIPEASALGLILADSDEASGKGNLARLIQRWNRFILTQLHQDMQELEIPQAYRGAGGSSFCSSGDSVIGQLFSCEMENCSLCRCGSETVRASSTLLFTLSYPDDKTGKNYDFAQVLKRSICLDQNTQAWCDTCEKYQPTIQTRNIRHLPDILVINCEVNSSKEADFWRMQAEVAFKMAVKKHGGEISKNKEFADWKELGSPEGVLVCPSIEELKNVWLPFSIRMKMTKNKGLDVCNWTDGDEMQWGPARAEEEHGVYVYDLMATVVHILDSRTGGSLVAHIKVGETYHQRKEGVTHQQWYLFNDFLIEPIDKHEAVQFDMNWKVPAILYYVKRNLNSRYNLNIKNPIEASVLLAEASLARKQRKTHTTFIPLMLNEMPQIGDLVGLDAEFVTLNEEEAELRSDGTKSTIKPSQMSVARITCVRGQGPNEGIPFIDDYISTQEQVVDYLTQYSGIKPGDLDAKISSKHLTTLKSTYLKLRFLIDIGVKFVGHGLQKDFRVINLMVWQGSFKSLLVRVGPSGYTLCL

SEQ ID NO: 1339 - DNA, 7077 bp, Homo sapiens
ctggctccttctgattggcttagatgcgcccggagcccttctgattggctaaaatatgccccgagcccttcttgattggaagaagcgcctcggaccccggtccttggcgccgtagtggttaggttgagccctaggcgtgggggagaactggggaaactggaatttcccgcggagctgacagcgcttgcgctccccctactcgttctaattccacgcgctccaaaatatccgccatggagaaatcttggccaggatgtccattctaggcccatcggtgctgtcttgctgaaggttgggtcaggcatctaaagggactgtggtaagggagggtgtgacacaggtgtaagctgccatcgtcatcatgaactttgagggtctggaccctggactggcagaatatgccccagccatgcattctgccctggaccctgtcttggatgcccacctgaacccaagtctgctacagaatgtggagctggacccagagggagtggccttggaggctcttcccgtccaggaatcagtgcacataatggaaggtgtctactctgaattgcacagcgtggtggctgaagtgggtgtacctgtttccgtctcccactttgacttgcacgaggagatgctgtgggtggggagccacgggggccatgccacttcattttttggcccagccttggagcgctactcatcctttcaagtcaatggcagtgatgatattcggcagatccagagcctggagaatggtatcctttttctcaccaagaacaacctcaagtatatggcccgtgggggcctcattatatttgattacctgctggatgagaatgaggatatgcacagtctcctactgactgacagcagcactctactcgttggtgggctgcagaatcacatactagagattgatcttaacactgtccaggagactcagaagtatgcagtagagacgcctggagtcaccatcatgagacagacaaatcgcttcttcttctgcggccacacgtctggcaaggtttccctgagagacctccgtacttttaaggtggaacatgagtttgatgccttctcaggaagtctgtcagactttgatgtgcatggcaacctgctagctgcctgtggcttctccagccgcctcactggcctggcctgcgaccgtttcctcaaggtgtatgatttgcgcatgatgcgtgccatcacaccacttcaagtacatgtggatcctgccttcttgcgcttcattcctacatatacttctcgtcttgctatcatctctcagtcagggcagtgccaattctgtgaacccacaggcctggccaacccagccgatatctttcatgtgaatcctgtggggcctctgctaatgacatttgatgtgtcagccagcaagcaggctctggcctttggggattctgagggctgtgtgcacctctggactgattccccggagccttccttcaacccctactcccgtgagactgagtttgctttgccgtgtctcgtggactcactgcctcctctggactggagccaggacctgctgcctctttccctcatccctgtcccactcaccactgacacacttctctctgattggcctgctgccaactctgctccagctcccaggcgagcaccacccgtggatgcagagattctgcgcaccatgaagaaggtgggcttcattggctatgcgcccaatccccgcaccaggctgcgcaatcagataccctacagactcaaggagtcagacagtgaatttgacagcttcagccaggtcactgagtcaccagtaggacgagaagaggaaccacatctccacatggtttctaagaaataccgcaaggtgaccatcaaatattccaagctagggctggaggactttgacttcaaacactacaataagaccttgtttgctggattagagccccacattcccaacgcctactgtaactgcatgatccaggtgctctatttcctggagcctgtacgctgtctaattcaaaaccacctttgccagaaggagttctgtctggcatgtgagctgggcttcctgtttcacatgttggacctctctcgtggtgacccttgccagggcaataattttcttcgggcattccgtactattcctgaggcctcagccctcggtctaatcctggctgactcagatgaggcctcaggcaagggcaatctggccaggctcattcagaggtggaatcgcttcattctcactcaactgcatcaagatatgcaggagctggaaataccacaggcttatcgaggtgctggaggcagcttttgctcatcgggggactctgttattgggcagctcttcagctgtgagatggagaactgcagcctctgccgctgtggcagtgagaccgtgcgagcctcatccactctgcttttcacactctcctaccctgatggtagcaaaagtgataaaactgggaagaactatgactttgctcaggtgctgaagcgaagcatctgcctggaccagaatacacaggcctggtgtgacacctgtgaaaagtaccagcccacgattcagacccgcaacatccgccatctgccagatattcttgtcatcaattgtgaggtgaacagctcaaaagaggctgatttctggagaatgcaggctgaggttgccttcaagatggcagtaaagaaacacggtggggaaatctccaagaacaaggaatttgctttggctgattggaaggaactagggagtccagagggtgtgctggtgtgtccctccattgaggagttgaagaacgtctggcttcctttctccattcgcatgaagatgaccaaaaacaaagggctggatgtttgcaattggactgatggggatgagatgcagtggggcccagccagggcagaggaggagcatggtgtctatgtgtatgacctgatggctactgtggtacacatcctggactcacgcacagggggcagcctggtggctcacatcaaagttggagagacctaccaccagcgcaaggagggcgttactcaccagcagtggtatctgttcaatgactttcttattgaacctattgataagcatgaagctgtgcagtttgacatgaattggaaagtacctgcaatcctttattatgtcaaacggaatctcaattccagatacaacctgaacatcaagaaccctattgaggcaagtgtcttgctggctgaagcctcgctggcacggaagcagcggaaaacacatactacctttattccactgatgctgaatgagatgccacagattggggacctggtgggtctggatgctgagtttgtcacccttaatgaggaggaagcagagttacgcagtgatggtaccaagtctaccattaaaccaagccagatgtcagtagccaggattacctgtgttcggggccagggacccaatgagggtatccccttcattgatgactacatctctacccaggagcaggtggtggattacttgactcaatactcgggtataaagcctggtgacctcgatgccaaaatttcctccaagcacctaacaactctcaagtctacctacttaaagcttcgttttctcattgacattggagtcaagtttgtgggtcatggcctgcagaaggacttccgggtcatcaacctgatggtttggcagggctcttttaagagtcttcttgtgcccaaggaccaagtccttgacactgtctacctgttccatatgccccgaaaacgaatgatttccctgcgattccttgcttggtactttctggacctgaagattcaaggggaaacccatgacagtattgaggatgcccgcacagcccttcagctgtaccgaaagtatctggagctaagcaaaaatggcactgagcctgagtctttccacaaggtgctcaagggtctttatgagaagggcagaaagatggactggaaggtgcctgagcctgagggccaaacaagtcccaagaatgcagctgtcttctcctcagtgctggcgctctgactacccttcccaaagaaccacggccctctccctttactgttctatagccccagaactgggagatggcttcctaagttggctataccttgtccacttccagtactggacgtgctcagggtctagggtcacagatggtgctattaattgaactggaacacagcagaattgttgcaaaggttctaggagccagattcattccttcttcattctttgcaaaacagtggtacagacatggagtctagaattgacccagatggaaagtaattggtattcttaatatcctgggtgactaatatccaggcagagaagctcctggaaccataactgtaagttcctagctggctagggattgaagtcctggacagtgacagaggataccacagtagttcaagacttagcacaagtcaccaactgcttcagggatacctggaggggccagcaagtagagtgttggtggcccaagcaaaccagtgttgccaataccattgccaaaagggcctttggatcctggacaaagcttggctgccggcttcatttattcctgctgatggctgagaagcatctgtcttccatcccacttgcctgtcccaagttttgttccattttttaaaaatttgttgtaaactgcatgttttataaaataaaaataaaatatcgtttgttatttatctcattagagaactgctagtgtgggttctctggcttcagtcttcctctccttcctttgaaggtaaaggtccggaatccaaagttatggatatgaaagggtataattaggccgggcgcggtggctcacttctgtaatcctagcactttgggaggcagaggtgggtggaacacgaggtcaggagttaaagaccagcctgaccaagatggtgaaaccccgtctctactaaaaatacaaaaattagctgggagtggtggatggcgactgtaaccctagctgaggcagaaaattgcttcaacccgggaggcggaggttgcagtgagccgagatcacgccactgtatgccagcctgggcgatagggcgagactccgtctcaaaaaaaggggaaaaaggtataatttatgccttttctgggcaatgctgggtctttgctatagctgcccagtaccctaagtcagactgaagatgtacagtatggtttccgttaattgtgtaagccgacaaactacaggtcccaggatagcttgagacttgtagttgctcacaaagatgggtccggtgctgcggtgcttcctgggagatgtagtttcctgtgtattgaaacctggactgctcgctggccggcagcgcaccgttttgaaggtcctagcccacctgggctggctcacgcgcacgactagccgctcccatacagcacgcccggactctgtcgtcgcttaaggccactcctattctacggctgacccctggtggtcacgtggatctgttcgccacgcaagtctgggtccttcggcgattgaccggggtccttgctgttcgggagcctctcctaagctgcctgttcgcgcgagagtttggaggggcgggtttggggtcggtgtctgattggggctcgcaccgcagcacgctggagtcccgcttaggtaccagttagcgtcaggggagctgggtcaggcggtcgccgggacaccccgtgtgtggcaggcggcgaagcgctctggagaatcccggacagccctgctccctgcagccaggtggagcgaccccattacgctaaagatgaaaggctggggttggctggccctgcttctgggggccctgctgggaaccgcctgggctcggaggagccaggatctccactgtggagcatgcagggctctggtggatgaactagaatgggaaattgcccaggtggaccccaagaagaccattcagatgggatctttccggatcaatccagatggcagccagtcagtggtggaggtgccttatgcccgctcagaggcccacctcacagagctgctggaggagatatgtgaccggatgaaggagtatggggaacagattgatccttccacccatcgcaagaactacgtacgtgtagtgggccggaatggagaatccagtgaactggacctacaaggcatccgaatcgactcagatattagcggcaccctcaagtttgcgtgtgagagcattgtggaggaatacgaggatgaactcattgaattcttttcccgagaggctgacaatgttaaagacaaactttgcagtaagcgaacagatctttgtgaccatgccctgcacatatcgcatgatgagctatgaaccactggagcagcccacactggcttgatggatcacccccaggaggggaaaatggtggcaatgccttttatatattatgtttttactgaaattaactgaaaaaatatgaaaccaaaagtacaaactgtgttgtcttttcatgcctggaattgcccttacattaagcttgaagataaggagttatatagacaggaaagataatggaggagaaagaagagttttgggattgatacaggataaagatggagggaccagcaagaacagagacaggaaggggaaaatggatgtgaccaactcagctgaaaagtaagggctttatcggatagggacagacgaggtaaggaaggttgtttaatgagaggccttgcttgccagcctaagcttttaaatttgatgccagtggcaacaataaagtgtatctatcactagccattgtcaatctggactataagtctgtccacaattctgtgtgtagagattccagactggggcatagggatgaaaacctaaaggataccttcttttgggaaattctttttttctttttttttctgagatggagtcccgctctgtcgcctaggctggagtacagtggcgcgatctcggctcactacaagctctgcctcccaggttcacgccattatcctgactcagcctcccgagtagctgggactacaggcgcccgccaccacaccggctaatttttttttttttttttttgtgagacagaagtctcgctctgtcgcccaggctgaagtgcagtggtgcaatctcggcttactgcaacctccacctcctggttca

SEQ ID NO: 1340 - protein, 1199 aa, Homo sapiens
MNFEGLDPGLAEYAPAMHSALDPVLDAHLNPSLLQNVELDPEGVEALPVQESVHIMEGVYSELHSVVAEVGVPVSVSHFDLHEEMLWVGSHGGHATSFFGPALERYSSFQVNGSDDIRQIQSLENGILFLTKNNLKYMRGLIIFDYLLDENEDMHSLLLTDSSTLLVGGLQNHIIDLNTVQETQKYAVETPGVTIMRQTNRFFFCGHTSGKVSLRDLRTFKVEHEFDAFSGSLSDFDVHGNLLAACGFSSRLTGLACDRFLKVYDLRMMRAITPLQVHVDPAFLRFIPTYTSRLAIISQSGQCQFCEPTGLANPADIFHVNPVGPLLMTFDVSASKQAFGDSEGCVHLWTDSPEPSFNPYSRETEFALPCLVDSLPPLDWSQDLLPLSLIPVPLTTDTLLSDWPAANSAPAPRRAPPVDAEILRTMKKVGFIGYAPNPRTRLRNQIPYRLKESDSEFDSFSQVTESPVGREEEPHLHMVSKKYRKVTIKYSKLGLEDFDFKHYNKTLFAGLEPHIPNAYCNCMIQVLYFLEPVRCLIQNHLCQKEFCLACELGFLFHMLDLSRGDPCQGNNFLRAFRTIPEASALGLILADSDEASGKGNLARLIQRWNRFILTQLHQDMQELEIPQAYRGAGGSFCSSGDSVIGQLFSCEMENCSLCRCGSETVRASSTLLFTLSYPDGSKSDKTGKNYDFAQVLKRSICLDQNTQAWCDTCEKYQPTIQTRNIRHLPDILVINCEVNSSKEADFWRMQAEVAFKMAVKKHGGEISKNKEFADWKELGSPEGVLVCPSIEELKNVWLPFSIRMKMTKNKGLDVCNWTDGDEMQWGPARAEEEHGVYVYDLMATVVHILDSRTGGSLVAHIKVGETYHQRKEGVTHQQWYLFNDFLIEPIDKHEAVQFDMNWKVPAILYYVKRNLNSRYNLNIKNPIEASVLLAEASLARKQRKTHTTFIPLMLNEMPQIGDLVGLDAEFVTLNEEEAELRSDGTKSTIKPSQMSVARITCVRGQGPNEGIPFIDDYISTQEQVVDYLTQYSGIKPGDLDAKISSKHLTTLKSTYLKLRFLIDIGVKFVGHGLQKDFRVINLMVWQGSFKSLLVPKDQVLDTVYLFHMPRKRMISLRFLAWYFLDLKIQGETHDSIEDARTALQLYRKYLELSKNGTEPESFHKVLKGEKGRKMDWKVPEPEGQTSPKNAAVFSSVLAL

SEQ ID NO: 1341 - DNA, 6673 bp, Homo sapiens
ctggctccttctgattggcttagatgcgcccggagcccttctgattggctaaaatatgccccgagcccttcttgattggaagaagcgcctcggaccccggtccttggcgccgtagtggttaggttgagccctaggcgtgggggagaactggggaaactggaatttcccgcggagctgacagcgcttgcgctccccctactcgttctaattccacgcgctccaaaatatccgccatggagaaatcttggccaggatgtccattctaggcccatcggtgctgtcttgctgaaggttgggtcaggcatctaaagggactgtggtaagggagggtgtgacacaggtgtaagctgccatcgtcatcatgaactttgagggtctggaccctggactggcagaatatgccccagccatgcattctgccctggaccctgtcttggatgcccacctgaacccaagtctgctacagaatgtggagctggacccagagggagtggccttggaggctcttcccgtccaggaatcagtgcacataatggaaggtgtctactctgaattgcacagcgtggtggctgaagtgggtgtacctgtttccgtctcccactttgacttgcacgaggagatgctgtgggtggggagccacgggggccatgccacttcattttttggcccagccttggagcgctactcatcctttcaagtcaatggcagtgatgatattcggcagatccagagcctggagaatggtatcctttttctcaccaagaacaacctcaagtatatggcccgtgggggcctcattatatttgattacctgctggatgagaatgaggatatgcacagtctcctactgactgacagcagcactctactcgttggtgggctgcagaatcacatactagagattgatcttaacactgtccaggagactcagaagtatgcagtagagacgcctggagtcaccatcatgagacagacaaatcgcttcttcttctgcggccacacgtctggcaaggtttccctgagagacctccgtacttttaaggtggaacatgagtttgatgccttctcaggaagtctgtcagactttgatgtgcatggcaacctgctagctgcctgtggcttctccagccgcctcactggcctggcctgcgaccgtttcctcaaggtgtatgatttgcgcatgatgcgtgccatcacaccacttcaagtacatgtggatcctgccttcttgcgcttcattcctacatatacttctcgtcttgctatcatctctcagtcagggcagtgccaattctgtgaacccacaggcctggccaacccagccgatatctttcatgtgaatcctgtggggcctctgctaatgacatttgatgtgtcagccagcaagcaggctctggcctttggggattctgagggctgtgtgcacctctggactgattccccggagccttccttcaacccctactcccgtgagactgagtttgctttgccgtgtctcgtggactcactgcctcctctggactggagccaggacctgctgcctctttccctcatccctgtcccactcaccactgacacacttctctctgattggcctgctgccaactctgctccagctcccaggcgagcaccacccgtggatgcagagattctgcgcaccatgaagaaggtgggcttcattggctatgcgcccaatccccgcaccaggctgcgcaatcagataccctacagactcaaggagtcagacagtgaatttgacagcttcagccaggtcactgagtcaccagtaggacgagaagaggaaccacatctccacatggtttctaagaaataccgcaaggtgaccatcaaatattccaagctagggctggaggactttgacttcaaacactacaataagaccttgtttgctggattagagccccacattcccaacgcctactgtaactgcatgatccaggtgctctatttcctggagcctgtacgctgtctaattcaaaaccacctttgccagaaggagttctgtctggcatgtgagctgggcttcctgtttcacatgttggacctctctcgtggtgacccttgccagggcaataattttcttcgggcattccgtactattcctgaggcctcagccctcggtctaatcctggctgactcagatgaggcctcaggcaagggcaatctggccaggctcattcagaggtggaatcgcttcattctcactcaactgcatcaagatatgcaggagctggaaataccacaggcttatcgaggtgctggaggcagcttttgctcatcgggggactctgttattgggcagctcttcagctgtgagatggagaactgcagcctctgccgctgtggcagtgagaccgtgcgagcctcatccactctgcttttcacactctcctaccctgatggtagcaaaagtgataaaactgggaagaactatgactttgctcaggtgctgaagcgaagcatctgcctggaccagaatacacaggcctggtgtgacacctgtgaaaagtaccagcccacgattcagacccgcaacatccgccatctgccagatattcttgtcatcaattgtgaggtgaacagctcaaaagaggctgatttctggagaatgcaggctgaggtaaggactcagactagaaacaaggcttccggaataatttttcattttatcccccttctgacctccatatatgattacattcctgaagaactggatgtttttcttctgtgttcaggttgccttcaagatggcagtaaagaaacacggaaggaactagggagtccagagggtgtgctggtgtgtccctccattgaggagttgaagaacgtctggcttcctttctccattcgcatgaagatgaccaaaaacaaagggctggatgtttgcaattggactgatggggatgagatgcaggttgttgaaaaaccgggaagaggaaagggaataagggagagaagggcagaggaggagcatggtgtctatgtgtatgacctgatggctactgtggtacacatcctggactcacgcacagggggcagcctggtggctcacatcaaagttggagagacctaccaccagcgcaaggagggcgttactcaccagcagtggtatctgttcaatgactttcttattgaacctattgataagcatgaagctgtgcagtttgacatgaattggaaagtacctgcaatcctttattatgtcaaacggaatctcaattccagatacaacctgaacatcaagaaccctattgaggcaagtgtcttgctggctgaagcctcgctggcacggaagcagcggaaaacacatactacctttattccactgatgctgaatgagatgccacagattggggacctggtgggtctggatgctgagtttgtcacccttaatgaggaggaagcagagttacgcagtgatggtaccaagtctaccattaaaccaagccagatgtcagtagccaggattacctgtgttcggggccagggacccaatgagggtatccccttcattgatgactacatctctacccaggagcaggtggtggattacttgactcaatactcgggtataaagcctggtgacctcgatgccaaaatttcctccaagcacctaacaactctcaagtctacctacttaaagcttcgttttctcattgacattggagtcaagtttgtgggtcatggcctgcagaaggacttccgggtcatcaacctgatggtgcccaaggaccaagtccttgacactgtctacctgttccatatgccccgaaaacgaatgatttccctgcgattccttgcttggtactttctggacctgaagattcaaggggaaacccatgacagtattgaggatgcccgcacagcccttcagctgtaccgaaagtatctggagctaagcaaaaatggcactgagcctgagtctttccacaaggtgctcaagggtctttatgagaagggcagaaagatggactggaaggtgcctgagcctgagggccaaacaagtcccaagaatgcagctgtcttctcctcagtgctggcgctctgactacccttcccaaagaaccacggccctctccctttactgttctatagccccagaactgggagatggcttcctaagttggctataccttgtccacttccagtactggacgtgctcagggtctagggtcacagatggtgctattaattgaactggaacacagcagaattgttgcaaaggttctaggagccagattcattccttcttcattctttgcaaaacagtggtacagacatggagtctagaattgacccagatggaaagtaattggtattcttaatatcctgggtgactaatatccaggcagagaagctcctggaaccataactgtaagttcctagctggctagggattgaagtcctggacagtgacagaggataccacagtagttcaagacttagcacaagtcaccaactgcttcagggatacctggaggggccagcaagtagagtgttggtggcccaagcaaaccagtgttgccaataccattgccaaaagggcctttggatcctggacaaagcttggctgccggcttcatttattcctgctgatggctgagaagcatctgtcttccatcccacttgcctgtcccaagttttgttccattttttaaaaatttgttgtaaactgcatgttttataaaataaaaataaaatatcgtttgttatttatctcattagagaactgctagtgtgggttctctggcttcagtcttcctctccttcctttgaaggtaaaggtccggaatccaaagttatggatatgaaagggtataattaggccgggcgcggtggctcacttctgtaatcctagcactttgggaggcagaggtgggtggaacacgaggtcaggagttaaagaccagcctgaccaagatggtgaaaccccgtctctactaaaaatacaaaaattagctgggagtggtggatggcgactgtaaccctagctgaggcagaaaattgcttcaacccgggaggcggaggttgcagtgagccgagatcacgccactgtatgccagcctgggcgatagggcgagactccgtctcaaaaaaaggggaaaaaggtataatttatgccttttctgggcaatgctgggtctttgctatagctgcccagtaccctaagtcagactgaagatgtacagtatggtttccgttaattgtgtaagccgacaaactacaggtcccaggatagcttgagacttgtagttgctcacaaagatgggtccggtgctgcggtgcttcctgggagatgtagtttcctgtgtattgaaacctggactgctcgctggccggcagcgcaccgttttgaaggtcctagcccacctgggctggctcacgcgcacgactagccgctcccatacagcacgcccggactctgtcgtcgcttaaggccactcctattctacggctgacccctggtggtcacgtggatctgttcgccacgcaagtctgggtccttcggcgattgaccggggtccttgctgttcgggagcctctcctaagctgcctgttcgcgcgagagtttggaggggcgggtttggggtcggtgtctgattggggctcgcaccgcagcacgctggagtcccgcttaggtaccagttagcgtcaggggagctgggtcaggcggtcgccgggacaccccgtgtgtggcaggcggcgaagcgctctggagaatcccggacagccctgctccctgcagccaggtgtagtttcgggagccactggggccaaagtgagagtccagcggtcttccagcgcttgggccacggcggcggccctgggagcagaggtggagcgaccccattacgctaaagatgaaaggctggggttggctggccctgcttctgggggccctgctgggaaccgcctgggctcggaggagccaggatctccactgtggagcatgcagggctctggtggatgaactagaatgggaaattgcccaggtggaccccaagaagaccattcagatgggatctttccggatcaatccagatggcagccagtcagtggtggaggtgccttatgcccgctcagaggcccacctcacagagctgctggaggagatatgtgaccggatgaaggagtatggggaacagattgatccttccacccatcgcaagaactacgtacgtgtagtgggccggaatggagaatccagtgaactggacctacaaggcatccgaatcgactcagatattagcggcaccctcaagtttgcgtgtgagagcattgtggaggaatacgaggatgaactcattgaattcttttcccgagaggctgacaatgttaaagacaaactttgcagtaagcgaacagatctttgtgaccatgccctgcacatatcgcatgatgagctatgaaccactggagcagcccacactggcttgatggatcacccccaggaggggaaaatggtggcaatgccttttatatattatgtttttactgaaattaactgaaaaaatatgaaaccaaaagtacaaactgtgttgtcttttcatgcctggaattgcccttacattaagcttgaagataaggagttatatagacaggaaagataatggaggagaaagaagagttttgggattgatacaggataaag

SEQ ID NO: 1342 - protein, 1225 aa, Homo sapiens
MNFEGLDPGLAEYAPAMHSALDPVLDAHLNPSLLQNVELDPEGVEALPVQESVHIMEGVYSELHSVVAEVGVPVSVSHFDLHEEMLWVGSHGGHATSFFGPALERYSSFQVNGSDDIRQIQSLENGILFLTKNNLKYMRGLIIFDYLLDENEDMHSLLLTDSSTLLVGGLQNHIIDLNTVQETQKYAVETPGVTIMRQTNRFFFCGHTSGKVSLRDLRTFKVEHEFDAFSGSLSDFDVHGNLLAACGFSSRLTGLACDRFLKVYDLRMMRAITPLQVHVDPAFLRFIPTYTSRLAIISQSGQCQFCEPTGLANPADIFHVNPVGPLLMTFDVSASKQAFGDSEGCVHLWTDSPEPSFNPYSRETEFALPCLVDSLPPLDWSQDLLPLSLIPVPLTTDTLLSDWPAANSAPAPRRAPPVDAEILRTMKKVGFIGYAPNPRTRLRNQIPYRLKESDSEFDSFSQVTESPVGREEEPHLHMVSKKYRKVTIKYSKLGLEDFDFKHYNKTLFAGLEPHIPNAYCNCMIQVLYFLEPVRCLIQNHLCQKEFCLACELGFLFHMLDLSRGDPCQGNNFLRAFRTIPEASALGLILADSDEASGKGNLARLIQRWNRFILTQLHQDMQELEIPQAYRGAGGSFCSSGDSVIGQLFSCEMENCSLCRCGSETVRASSTLLFTLSYPDGSKSDKTGKNYDFAQVLKRSICLDQNTQAWCDTCEKYQPTIQTRNIRHLPDILVINCEVNSSKEADFWRMQAEVRTQTRNKASGIIFHFIPLLTSIYDYIPEELDVFLLCSGCLQDGSKETRKELGSPEGVLVCPSIEELKNVWLPFSIRMKMTKNKGLDVCNWTDGDEMQVVEKPGRGKGIRERRAEEEHGVYVYDLMATVVHILDSRTGGSLVAHIKVGETYHQRKEGVTHQQWYLFNDFLIEPIDKHEAVQFDMNWKVPAILYYVKRNLNSRYNLNIKNPIEASVLLAEASLARKQRKTHTTFIPLMLNEMPQIGDLVGLDAEFVTLNEEEAELRSDGTKSTIKPSQMSVARITCVRGQGPNEGIPFIDDYISTQEQVVDYLTQYSGIKPGDLDAKISSKHLTTLKSTYLKLRFLIDIGVKFVGHGLQKDFRVINLMVPKDQVLDTVYLFHMPRKRMISLRFLAWYFLDLKIQGETHDSIEDARTALQLYRKYLELSKNGTEPESFHKVLKGEKGRKMDWKVPEPEGQTSPKNAAVFSSVLAL

SEQ ID NO: 1343 - DNA, 5881 bp, Homo sapiens
ctggctccttctgattggcttagatgcgcccggagcccttctgattggctaaaatatgccccgagcccttcttgattggaagaagcgcctcggaccccggtccttggcgccgtagtggttaggttgagccctaggcgtgggggagaactggggaaactggaatttcccgcggagctgacagcgcttgcgctccccctactcgttctaattccacgcgctccaaaatatccgccatggagaaatcttggccaggatgtccattctaggcccatcggtgctgtcttgctgaaggttgggtcaggcatctaaagggactgtggtaagggagggtgtgacacaggtgtaagctgccatcgtcatcatgaactttgagggtctggaccctggactggcagaatatgccccagccatgcattctgccctggaccctgtcttggatgcccacctgaacccaagtctgctacagaatgtggagctggacccagagggagtggccttggaggctcttcccgtccaggaatcagtgcacataatggaaggtgtctactctgaattgcacagcgtggtggctgaagtgggtgtacctgtttccgtctcccactttgacttgcacgaggagatgctgtgggtggggagccacgggggccatgccacttcattttttggcccagccttggagcgctactcatcctttcaagtcaatggcagtgatgatattcggcagatccagagcctggagaatggtatcctttttctcaccaagaacaacctcaagtatatggcccgtgggggcctcattatatttgattacctgctggatgagaatgaggatatgcacagtctcctactgactgacagcagcactctactcgttggtgggctgcagaatcacatactagagattgatcttaacactgtccaggagactcagaagtatgcagtagagacgcctggagtcaccatcatgagacagacaaatcgcttcttcttctgcggccacacgtctggcaaggtttccctgagagacctccgtacttttaaggtggaacatgagtttgatgccttctcaggaagtctgtcagactttgatgtgcatggcaacctgctagctgcctgtggcttctccagccgcctcactggcctggcctgcgaccgtttcctcaaggtgtatgatttgcgcatgatgcgtgccatcacaccacttcaagtacatgtggatcctgccttcttgcgcttcattcctacatatacttctcgtcttgctatcatctctcagtcagggcagtgccaattctgtgaacccacaggcctggccaacccagccgatatctttcatgtgaatcctgtggggcctctgctaatgacatttgatgtgtcagccagcaagcaggctctggcctttggggattctgagggctgtgtgcacctctggactgattccccggagccttccttcaacccctactcccgtgagactgagtttgctttgccgtgtctcgtggactcactgcctcctctggactggagccaggacctgctgcctctttccctcatccctgtcccactcaccactgacacacttctctctgattggcctgctgccaactctgctccagctcccaggcgagcaccacccgtggatgcagagattctgcgcaccatgaagaaggtgggcttcattggctatgcgcccaatccccgcaccaggctgcgcaatcagataccctacagactcaaggagtcagacagtgaatttgacagcttcagccaggtcactgagtcaccagtaggacgagaagaggaaccacatctccacatggtttctaagaaataccgcaaggtgaccatcaaatattccaagctagggctggaggactttgacttcaaacactacaataagaccttgtttgctggattagagccccacattcccaacgcctactgtaactgcatgatccaggtgctctatttcctggagcctgtacgctgtctaattcaaaaccacctttgccagaaggagttctgtctggcatgtgagctgggcttcctgtttcacatgttggacctctctcgtggtgacccttgccagggcaataattttcttcgggcattccgtactattcctgaggcctcagccctcggtctaatcctggctgactcagatgaggcctcaggcaagggcaatctggccaggctcattcagaggtggaatcgcttcattctcactcaactgcatcaagatatgcaggagctggaaataccacaggcttatcgaggtgctggaggcagcttttgctcatcgggggactctgttattgggcagctcttcagctgtgagatggagaactgcagcctctgccgctgtggcagtgagaccgtgcgagcctcatccactctgcttttcacactctcctaccctgatggtagcaaaagtgataaaactgggaagaactatgactttgctcaggtgctgaagcgaagcatctgcctggaccagaatacacaggcctggtgtgacacctgtgaaaagtaccagcccacgattcagacccgcaacatccgccatctgccagatattcttgtcatcaattgtgaggtgaacagctcaaaagaggctgatttctggagaatgcaggctgaggttgccttcaagatggcagtaaagaaacacggtggggaaatctccaagaacaaggaatttgctttggctgattggaaggaactagggagtccagagggtgtgctggtgtgtccctccattgaggagttgaagaacgtctggcttcctttctccattcgcatgaagatgaccaaaaacaaagggctggatgtttgcaattggactgatggggatgagatgcagtggggcccagccagggcagaggaggagcatggtgtctatgtgtatgacctgatggctactgtggtacacatcctggactcacgcacagggggcagcctggtggctcacatcaaagttggagagacctaccaccagcgcaaggagggcgttactcaccagcagtggtatctgttcaatgactttcttattgaacctattgataagcatgaagctgtgcagtttgacatgaattggaaagtacctgcaatcctttattatgtcaaacggaatctcaattccagatacaacctgaacatcaagaaccctattgaggcaagtgtcttgctggctgaagcctcgctggcacggaagcagcggaaaacacatactacctttattccactgatgctgaatgagatgccacagattggggacctggtgggtctggatgctgagtttgtcacccttaatgaggaggaagcagagttacgcagtgatggtaccaagtctaccattaaaccaagccagatgtcagtagccaggattacctgtgttcggggccagggacccaatgagggtatccccttcattgatgactacatctctacccaggagcaggtggtggattacttgactcaatactcgggtataaagcctggtgacctcgatgccaaaatttcctccaagcacctaacaactctcaagtctacctacttaaagcttcgttttctcattgacattggagtcaagtttgtgggtcatggcctgcagaaggacttccgggtcatcaacctgatggtttggcagggctcttttaagagtcttcttgtgagagtgggcccctcagggtatacattgtgcctttagagaatggggaattataggtcccctaccttaagtctccccctcttttatccttgccaggtgcccaaggaccaagtccttgacactgtctacctgttccatatgccccgaaaacgaatgatttccctgcgattccttgcttggtactttctggacctgaagattcaaggggaaacccatgacagtattgaggatgcccgcacagcccttcagctgtaccgaaagtatctggagctaagcaaaaatggcactgagcctgagtctttccacaaggtgctcaagggtctttatgagaagggcagaaagatggactggaaggtgcctgagcctgagggccaaacaagtcccaagaatgcagctgtcttctcctcagtgctggcgctctgactacccttcccaaagaaccacggccctctccctttactgttctatagccccagaactgggagatggcttcctaagttggctataccttgtccacttccagtactggacgtgctcagggtctagggtcacagatggtgctattaattgaactggaacacagcagaattgttgcaaaggttctaggagccagattcattccttcttcattctttgcaaaacagtggtacagacatggagtctagaattgacccagatggaaagtaattggtattcttaatatcctgggtgactaatatccaggcagagaagctcctggaaccataactgtaagttcctagctggctagggattgaagtcctggacagtgacagaggataccacagtagttcaagacttagcacaagtcaccaactgcttcagggatacctggaggggccagcaagtagagtgttggtggcccaagcaaaccagtgttgccaataccattgccaaaagggcctttggatcctggacaaagcttggctgccggcttcatttattcctgctgatggctgagaagcatctgtcttccatcccacttgcctgtcccaagttttgttccattttttaaaaatttgttgtaaactgcatgttttataaaataaaaataaaatatcgtttgttatttatctcattagagaactgctagtgtgggttctctggcttcagtcttcctctccttcctttgaaggtaaaggtccggaatccaaagttatggatatgaaagggtataattaggccgggcgcggtggctcacttctgtaatcctagcactttgggaggcagaggtgggtggaacacgaggtcaggagttaaagaccagcctgaccaagatggtgaaaccccgtctctactaaaaatacaaaaattagctgggagtggtggatggcgactgtaaccctagctgaggcagaaaattgcttcaacccgggaggcggaggttgcagtgagccgagatcacgccactgtatgccagcctgggcgatagggcgagactccgtctcaaaaaaaggggaaaaaggtataatttatgccttttctgggcaatgctgggtctttgctatagctgcccagtaccctaagtcagactgaagatgtacagtatggtttccgttaattgtgtaagccgacaaactacaggtcccaggatagcttgagacttgtagttgctcacaaagatgggtccggtgctgcggtgcttcctgggagatgtagtttcctgtgtattgaaacctggactgctcgctggccggcagcgcaccgttttgaaggtcctagcccacctgggctggctcacgcgcacgactagccgctcccatacagcacgcccggactctgtcgtcgcttaaggccactcctattctacggctgacccctggtggtcacgtggatctgttcgccacgcaagtctgggtccttcggcgattgaccggggtccttgctgttcgggagcctctcctaagctgcctgttcgcgcgagagtttggaggggcgggtttggggtcggtgtctgattggggctcgcaccgcagcacgctggagtcccgcttaggtaccagttagcgtcaggggagctgggtcaggcggtcgccgggacaccccgtgtgtggcaggcggcgaagcgctctggagaatcccggacagccctgctccctgcagccaggtgtagtttcgggagccactggggccaaagtgagagtccagcggtcttccagcgcttgggccacggcggcggccctgggagcagag

SEQ ID NO: 1344 - protein, 1105 aa, Homo sapiens; identical to SEQ ID NO: 1334

SEQ ID NO: 1345 - DNA, 6262 bp, Homo sapiens
ctggctccttctgattggcttagatgcgcccggagcccttctgattggctaaaatatgccccgagcccttcttgattggaagaagcgcctcggaccccggtccttggcgccgtagtggttaggttgagccctaggcgtgggggagaactggggaaactggaatttcccgcggagctgacagcgcttgcgctccccctactcgttctaattccacgcgctccaaaatatccgccatggagaaatcttggccaggatgtccattctaggcccatcggtgctgtcttgctgaaggttgggtcaggcatctaaagggactgtggtaagggagggtgtgacacaggtgtaagctgccatcgtcatcatgaactttgagggtctggaccctggactggcagaatatgccccagccatgcattctgccctggaccctgtcttggatgcccacctgaacccaagtctgctacagaatgtggagctggacccagagggagtggccttggaggctcttcccgtccaggaatcagtgcacataatggaaggtgtctactctgaattgcacagcgtggtggctgaagtgggtgtacctgtttccgtctcccactttgacttgcacgaggagatgctgtgggtggggagccacgggggccatgccacttcattttttggcccagccttggagcgctactcatcctttcaagtcaatggcagtgatgatattcggcagatccagagcctggagaatggtatcctttttctcaccaagaacaacctcaagtatatggcccgtgggggcctcattatatttgattacctgctggatgagaatgaggatatgcacagtctcctactgactgacagcagcactctactcgttggtgggctgcagaatcacatactagagattgatcttaacactgtccaggagactcagaagtatgcagtagagacgcctggagtcaccatcatgagacagacaaatcgcttcttcttctgcggccacacgtctggcaaggtttccctgagagacctccgtacttttaaggtggaacatgagtttgatgccttctcaggaagtctgtcagactttgatgtgcatggcaacctgctagctgcctgtggcttctccagccgcctcactggcctggcctgcgaccgtttcctcaaggtgtatgatttgcgcatgatgcgtgccatcacaccacttcaagtacatgtggatcctgccttcttgcgcttcattcctacatatacttctcgtcttgctatcatctctcagtcagggcagtgccaattctgtgaacccacaggcctggccaacccagccgatatctttcatgtgaatcctgtggggcctctgctaatgacatttgatgtgtcagccagcaagcaggctctggcctttggggattctgagggctgtgtgcacctctggactgattccccggagccttccttcaacccctactcccgtgagactgagtttgctttgccgtgtctcgtggactcactgcctcctctggactggagccaggacctgctgcctctttccctcatccctgtcccactcaccactgacacacttctctctgattggcctgctgccaactctgctccagctcccaggcgagcaccacccgtggatgcagagattctgcgcaccatgaagaaggtgggcttcattggctatgcgcccaatccccgcaccaggctgcgcaatcagataccctacagactcaaggagtcagacagtgaatttgacagcttcagccaggtcactgagtcaccagtaggacgagaagaggaaccacatctccacatggtttctaagaaataccgcaaggtgaccatcaaatattccaagctagggctggaggactttgacttcaaacactacaataagaccttgtttgctggattagagccccacattcccaacgcctactgtaactgcatgatccaggtgctctatttcctggagcctgtacgctgtctaattcaaaaccacctttgccagaaggagttctgtctggcatgtgagctgggcttcctgtttcacatgttggacctctctcgtggtgacccttgccagggcaataattttcttcgggcattccgtactattcctgaggcctcagccctcggtctaatcctggctgactcagatgaggcctcaggcaagggcaatctggccaggctcattcagaggtggaatcgcttcattctcactcaactgcatcaagatatgcaggagctggaaataccacaggcttatcgaggtgctggaggcagcagcttttgctcatcgggggactctgttattgggcagctcttcagctgtgagatggagaactgcagcctctgccgctgtggcagtgagaccgtgcgagcctcatccactctgcttttcacactctcctaccctgatgataaaactgggaagaactatgactttgctcaggtgctgaagcgaagcatctgcctggaccagaatacacaggcctggtgtgacacctgtgaaaagtaccagcccacgattcagacccgcaacatccgccatctgccagatattcttgtcatcaattgtgaggtgaacagctcaaaagaggctgatttctggagaatgcaggctgaggttgccttcaagatggcagtaaagaaacacggtggggaaatctccaagaacaaggaatttgctttggctgattggaaggaactagggagtccagagggtgtgctggtgtgtccctccattgaggagttgaagaacgtctggcttcctttctccattcgcatgaagatgaccaaaaacaaagggctggatgtttgcaattggactgatggggatgagatgcagtggggcccagccagggcagaggaggagcatggtgtctatgtgtatgacctgatggctactgtggtacacatcctggactcacgcacagggggcagcctggtggctcacatcaaagttggagagacctaccaccagcgcaaggagggcgttactcaccagcagtggtatctgttcaatgactttcttattgaacctattgataagcatgaagctgtgcagtttgacatgaattggaaagtacctgcaatcctttattatgtcaaacggaatctcaattccagatacaacctgaacatcaagaaccctattgaggcaagtgtcttgctggctgaagcctcgctggcacggaagcagcggaaaacacatactacctttattccactgatgctgaatgagatgccacagattggggacctggtgggtctggatgctgagtttgtcacccttaatgaggaggaagcagagttacgcagtgatggtaccaagtctaccattaaaccaagccagatgtcagtagccaggattacctgtgttcggggccagggacccaatgagggtatccccttcattgatgactacatctctacccaggagcaggtggtggattacttgactcaatactcgggtataaagcctggtgacctcgatgccaaaatttcctccaagcacctaacaactctcaagtctacctacttaaagcttcgttttctcattgacattggagtcaagtttgtgggtcatggcctgcagaaggacttccgggtcatcaacctgatggtttggcagggctcttttaagagtcttcttgtgagagtgggcccctcagggtatacattgtgcctttagagaatggggaattataggtcccctaccttaagtctccccctcttttatccttgccaggtgcccaaggaccaagtccttgacactgtctacctgttccatatgccccgaaaacgaatgatttccctgcgattccttgcttggtactttctggacctgaagattcaaggggaaacccatgacagtattgaggatgcccgcacagcccttcagctgtaccgaaagtatctggagctaagcaaaaatggcactgagcctgagtctttccacaaggtgctcaagggtctttatgagaagggcagaaagatggactggaaggtgcctgagcctgagggccaaacaagtcccaagaatgcagctgtcttctcctcagtgctggcgctctgactacccttcccaaagaaccacggccctctccctttactgttctatagccccagaactgggagatggcttcctaagttggctataccttgtccacttccagtactggacgtgctcagggtctagggtcacagatggtgctattaattgaactggaacacagcagaattgttgcaaaggttctaggagccagattcattccttcttcattctttgcaaaacagtggtacagacatggagtctagaattgacccagatggaaagtaattggtattcttaatatcctgggtgactaatatccaggcagagaagctcctggaaccataactgtaagttcctagctggctagggattgaagtcctggacagtgacagaggataccacagtagttcaagacttagcacaagtcaccaactgcttcagggatacctggaggggccagcaagtagagtgttggtggcccaagcaaaccagtgttgccaataccattgccaaaagggcctttggatcctggacaaagcttggctgccggcttcatttattcctgctgatggctgagaagcatctgtcttccatcccacttgcctgtcccaagttttgttccattttttaaaaatttgttgtaaactgcatgttttataaaataaaaataaaatatcgtttgttatttatctcattagagaactgctagtgtgggttctctggcttcagtcttcctctccttcctttgaaggtaaaggtccggaatccaaagttatggatatgaaagggtataattaggccgggcgcggtggctcacttctgtaatcctagcactttgggaggcagaggtgggtggaacacgaggtcaggagttaaagaccagcctgaccaagatggtgaaaccccgtctctactaaaaatacaaaaattagctgggagtggtggatggcgactgtaaccctagctgaggcagaaaattgcttcaacccgggaggcggaggttgcagtgagccgagatcacgccactgtatgccagcctgggcgatagggcgagactccgtctcaaaaaaaggggaaaaaggtataatttatgccttttctgggcaatgctgggtctttgctatagctgcccagtaccctaagtcagactgaagatgtacagtatggtttccgttaattgtgtaagccgacaaactacaggtcccaggatagcttgagacttgtagttgctcacaaagatgggtccggtgctgcggtgcttcctgggagatgtagtttcctgtgtattgaaacctggactgctcgctggccggcagcgcaccgttttgaaggtcctagcccacctgggctggctcacgcgcacgactagccgctcccatacagcacgcccggactctgtcgtcgcttaaggccactcctattctacggctgacccctggtggtcacgtggatctgttcgccacgcaagtctgggtccttcggcgattgaccggggtccttgctgttcgggagcctctcctaagctgcctgttcgcgcgagagtttggaggggcgggtttggggtcggtgtctgattggggctcgcaccgcagcacgctggagtcccgcttaggtaccagttagcgtcaggggagctgggtcaggcggtcgccgggacaccccgtgtgtggcaggcggcgaagcgctctggagaatcccggacagccctgctccctgcagccaggtggagcgaccccattacgctaaagatgaaaggctggggttggctggccctgcttctgggggccctgctgggaaccgcctgggctcggaggagccaggatctccactgtggagcatgcagggctctggtggatgaactagaatgggaaattgcccaggtggaccccaagaagaccattcagatgggatctttccggatcaatccagatggcagccagtcagtggtggaggtaactgttactgttcccccaaacaaagtagctcactctggctttggatgaaattcgactgcttaaaaaggaccttggtttaatagaaatgaagaaaacagactcagaaaaaagatttggctctgtctcatttggaagaagctgcaggcttattccccatgcacttgcttcctggctgcaaaccttaataccttctccacatccacatgactggtttttaatgtagcactgtggtatacatgcaaac

SEQ ID NO: 1346 - protein, 1102 aa, Homo sapiens; identical to SEQ ID NO: 1338

SEQ ID NO: 1347 - DNA, 7038 bp, Homo sapiens
ctggctccttctgattggcttagatgcgcccggagcccttctgattggctaaaatatgccccgagcccttcttgattggaagaagcgcctcggaccccggtccttggcgccgtagtggttaggttgagccctaggcgtgggggagaactggggaaactggaatttcccgcggagctgacagcgcttgcgctccccctactcgttctaattccacgcgctccaaaatatccgccatggagaaatcttggccaggatgtccattctaggcccatcggtgctgtcttgctgaaggttgggtcaggcatctaaagggactgtggtaagggagggtgtgacacaggtgtaagctgccatcgtcatcatgaactttgagggtctggaccctggactggcagaatatgccccagccatgcattctgccctggaccctgtcttggatgcccacctgaacccaagtctgctacagaatgtggagctggacccagagggagtggccttggaggctcttcccgtccaggaatcagtgcacataatggaaggtgtctactctgaattgcacagcgtggtggctgaagtgggtgtacctgtttccgtctcccactttgacttgcacgaggagatgctgtgggtggggagccacgggggccatgccacttcattttttggcccagccttggagcgctactcatcctttcaagtcaatggcagtgatgatattcggcagatccagagcctggagaatggtatcctttttctcaccaagaacaacctcaagtatatggcccgtgggggcctcattatatttgattacctgctggatgagaatgaggatatgcacagtctcctactgactgacagcagcactctactcgttggtgggctgcagaatcacatactagagattgatcttaacactgtccaggagactcagaagtatgcagtagagacgcctggagtcaccatcatgagacagacaaatcgcttcttcttctgcggccacacgtctggcaaggtttccctgagagacctccgtacttttaaggtggaacatgagtttgatgccttctcaggaagtctgtcagactttgatgtgcatggcaacctgctagctgcctgtggcttctccagccgcctcactggcctggcctgcgaccgtttcctcaaggtgtatgatttgcgcatgatgcgtgccatcacaccacttcaagtacatgtggatcctgccttcttgcgcttcattcctacatatacttctcgtcttgctatcatctctcagtcagggcagtgccaattctgtgaacccacaggcctggccaacccagccgatatctttcatgtgaatcctgtggggcctctgctaatgacatttgatgtgtcagccagcaagcaggctctggcctttggggattctgagggctgtgtgcacctctggactgattccccggagccttccttcaacccctactcccgtgagactgagtttgctttgccgtgtctcgtggactcactgcctcctctggactggagccaggacctgctgcctctttccctcatccctgtcccactcaccactgacacacttctctctgattggcctgctgccaactctgctccagctcccaggcgagcaccacccgtggatgcagagattctgcgcaccatgaagaaggtgggcttcattggctatgcgcccaatccccgcaccaggctgcgcaatcagataccctacagactcaaggagtcagacagtgaatttgacagcttcagccaggtcactgagtcaccagtaggacgagaagaggaaccacatctccacatggtttctaagaaataccgcaaggtgaccatcaaatattccaagctagggctggaggactttgacttcaaacactacaataagaccttgtttgctggattagagccccacattcccaacgcctactgtaactgcatgatccaggtgctctatttcctggagcctgtacgctgtctaattcaaaaccacctttgccagaaggagttctgtctggcatgtgagctgggcttcctgtttcacatgttggacctctctcgtggtgacccttgccagggcaataattttcttcgggcattccgtactattcctgaggcctcagccctcggtctaatcctggctgactcagatgaggcctcaggcaagggcaatctggccaggctcattcagaggtggaatcgcttcattctcactcaactgcatcaagatatgcaggagctggaaataccacaggcttatcgaggtgctggaggcagcagcttttgctcatcgggggactctgttattgggcagctcttcagctgtgagatggagaactgcagcctctgccgctgtggcagtgagaccgtgcgagcctcatccactctgcttttcacactctcctaccctgatgataaaactgggaagaactatgactttgctcaggtgctgaagcgaagcatctgcctggaccagaatacacaggcctggtgtgacacctgtgaaaagtaccagcccacgattcagacccgcaacatccgccatctgccagatattcttgtcatcaattgtgaggtgaacagctcaaaagaggctgatttctggagaatgcaggctgaggttgccttcaagatggcagtaaagaaacacggtggggaaatctccaagaacaaggaatttgctttggctgattggaaggaactagggagtccagagggtgtgctggtgtgtccctccattgaggagttgaagaacgtctggcttcctttctccattcgcatgaagatgaccaaaaacaaagggctggatgtttgcaattggactgatggggatgagatgcagtggggcccagccagggcagaggaggagcatggtgtctatgtgtatgacctgatggctactgtggtacacatcctggactcacgcacagggggcagcctggtggctcacatcaaagttggagagacctaccaccagcgcaaggagggcgttactcaccagcagtggtatctgttcaatgactttcttattgaacctattgataagcatgaagctgtgcagtttgacatgaattggaaagtacctgcaatcctttattatgtcaaacggaatctcaattccagatacaacctgaacatcaagaaccctattgaggcaagtgtcttgctggctgaagcctcgctggcacggaagcagcggaaaacacatactacctttattccactgatgctgaatgagatgccacagattggggacctggtgggtctggatgctgagtttgtcacccttaatgaggaggaagcagagttacgcagtgatggtaccaagtctaccattaaaccaagccagatgtcagtagccaggattacctgtgttcggggccagggacccaatgagggtatccccttcattgatgactacatctctacccaggagcaggtggtggattacttgactcaatactcgggtataaagcctggtgacctcgatgccaaaatttcctccaagcacctaacaactctcaagtctacctacttaaagcttcgttttctcattgacattggagtcaagtttgtgggtcatggcctgcagaaggacttccgggtcatcaacctgatggtgcccaaggaccaagtccttgacactgtctacctgttccatatgccccgaaaacgaatgatttccctgcgattccttgcttggtactttctggacctgaagattcaaggggaaacccatgacagtattgaggatgcccgcacagcccttcagctgtaccgaaagtatctggagctaagcaaaaatggcactgagcctgagtctttccacaaggtgctcaagggtctttatgagaagggcagaaagatggactggaaggtgcctgagcctgagggccaaacaagtcccaagaatgcagctgtcttctcctcagtgctggcgctctgactacccttcccaaagaaccacggccctctccctttactgttctatagccccagaactgggagatggcttcctaagttggctataccttgtccacttccagtactggacgtgctcagggtctagggtcacagatggtgctattaattgaactggaacacagcagaattgttgcaaaggttctaggagccagattcattccttcttcattctttgcaaaacagtggtacagacatggagtctagaattgacccagatggaaagtaattggtattcttaatatcctgggtgactaatatccaggcagagaagctcctggaaccataactgtaagttcctagctggctagggattgaagtcctggacagtgacagaggataccacagtagttcaagacttagcacaagtcaccaactgcttcagggatacctggaggggccagcaagtagagtgttggtggcccaagcaaaccagtgttgccaataccattgccaaaagggcctttggatcctggacaaagcttggctgccggcttcatttattcctgctgatggctgagaagcatctgtcttccatcccacttgcctgtcccaagttttgttccattttttaaaaatttgttgtaaactgcatgttttataaaataaaaataaaatatcgtttgttatttatctcattagagaactgctagtgtgggttctctggcttcagtcttcctctccttcctttgaaggtaaaggtccggaatccaaagttatggatatgaaagggtataattaggccgggcgcggtggctcacttctgtaatcctagcactttgggaggcagaggtgggtggaacacgaggtcaggagttaaagaccagcctgaccaagatggtgaaaccccgtctctactaaaaatacaaaaattagctgggagtggtggatggcgactgtaaccctagctgaggcagaaaattgcttcaacccgggaggcggaggttgcagtgagccgagatcacgccactgtatgccagcctgggcgatagggcgagactccgtctcaaaaaaaggggaaaaaggtataatttatgccttttctgggcaatgctgggtctttgctatagctgcccagtaccctaagtcagactgaagatgtacagtatggtttccgttaattgtgtaagccgacaaactacaggtcccaggatagcttgagacttgtagttgctcacaaagatgggtccggtgctgcggtgcttcctgggagatgtagtttcctgtgtattgaaacctggactgctcgctggccggcagcgcaccgttttgaaggtcctagcccacctgggctggctcacgcgcacgactagccgctcccatacagcacgcccggactctgtcgtcgcttaaggccactcctattctacggctgacccctggtggtcacgtggatctgttcgccacgcaagtctgggtccttcggcgattgaccggggtccttgctgttcgggagcctctcctaagctgcctgttcgcgcgagagtttggaggggcgggtttggggtcggtgtctgattggggctcgcaccgcagcacgctggagtcccgcttaggtaccagttagcgtcaggggagctgggtcaggcggtcgccgggacaccccgtgtgtggcaggcggcgaagcgctctggagaatcccggacagccctgctccctgcagccaggtggagcgaccccattacgctaaagatgaaaggctggggttggctggccctgcttctgggggccctgctgggaaccgcctgggctcggaggagccaggatctccactgtggagcatgcagggctctggtggatgaactagaatgggaaattgcccaggtggaccccaagaagaccattcagatgggatctttccggatcaatccagatggcagccagtcagtggtggaggtgccttatgcccgctcagaggcccacctcacagagctgctggaggagatatgtgaccggatgaaggagtatggggaacagattgatccttccacccatcgcaagaactacgtacgtgtagtgggccggaatggagaatccagtgaactggacctacaaggcatccgaatcgactcagatattagcggcaccctcaagtttgcgtgtgagagcattgtggaggaatacgaggatgaactcattgaattcttttcccgagaggctgacaatgttaaagacaaactttgcagtaagcgaacagatctttgtgaccatgccctgcacatatcgcatgatgagctatgaaccactggagcagcccacactggcttgatggatcacccccaggaggggaaaatggtggcaatgccttttatatattatgtttttactgaaattaactgaaaaaatatgaaaccaaaagtacaaactgtgttgtcttttcatgcctggaattgcccttacattaagcttgaagataaggagttatatagacaggaaagataatggaggagaaagaagagttttgggattgatacaggataaagatggagggaccagcaagaacagagacaggaaggggaaaatggatgtgaccaactcagctgaaaagtaagggctttatcggatagggacagacgaggtaaggaaggttgtttaatgagaggccttgcttgccagcctaagcttttaaatttgatgccagtggcaacaataaagtgtatctatcactagccattgtcaatctggactataagtctgtccacaattctgtgtgtagagattccagactggggcatagggatgaaaacctaaaggataccttcttttgggaaattctttttttctttttttttctgagatggagtcccgctctgtcgcctaggctggagtacagtggcgcgatctcggctcactacaagctctgcctcccaggttcacgccattatcctgactcagcctcccgagtagctgggactacaggcgcccgccaccacaccggctaatttttttttttttttttttgtgagacagaagtctcgctctgtcgcccaggctgaagtgcagtggtgcaatctcggcttactgcaacctccacctcctggttca

SEQ ID NO: 1348 - protein, 1186 aa, Homo sapiens; identical to SEQ ID NO: 1330

SEQ ID NO: 1349 - DNA, 42128 bp, Mus musculus
  misc_feature (1)...(42128): n = A,T,C or G
tgtgtcggcctttatgtaatctgtatatatatagtagggaataagagctacagatacatgcctttaaagggctgtttcttaaggctgttacaaggagataatggtatttcaactaattatcagcaagtgacaacacatcccaccacagatggactcttgttcttctagcatttagacgatatgaaaatactgggtgcttcaaagtatggaaggagcgaagggatcatcaaaccttgtcctggatgaagactgcctgttcattttttaaatatgattttcaggtcctttgcttaccaaaggaggcccaattcactcaaatgttttgagaactgtttaaataaaggcaagaaaaatttaaaaaaaaggaaaaaggcaacctctttttttctacagatttatttatttattttatttcatatatctgtgtacactgttgctgtgttcagatacaatagaagatggcattggatcccattgcagatggttgtgagccaccatgtggttgctgggagttgaattcagggcctctggaagagcagtcagtgctcttaaccaatgagccgtctctccagcccaaaaggtaacttcttaagaagaagcccaacaagctcactggggtgtctaagatcaacacacaaaagtcagtctgcttttatctgccagcaacagacaattttaaaaataaattaaggtagtaacctaacatagtaatattatacaaagtaatgaaatatctgtggatattaatacaagcaaggaagtaaaggacgcgtgcgctggaaactataaaatgttactgaaatgcataagaagaccaaacagacagacagacagacagacccagaaaggcgtctgcactgatggagtagcagaaggaatattgctaaagcactagtgctacccaaagcaacagaaaaactgtgcaatccctgtcacagctgtaatggccttcagtgaagggactgagcccagccccagtgcttgcggaattataaagaactcaaatatccagagcatattgaaacagaggactccagaatcaggagccacaggattcactctgaaaactccagcagtccaatgatgtggcgctcacatgacagaggatggagagatgattcagtgcccaagagctagtcctgctctatctcaggcctggagctctcggcacacacatcaggcagctcacactcatccatgactccgactccagggggatccaatgacctctctgaccttctaatgcactgacactcacgtatggacccatacccaccccaacatgaaaacacagaattaataaactaaaaaatcttaaagacacatagagagagagccagtgaacaatggaagagaattgaggaaccgagagtctagatagaaatcatccatacatccacagagttgatttcctgttctactttttaggatttctttttattttatgtatatctgtgtacatgcagtaccaacagaggccagaagagggcaatgggtcccctggaactagagttacaaatataattggccaagggtgtgctgggaattgaacctgggtcctttagaagaatgtctagcatttttatcctatgagccatctctcaggtttcacagaactgatttgaacagatggcaagatcattcagtggaaaatggaactatttcatcagcaacctatagaatgataaagtcataggcaatgtcacaggcaaaatgagtgcaaaatggttcctcagcagaaacatacgacagtatagtccctctgaagacagttactcaaacactctgtgacagttccttaaaagctggaacatggtacatgttagtgaaggtgtggggaaacttgaatccttgtccatggctggcaagttctcaagaagtcaaacacaggctggggagatggctcagtgggtaatgcggttgctaaggcagcaggaggacccaagttcaggcccaagtactcacataaaaaccggcaacggatgggtttctgtaaccctagccagtctacaaaaataccaagttcgctggagtgagtggggccaaatgagcagggctggagtgagcagaggtcctgagttcaattcccagcagccacatgatgggtcacaaccatctgtatagctacagtgtgctcatatatgtaaaataaataaataaatcttttttaaaaattacagaattcacagttcaatgagagaccttgcctcaaaaacaaaggtgaagaagcaacggaggcatcctgagggctggaatgagaatggcgcccagaggctcacatgtctgaacacttggttcccacttgctggaactgttggagaaggattaggaggtggaagacgtgagtcactgggggcaggatttgaggttttcaaagcctcatgcaagccccactgaaatctctgcctccaacttgccatcgagacgagacctgtgctgctgctctagccaacgatggtcatgctttgctccagcatcatggactggaacactctggatccttatctcacttaaacaaactcttttatgggttactttggtcatggtagtgccttattacagcaatcaagagtaactaagacagaagctggtagcagggagcagcctcttgctatgaagggcctgcctgtgctattctggggaagaatatagaagtctttgaaacgttggactaggaaaatggttgaacactgtaaatggggattaatggggaatcctagtaggagcttgggaggcagtagtactgagagcagtggagactatggtggcccatgtcagaggggacaatattagcacctgggctagagaccattcttgtgatattttggcagcctgtagctatttttctgctcttgttccaagaatttgcctgaggctaaattgaaaaacaatggactaaatttgttggcagaggagatttcaagacagactaacattgactctgtcatgtgagttagtagtgatcactctacaatgaaaatgagcaaacaaggcaaaatgcacagcttaaagagagaaagggcaccagggtaacttaatgttggagccaaggctggtgctgaaagaggaaaagagattaaggagagacctgtctgaaatggaatgaagggagggggtccccgggcaagaccccacaagttaagcttcacaactgtgagaggagaaggcctaggaattttctgctcttaaaaaaagccacaaatgaaagctgatgctagtgtgactgaaggggggggggcaggttccatcccaagggcacagtcaagctaggcagtgctgtccatgtgtgtctggtttcagtgtcacgaaggaaataaaagtgaagagcttgtggaatcttcctccatgcttaaagagagctgttgaggccaggcaatgtgtggcagggaagtccctgccttgaagaccctgagaggccattccatgatgctgtgaaggtaaaaactgggctgcactggagaccccatgatgtaggaggtgactgagctgtgggtacctgcaaggagagccatagacagggagtggaaccagcctggggttggcaggaggttgggtggggagatgttgcaggcagcaaagctagaagggcagaaccacagaatttgaaattttccctgctagattttggtctcccttggtacaatatttcctctctgtgctccctttcctgccgttcagaatggtttgatattttctgccattgaatgttagaaatatgtgaatttgtaaggacaaattagggggtaaaactaagagattgctttcagtctcagaagagactttgaactcttgactttaaagtatcgagaccaaaaggctatgggaacttctggacttggactgagtaattttgcattatgatatggccacgagcctatggggtcaaggtgctttggatgagaatggccccataggttcatatatttaaatgcttgtttcccaattggtggaattgtttaggaaggattaagaggtgtggtcttgttgaaggcaaggactgggagcaaggcagaccatccattcccagcaatggacagacgggatgctcaacaccttcagtgcctttgaaggagacaggtctgcagctcaagcttgcttgacttctgggacaggatggggagccagaagggacaggacagctatttccccatcacgtgcttccaagcaagccacttgtcctttggccagcttgtatggatcttggatgaaaagatttgggccttttcaccccacatgctctgattccaacccgcttgtttctggttataccaggcttcctgaccctggcctggaaacggaggggaccccagtttctatcttttcttaagtcttaaagccctaggaggatccagactgaggcaagagatagatatgtcccccagtggcagatgaggggactggtatcagtaatgaggaacacagtaaagtcagtgaggtgagcccccctctccaaaactccacctaacagtgaaacttcatttaactgtgaaatgagttcctccagcaggtaaggcccagcaaatgacatcagggtaggtgaggcatgccatggactgtggtgctggccggaagtgcagactacatgcaggttatacgctctaacaatcgggagagccatgctgcacactaccaccagggggcatcctagccccaggggaaaggttgctaccttggaactcccggtttggtgggttattttgtacagaaagagccttaagggaagaaacgcccaggtcactcaaatcccaggcctaggggcctgagattccatttgataacaagagacattctggttctagagttggtaggaattttaaacattagggatggcatgcatagaattctgaagtctctccaccttgcagacatgaaacccaaaccaacacaggagaattgttgatggtccctggggtgccatcatagctccctctacccacctggatgcccagagagggtcactgggtcagtcatccagggtcacacaggccagatgaagagtggcagcaggcaactgtcacacagtgtgaggaggaagggacagactggcccttcctttgtccatccacctgaggtccagacactgagcacacagctatggctctggcccacaacggctcctgcccttgagaacagagagtaaccctaatcacataccctgccatcccattccagaccacagctgagcgccacacggagaacaaaacagaatgaggtaggcatgggggtcggggcaacttcagtctgtagtcaggcacaggaaagccactcccagatgatttgtgggtggtgcctacagaaagtctggggcaggaaacaggaagtgagagcagacagaagctgctgcgtttgctaggttctaggtatcttttccataaactagtttacttaaccccagtggtgaggtagtgaggttctcactcccatttctcaataggaacctgaggactgtgacaactaactttgttaagtaacagaaccaggtggtctggttccagagttggcgggccacctttctgtttcccaagtccatggtggggagtgaacagacctggtgctgagaactggcctccatcttggatgcagggtaagagcagacgtgttaacacacattcacttgggaagtccccagcctcttgccgactagtcccagactgaagtaaggctttcagggacccttccagtcctctagtctcctctgaggcagtccagaggccccagatccctgcccccagcctctcccttggcagctaactgggccacctcattctaaagggatttgactctctgagacaaccggagactggtgagaaaggacttagggattagacagtgatacccgggaagggacttaatcagagggcttcaggtgtgggaagtgggtctgggagaggattggtatctcttgacaaagccagggtggactggggaacggaggaggaagtggcaacccaggggagagagggatggacttagttctcattttctcattgtcttcaaataacccatgacaacaacaacaacaataataataacaacgacgtcccgccctccctgtgcattcaccactttcccacagtggccccaggggaaaaggcaaggattagtttgcatgctaggctactagcacttggagaagagaggtaacctgaggcccttgcagccccacaaggcagggctaagaggagaggaccttcctctggggctgccctttgagttcaagggctttccagaaagttcctatggccctggggttgtggaagtagagtgttccacaaatatttgttgaagggtttaaaagagcgggctgtgtttctgtctcacacccctgtgacaatctttgtaccactttgtctgctatgggcatcaggagatctgaggtcagggcaccaggggagggactttgactctgaggccactgttctccattgggtgaggaggccccggaggcacaagcaagtgaccacggagggaacacggtgcccccgttcttgctgtcacacccatgcatgctggtgctgaatagcccccataacactttagttctgaggtacagaacaaggctgacacttccagtccagagctcttcctgtgcccagtgctgctccctagaagaatttaaatcccaatgccctaattcctaaaattaaagctcctgagttcttctcttagttgtccatacctcctctgcctcagtccccagcaaggtgcactcagaaccacacacattatgcctccaaagcttacgtccaggcaggcagccttaccctggcggtcaggtccttcctgtcagtccaggtgacagtcacaacagggaagagtcctcctggtgaaggacaagagagggcttctggttggcagaggtcacattccaatgggcagatagggcagatggtgctggcaacagctttgggtcagggctttgagggccaagcaagagctggctgaaagaagtaagagtagtcaacaggggcggaggggagacatgtgcttagggaacagcagggaacatctctgaccaataaggaagtgtatggaaatggggattttttttggcagttcaggttgcaaagaatgctgggaagagatggagtagccttgaagccagacagtgggatggggtgacttctgaagggtcagcaagtgatggctcttgagcagagggaagtagtataccttgcagggagggagatgtgcagagcagggggagggaaatggaggaaaggtaaggtaggaaggagagggcctcagtagccagctccgaggagtctccagactgtttatctaggatttatattatcagattaactgttggcctccccacgggctgaacatggcaaatctcagcggaagctggaaggggcgagttgtttgctcagtctttttcttggttatccactgcttctgggcttggggagagactttagggactgagtcccttggaataaacatgccccttgtcactttttgagtggaccttgtaggcaggttcgtcttgactgcaggtgctcttctgtaacacccctcacctcagcttcctccatacaccatgtgacttgcccattagaggactgaccagcccttctaagagaagccttctgcacgggggtttaaattgctgggggctgcagaaggggctgttctactttctttagtaggctctacactggccctgggaggctgtaaggctcttgaaggcctcacatccagcgaggaaggcagctctgccctgtaccaagccagaagccaagtgaccagggacacctgcactgcctagaaactctgctgaggtcagcctctgggcctgccagccacatgctacccctccgcccacccttcatcagatcaggaagccacactaggggcacagcagggtcctttcctatgccaagaacaggcctattgccacctgccttgtttctgggtgaggagagacaggtgggagacctggatttgaggcagctgaggtttacctctgcattaatgccagcatgaaggaggggtccaactgatactttcccatcgcccagtaccctacatctgtcatgctattgctgactttgggcaagccatggcctccttgagcctattccccaccctggcccccatccctgccgctgtgctgttaggcgaggccacatgagctttgtgagatggggctgacttcactttccttccagaccacccccagcacagagcgtcaagaccctccccttctgtcccccctgctttcccctccaatacttgtcattctttgagcccaggctggccttcctaccttagccctgagtgctgtattacatatgtgttccaccatgctccatccatgtttataggagcaggatgcagggtttgtaggactctgataactgaagcaaggcagtgtgtcccgtgggtctcacggtctagaaggtcaatgttcctaaggaaggtcgcaccaaggttttaggcaccacgtgtcctgccccaccctggtcactctgctgcctccacatctctgactgtagctacactttgcacctgccaccagaacttagctcaggctactgtgccgaaagaagttgaggattgtcttcttcttggccatctgccttgctcttgtgttctctttagtaagtttgggaccaaaaggtggtgtctaaatattcctgggttccagaacaatgcctcctgcttggcatacagtaggaagacaaaatggccctggccctgtgaccaggtatcaccatggaagtaagatcaaagtggcgagggctctagcaggagaaggctatgaactctattgtgtgagccagaagtagtaactggggggcgggaggcagtctgatggtataggctggacaagaggctgctaggctacagctgtcagagtccacccactcactagtcaaacttgtcactagcggggagtccgcaggctcttggccagagctgggaagcagataagcacagcagggctgctgtgggctctggcttccagtgtggtttcctctctgtctagcctacggccaagatctggctaggcagccagcaatggacagcaaggaggtggccacaagaagtcaaacctgagaattgtgtacattaacttccattagcctcctgcccatgatcaccctcggttagagaagaagcaacagtgcagtgaggcaaaggaccccgtagacacccgtgggacacgggccctcaaacctgagcctcctcacttccacagaggaagcagagcatgccaactgagatgtgagagcttcaggtgtggctcccagagagcagggaagatcagacgcagagacctgggtcttagtggggaggctggtcttcctttctcttcagctagatgccatggtctttaccatgcctgctctgcaggtagagggaaaaggctgtccactccatttggtttatttgtttgtattctgggcttgcctcaagcccaataaataagctaagggtgatcagaacttctgcttctccaatgctgggatctcaggtatgtgttggaatgtgccactatgaccatgcagtgctgggaatccgacttaaggtcgtgcgcgtaactcagtggcaagccttctgccactgagttacatcggcaaccctgggggtcaactctcactcccaagcagagctggtagtagtgaccataagcagatggcagagtgaacaccacagttcctacaggcagaaagacgcttaaggggcatcccttttcagtgggcaccagagagctgtcaacattttggggtaaggaaagctatgagagcagcccggtccagccttgtggagtcgcaccttagaagacgtcgtttgctagagctttccagcttcctcttggttaggatgaggatccagacccaagtagctcctcaggtgtatgagcaagcattctggctccaatccagggcctctgcgcgtctcgccccgcccctcgggctcctttaagaggcgggtcttggccgccagccccggggcctcggccaaagactgggactttactccagcggctgcggcggcggcaaacgagtcggagctccatcagctgccgcaggcaccgcgccccaaggctgagccacgatgagcggcagagtcggtgacctgagccccaaacaggaggaggcactggccaaggtgagcttgctcttggtctgtctgtggccctcgctcctggctgaaaagcggctgtaagggactgtcctcgcgggcgggcgactgatcgcccccgcttggctagtgcccagcggaccgcttctccttcagggtgaggacctcgggaagtttggtcatcgcgatcttcagcatgagcagccccagaggtgcccccttgggaagaagtggttgcttggaagccttgggaggcagctgagggcacaaaggcaacattcatcctccgggctggcagggactggtagcagggccgtgggacaggggcagggccccaggtttcctcccatttccgggaggtttttctcttttggggcagtggcatatggaagggtccctgacagttccttggcaaactccccctagctctttcaaggcactaagtcactgtgcgaccttgggccaaaccctgtcctgtgtgctgtgctcttcgatgaaattagaggagttgtctgtcgggcacctcttgtgtgtgaagtctaagatgtccgggattcactaggttggaatcctttcggagagaagagctctccccaccctggcaacccagacccttgcctgaacttagtgatgccactcaaaaggaaaggacctgaccaggctttgccttggcacctgggcagacagggacttatctactccattcaagttcgggagctggcacttctggccaaaagactttatctcctcagttgcacgggatcagaattgatggggtccagccccagtgttcccagttgtgcagtttcttatttattccagagtgtggcagcagatgtggctgctgtgtgtgacttttttcccatgccaggtttgctgctgacgtgcaggctaagtctgttgggcataggtttggtggggattaagccaggggctaggtgaggtccttggtgaagggtggccttctgcttgttgtttagatgaccattgtcctaactctgggagctgcttttgggggatgggagggtctgattagacctagctgacctaaggcaaagggcagaggtggccagtcctcattggtcctctctggaggtgtcctacaggtcagtaaccagataaaggtctctgctgttgtaggaggcttggggctgcctgtttactactgggtagtgagagatcagggataggggtggctatcctgggtcactgtccacctcccttggtggctttcctagtatgtttcccttttgtggccacctgcaggagctgtctgctccatcatggttgtccacccccctcccttggcttcttttgtagtctttcaaactagctccactatcatttttgaacaaagtcatttgagactaccagcttcctttcctttgttccccattcctttaccaaggcggcaggaaggctgcagaggaaagagcctggatctggactcacatctgcatccagatgttggaagtgttgctgagcctctttgtctttcatctctccatctgtaaaatggggacagcgacacctctaggggctctgggagagatgtaagactctgggagagtgccaagaccagtgctgtacacatgacaggtgcttggcatacagacagcgtttgctgtggcatggccagagtgcctgctatctctcactgttggctgggaacacacccacttgcccatcagattagcagggagatatgctcataagtgaggcagggcagtgtcctcttccctttctgtgccctcctctcctacccagctccccttgcaacacagccagtgtctacaatcgttgtaaaggagggctctggcaaaggccccgatggaggagtgctctgggcagagggagatgggcccgcccactcacccagctgtctctccctatagttccgagaaaatgttcaggacgtgctgcccaccctgcccaatccagatgactacttcctccttcgatggctccgaggtgagggaagaggggctgggacaggggtgtgttctggacaatagaaggatgtcctctggaatccctggcaggctgggacagaaagacagctggcaatccccccaggccccagcccttctacaggatacagacacggaagctcagacaggtgaagggacttgctgggtgagctgcaggcaggaagaagatgcgagtctctgggtctggactgtcagcagccttttcgtttactttgtaagtctgctctgcagacataaggaaagttaaggcccagaaaggccctactatgtggaaagttgaagccagagctgagattaaaaccaggggtcctgatcctgtcagcctgaatgaaggggactgtgcttggggactgaggaaggcattactcccccctccacagaccagggtcttgagttctagttttagccatgtgccagcgtggctgtgacatctgggccaaggtcacagatctctaggctcctcctctgagaagtggattaggcagggtgcctaacctttttgcaagacatggcatgacaaggaccaactgtggaatggtggggacatgctgctagtgtcaggatcagactcggcccctactcctacaccttgtgtcctcttccctctccttttccatttttcgaggcaggtaccaacttccggactcttctgacacactttcatttttctttatagaaattttattgccagacatataaatgagaaaattctccagagtttgatgagcagagctccagtttttaggtagaattctgtcataaacgttaagaggacaagacctgccctgtggcatatccacacatctctgggccccggaagactagcaacagacaaatagatgtcatttttgtttccagaaatttaataaagctgacttattcttggaggcctgctagcaacaccccaggacaggtgcacccaggagagcgatgcgtatgggcctctggaagtgtcattggcccacccttaccccgccacctgtatgatctggcccctttcccagtccacctagagagggtggaggggtggtgtgggggtggcaatgaagtcagtctatgctggaggaaattttggcttagcatttgctgaaagggtaaggctagaagaaggtgggcagggaaagtgggaagatagtagtctccttaaagggccagctccaagatgatccggtcctggagctgctgctaggaggcagaggagtgtgtgtgtgtgtgtgtgtgtgtgtgtgtgtgagagagagagagagagagagagagagagagagagagagagagagagagagagagagagagagaaagccattggacagctctgccactcgggccagtgtggggtcttggcagctggtttcctagacactaaacgtttgctagcattatcctgggatggcatgaaccacttgtataagatctatttgatagtttagccagggcctatgcctgggactagccatacccttgtaggatggccattcccattttccagatgagaaaacttagtcagggcaggggacttccctgagggcacaaagcacaatcagggccagcaccttttccagcaagccacagctccttctttgaagggagctgcttgttcctgaaggcaagcattgcctcgtaatcatctttgagctgctgaggatcaaatccagggtctgtctggtgcatgccaggcaagcattttttttatttgtttgtttgtttgtttgtttgttgttttttggagtcagggtttctctgtgtagccctggctgtcctggaactcactctgtagaccaggctgacctcgaactcagaaatatgcctgcctctgcctcccaagtgctgggattaaaggcgtgcgccaccaccacccagccaggcaagcttttctatctctgagttacacctctggtttcaacgtctgcttcataaagcagaggaagtttcctctctgtagtgtattgtgtctccgattttttgggcagcagctctggcttaatcagaccctattccgaatttaaattagggcttttgttgccaaaaaaaaaaaaaaaaaaaaaaaacccaaaaacaaaaacaaaaaaccaacctctttttattcccccctcacctctttgattctaaaggagacctttgcagtagaatgtggtatgagcttggggttcagtttttttgctggccctctccacagacacttgagtttccactgcctctctggctggaagtgagatctgggtacccaccccagcaaggaaagtcagtgagcaagacggaacagaggcagtaggagccctgggagagagcatagcatagctgagtctgcagcttacagggccatgggatgggcaaacctggctgctcctgggccaagctattgttcagtgccccaagccaggctttcaggtgctggtgagcagcgtggaaggggcctagaaagaccggactcaatagacacagcagagaagaccctgaaggttggattcttggcagataatcgtcaactggagaagtttccccagataaggatgcgtactgttaactaccactggatccctgttctctcgggagataagggtcctcctctcttctgtgagaaactcattttcatggtctatctcctgtgttacaaaaggacgtgcagttctagcttctttttttttttttttaagatttatttatttattatatgtaagtacactgcagctgtcttcagacactccagaagagggcatcagatcttgttacggatggttgtgagccaccatgtggttgctgggatttgaactctggaccttcggaagaacagtcgggtgctcttacccactgagccatctcatcagccccagttctagcttcttatgtatgtatggtcaggcatacatagtatcttgtccaaggtaaaacacacacagtggaggtgctgcaacacagaccagcattacacttgtccaaaggctgtgccagctgctggaggcacaggaagggtggtagtgaggaaattccaaagcccagcttgccagactggctgctcagatctgccagcaaggacttggcatgcatggtggcggtggcctggccaacccttcctcgtttttaaaaagtattttaagatgtgtagtatgtgtggggtgagcaaggggggaaggacagtgagagagagattgggggatgtggagtgtatgtcacggtgcacatgtggaggggactggataactctgtgtagttatcttccattacaggaattctggggagcaaactaaagttgtcaggttgctgggcatgcacagtatgcccttctatcctttgaaccatctcactggcctttcccgtcttcctttctttcctcttctctctctctcattctaagatagtgtttcaatacatagcatgagtaagcttgaatttcctatgtagtcctggctgactttaaacttgagagccagctgtctcagcctaccatggcaccccacccaggtttgtcagacctttagacataccatcctgacccagatagaggatcggacttcaggagtgcagagtcagggtgtatgctcccgttcccagagagcaatggcgaaggggtcgtttacagcccaaagggcagcctgtaagtctgggttccagggctatcagcagatctagatgccaattaaatccatggaggacatgcagccaggagggacaggtcatagatcagaggccaaatggctcagtctcagaaactctttgaatagatgaaatgaaggggactgtggtgaacagatgggagatgcgttgaagggcccgcctctctatagagggagtggaggcttagctggcacacaggtgtgaaggatttggggtttcagttgactctaagctccacttgaatgaaaggcatgactgctgccaagagaattctgagggtttatcggagaaggggcaaacaagacctgggctcagctcatgaggttcactggggagtgccctgaccagggggacaacatccaaaagggaagcattaggatggtcacgaagtcgagtgtgagacaagacgtttccaaggacaggatgcaccgcgggagggaaggccctggaggaccgcacagaatgcatgttttgggagggctgttgcatgaccggagacaaccctgtctctggagtagagagcaacatacaactggtactcatggcaaccctggttatcaggagtggcctcagggacagtgaaatcttgggttcagatttgagaacaacttgttggagtgggcccaggtgaactgactcaaaaacccgttatactcctttaaagaatgtgtgggtcctttagagaaatgtcaggattagctggaggcatatcaactcctctacctttccaagatgttcggccaactctggccccagattctggggtagctgtgttcatctttgaactgtggctcaatctctcagggttcgatgttatgcggtggcagagatagattttgtccttgtggggtatggccaattgataaaaggatccagggttcactttctctgagatatgaccctttacctgattatatgcccagatactctgaccccactcccaactgccttgaacttgacctgtctactccacagactcagggctgtgttgttttgcaagccctcagtgaaggctctgagccaaagctgacagttggctggggggacacaagggggtttggccccagcctgaaagcgggtccctaagacctgcagtctgacacccaaccatgaccatgcttttgttgcagcccgaagctttgacctgcagaagtcagaggccatgctccgaaaggtgagcatccattgctaccacggttcctcccatctgactcacatcttgcctggacttctcctgcctacccatcacccaccccatcatagattttggtttgtgtgacccagccaacgattgttgctttatccctgagggacaaagtgcatttccttccctggaaatatcaggttttcctacctctggagcaatcaacaatgatattcttgctgaggtagctgaagaaactggggcctccttttctactcctgttcaggtccttttaggggtcacctgtggtctggtggtcggcttgtgctgacctagttcctattcaagaccccacccccaccacgcacctcatgcttcctaattcttccgcttcgtacttcctaaatctgtgtatttgcagcatgtggaattccggaagcaaaaggacattgacaaaatcatcagctggcagccaccagaggtgaggacaaattatcccactccattcctgtgtaaggatgcttctaagactcacagttcatatcatggctgaaattgccaaaggagtccctagagttgcaaaataggtatcttcgggcacccaagggagagaggtggaaggagagaccagtgaacccgggaaagacgtggatgttttgggcctgcccaccaggtgttgttgctatgtctttggccaggtgatccaacagtatctgtcaggcggcagatgtggctacgacttggacggctgccctgtctggtacgacatcatcggccctctggatgccaaaggtctgctgttctccgcctccaagcaggacctgctcaggaccaagatgagagactgtgagctgcttctgcaggagtgtatccagcagaccacaaaggtgggtaggtggcctacctgccaccgaaagtgactggatcacggtggaggcattcctggagaggcaggatgtcacatatgggtggaggcacagcctcagggtttgtttttcatagacctgacatctcaaggttttagatgaacataatgtcaccaatccatctttcttctcctctctctctctctctcgtttcctctctccctccattcctttgcctggagactgaacccagggagggccttgtgtgtgtgttaggcaagtgttctactccaccactgaactgcacctccatattgtcatgcttttgctaagtaaaacttaaaattcccatctgttattgccacaatgaattcccacaaagtataggaacggtgtacagggaagatctgggaatgaaaggcagtcctttacccgaagacgcttggcttaagaagacctcactagggcgaggaatggatctcagttggtacagcgctcacagcacactcagggcttccccacccactacagcaaaaaccaccttgcattgcagcaagctgagtggaacacgcctgcaatcccacgatctacaggtccgaggcaagagggtcttgattttgaagctagcctggactatatagtgagaccctagacacaagcaaaagaaaagcaaaaactataaattattacagctggagatatcgctcagtgaaaggcagctggcctcacacaggcaggggcctaggtttaattctcagctcaacagaaaacccagaaagacaaagaaaaccatctcaatacattgttggagaacttttgtttctgtgaggaccagtgagatcttattttgaactaagctacccttgggcaagtatgggggtgggggtactcctggcacagatggacccagaacccctgcttttccaagtgtactttcaagagatcagggcgacagttcccttgctaagacaaagactgaagacatggttcagccggtaaacagacttgccagcaaggctgagaacctatggggtggaggaggagagctagcgtccccaaattgtcttctgcactgcacactgtagcatggactcacagacacagacacagacacagacacagacacacacacacacacacagacacacacacacacacagacacacacacacacagacagacagacagacacacacacacacacacacacacacagagagagagagagagagagagagagagagagagagagagaaatgtaagttttttaaaaagaaaggaaggactgaggaccaagacggaggtgtccctcacctttttccccacccctaccccccacccacaagttgcagaagtattaaagtgtgggtgcctctcagcactattatttagatgctcacaaagagcccactcagtacagaacccctgagaggctgggcacacaagagaggttcaacttgctgcttccttagagcttaggcaagatggagagcatctatgcctgagtgagaggcccaggggctgcattggtgctaccagggagcacagtcattggcaggaagacagaggccctcaggagaacccaaaggacagaggggacctcagacatgatcttgatccacccagtcatttgcaagatgaggagtttgtctaggtcagtatccctccataggtgatacctgcgtgtgaaaaacctgggtccagcccccatgcactgcttgctctgtgtgtacctgagcggtcagcatggaccctgaattagttctccagcagggtggagtgatggctgcctctgtctgtctgttccctgtagctagggaagaagatagagaccatcaccatgatttatgactgtgaaggactcggcctcaagcacctctggaaacctgcagtggaggcctatggagaggtgagaggcagggtgtgggggcaggaggaactgctcagctaggcttggcttactcagagggtgggggggggcgccgtggcctgcaggcctgagctactgaaactagaccaattctatcccttagttcctcaccatgtttgaagaaaattatcctgaaacactgaagcgtctgtttgttgttaaaggtaagttgcgaagttctggtgatgaagtcacatgggaacacgagactgaaactattacttgggggcagactgagtgaacagtgagccaaagaggtcactgttcctgacgttgacccaaggttaaggtcccaagtgcctgacgttgaccttaacctgtacagatgctttacagctcccagagcatttgagccaccaggcccagtaggcttcaggctggtgctgccatagtgggaagctaggtggtcacaacccttgcacagattgggagctggacctcaaacatgcctggctgagcctcacgctgagccgctgagcccatgggcagaggtgggtggtactgagttaatcttgctctcagcttcacatggtcttgtctcttccagctcccaagctgtttcctgtggcctataacctcatcaagcccttcctaagtgaagacactcggaggaagatcatggttctggggggtaagtagcccagactctacagaggtgtgtgaaccgagttggttctggctttagaggtatggccacagcctcgggggctgtcttctgctttaggagtagttgggacacaggggcaagtggagacagtctgtgccttcctgttatgtttttttttttctcccttgcctcaagtttatttgtaaaaacaatataggtcactggtaatctgcaaatagcatgcaggcaggtgtgccacagcagtctgtctgtcttcacgttggcaggagcctttcctatgggaccttcacagggacctgggcacctttgggagcctgggctggagctgaagcctgggccttagctggagctgtggcctctgccttggtttgaactttgggctttggttggcagagcctctgacccttggcaatgtagctttgaatctgcttcccaagcttggggtgagcgataaaagccagatggctgagtttgcggctggggccctttggcatcttgggcttgatggcctgaggcttcaccagggccttgatggcctctgcgcgcgcactcactgcctttgcattgttggcctgcatcttcttcaggcctttcttgttgtgcgtctcggcaaagtgcatgttcctcaggaacttggggtcaacccccttaggagattcgtatctttgagaccgggttccttgatgccatttctatgccatttgcggtgggactggttgtgtgtggtgtggttcttggacttggccacgtctgcatggtaactggcggctccccaccttcctgttttcataaggacatactttcttttccacatactctagaagcaagccctgggctcaccatgcagtcagagagcaatgggattcttatccttgaggggcttaagctaggggaaaggggacttcagagaaaaggccatggaacaaaccagaaggcactagaaagagcatcaagagggtgccatggagatcattttgggacaaataccttttctgtgccagatccaggatgaggtgttgcgttgccaggattattaagacagagtcccttggctagctctcagggaagagagatacaaacgtgcatggtgtgatacatggaagaaagaggaaaccacaatgtacagtcacaccttggcacaacacccatccctcccgagttgatatgagagccatgtccgcccaagctaatacagcaacgtgagagagctggccacatgaaacaaagcagaaaagtaaaaactacaaagccgggtatagcaaaagtcaagactgaaaagggagccagagccaggccacaatccaggacaccatgctgagaggctagatcatgactctgtaggccctgagcaccagagaagtgcttggcagagagttccacaactggcttgtactcagcagcaaggccatgaaagccagatgccgggtcgcatgccatgtgttgcccatgcaagagatgatgtaaactgaggcagtatcctcagggaaagaggaggaaaggctagctgggcttacaacttacctaggaagcaaaacatcagagttcaatgggcttcacataatgaatggatagtagtattcggccggagcgaacaactctcgggacgaatgtgggcccactgaggctggccacgcaagacctacctatgctgagcatgcaggagtctgaagtgaactttgggggggtttccaagttcaagtgcaggccgagtaaacggagctcatggggaagagtgggaagtcactagtgacactggcaaagaagtagggactgtatatgcagagaagtggggagaatgtgtgaccccaaaaccagccaggaagacacacaagaactaggtcccctggcaacaaggagtggactgatggctatgaaggtggactgaaactggctctggagctgagctggcaggagtaatagagattctgaaggtgcctacaaggctgctttaaataacgcactgcacagggtggttgtgaattgcttctttttttttttttttgtctctgtttttgtttttgtttttgagacagggtttctctgtgtagccctggctgtcctggaactcactctgtagaccaggctggcctcgaactcagaaatcttcctgcctctgcctcccgagtgctgggattaaagagtgaattgcttcttgacctttgggctaaggtcaagtgagagcggcaacttggggctgggaaggtggtgaacggctatgatcccagcactttggaggctgagaagctccagttccaggcctgtctgggctgggttctaagttcaaggccaacccaggtttcctagtggggccctgtctcaaaacaacagtatgggctgggttggttccacaggtgggcagatgcttgtcatccagggctcatgacctgagtcaagactgccaggttccacagtggaaggagagaaacaactcccaaaggctgtcctgtttccacacatgcaccatccccaacacacacatgcactgcacacacatatgacagcaatagagttttaaaaaaagaacaaaaatacatttatgatatctcaggactagggaggcagaagcaggttgaaactacatagtgaattcaaggccagccttggttactgagaccctgttacaaagagaggggcttaggcgccagagtgccagtgttggctgtggaggtatttcctagagatgggaaagcctctgccttaacccagctctcccgctcagccgggagaagatagaaagtcagagcaatcagtttttatggtttctggttttactgctgctaccacccaccaagtgctgaggtggtttggttccctggcagcagagctatgtaggaggttcagtctgttctcctacccacacttaaaattctttcaaccaaatgtgccttaggcacattgggaagaaccgagatccccaacagaggagagataaaagttacttccgggtggtcactggagtttagcagtgtcaatgaaatcaccccaaggccacagatacccgagggtgggcagacacaggacagtcagagttacagtcatctgtgcagaggacgtgaggctagtccccggcctggagctgctgactgatagtcagctgatagtctatataattagagtggtttgtggtattaaggtattgtgccaggctagtctttcttaggaaaatagttctcagcattgctgctccattcaggagaggatttggttcgaaaaacaacaaaaagcagccaatctgctcaaaacaagaacacaagtgacgtgggcagagtacagacaagtaagcccatttaagaggtcactctccagtgaggtactcactcagtaaatcatgactcagcccagtgaagtgtgggagaagaggggagatcagcatcactgggtgagaacccgtggattcaagacttctggtccggccgtgtgctcctctgcatggaatacagttcccacctttgtccatttggcttttattttgatgtttgtatccttttttgggagaggtaatatactaatttacaaagccctcttagatatcctcaattcattctgctgccctcacaatcctgcacagcaggcagctcagaatgcagtaggttcctgaggttgttgagctggtcagtcgccgtgatgacagcagcacccagtttctgaatcctggaccaaacagggttgttttctgggtagtggctcttcctaactgcataagcacatatgacatgctccggaagtgccaccttgccgactgaaactgatgattctactgaccacaactgtgctgcatgtgtgtgcacacacacgcgcgcacacgcgcacacgcacgcactgtatacacgcacgcacacgcgctttctacgcacgcgcgcgctgtgtgcgcgcgcacgcgcccgggcacgcgcgcgctgtatacgcacacacgcgtccacacgcgcacacacgtgcactttatacaggcacgctctctgacacgcgtgccagcccgcgccgagccgtatgtactattagggcaaggaaaacaacactatataactataaaggaatggaaatcaagaatcaagggggatcctatacgaaaaaactgaaagataaacgacttgagactgaacatctaattccgaccaaacaactggaacacacctgagaaccccgactcgataagctgcgtgaggctgaaactttaccatacctgacctatcccatacaagacccataccctgagaccttccaccaagatacgcacacctaatggacaatggcacctcatacagnnnnnnnnnnnnnnnnnnnntacacgcacacacgcacacacactttataggacacacacacacacacactttatacacacacacacacactttatatacacacacacacacgcacgcgcacgcacacgcacacgcacacacatacacacacacacacactttatacacacacacacacactttatacacacacacacatacactttatatatacacacacacatacactttatacacacacacacacacgcacacacacgcacacgcacacacacactttatacacacacacacactttatacacacacacacactttatacacacacacacacgcacacacacacacacacgcacacgcacacacacactttatacacacacacacacacactttatacacacacacacactttatacacacacacacacacgcacacacacacactttatacacacacacacgcacacacacgcacacacatacactttatacacacacacacacacacacacacacacacacacacacatatatccttttagggtagggcccaccacctttctgcctcttcagggctggccatcaggtatgaagtcttgcctagtgacacctttctgtccttctctctcctgccagcaaactggaaggaggttttactcaaacatatcagccctgaccagctgcctgtggaatacggaggcaccatgacagatcctgacggaaatcccaagtgtaaatctaaggtatgggccaccggctggatgtcagtggggaggaccttagctcagatgtgcaccccagttcaccccgggctctgtttctagatcaactatgggggcgacattcccaagcagtactacgtgcgagaccaggtgaagcagcagtatgaacacaccgtgcaggtctcccgaggctcctcccaccaagtggagtatgagattcttttcccgggctgtgtcctcaggtaggactggctgcttctagggacccgagcttttgtaaacgccagtgggtaggctggggtggaagaacccagctgctatggacacacatacacacacgggtggatgtcctctgcaggtggcagtttatgtcggagggatcagacgtgggttttgggattttcctgaagaccaagatgggggaacggcagcgggcaggggagatgacggaggtgctgccaaaccagagatacaattcccacatggtgcctgaggatggaaccctcacctgcagtgagccaggcatctgtaagtatctgagtcttggcaacacttgaagcacattacctttctgcttatgatgtatcccttcctcagaggactggtcacctcacggtgttagtgcaggaaggggcactctctggggtcacctgtcctggcacaggaaaagtagaattgtaaaaatgcagtgccttgcttaaggggtcccagataactaacagctggctaggcctctgccctgatattcccaagaagaggtgaatcactgtaacaggtgagaacaggagttcagaacatctacttctgggagctgggcatggtggagcactcctgcaatgccagaacttaggaggctaagacaggattgtaagttaaggccagcctgaagtacacaggctttgtccaaggctgactaggtccgagacagcagccagacagttagaagcaggagacgcagaactgactgtgtgggtggagggaatctccacagggcatagcatgccaaaaaaaggccagccctgaaatctgagcaccgctcacctccaggttgaccaaaaagcaggtccaggacacgggaaggcagcttacacatgtcagaaaccctcacagacagtcatttggtattggcttaaatcccttcaacccggaggttatagtcctcaaatgtgtccaacagaaacctttacaaatacataaagctagagggaccaagaagttcctagcagctgataaagccagtggcacagcatatagccacaaaaaggtccatctattacagcaaagcaccatggagccgttaaaaaggacacactgacagctaagatgttaattcacattaagcaggtaaatgtgaaatgctgcgtgtgtggtacatgtttactgaggttgaggggaaagagtatatacagaaaggaactctgggaaacctacactaacttaggatacttatagagggctttctcttccactatttctgtaactatattctacagtgttatgtggtatggtatggtatggtatggtatggtatggtacggtatggtatagtatgatatagtatatatagtatagtactagtaaatagtataaaaagaacaaatgtatgccagccacacacaagccaggcaaatttctaatttctttcctgacagagccaaaggatggagggtagaaaagtgccaagctagggctttgcattcagatctgagctgggcttgccccgctggctatgtgtgtagacttgggcaaatgactcagccttcctaagtctgtttcctgattgctgcaactgggatcttacagagatgccagctcacatgtgataagatctgtgaggctatggtgtgatgtcagagacagagcatgcgactcagcacctgtgcccatcagtgttattattaccaggacaactggagagcagagcattcccggaggctatgagggaggtgggagacatcctgggctcggttgctgaggcagcggcacagggctatctgtactagctctgcagatccttctacccagtagcctgcagttctggtgctccctaccttcaggtacattgtacacaatccagctccccggggagcagggtcaccctttttagagagcagccagatctcaggagaatgcatgcactctgctgcactaagaacaaggcttagcacaggctagacactgtcatccacaaaggaaaaagctcattatacactggaggtttacttttctttaaaagacgaggaagctcaaggctggagacgccactcagcagataagagaccttcctgaggtcccaagttcaattcccaggacccacatggtggttcccaaccatctgtaatgggatctgatgccctcttctaatgtgcatgaggacagacactcataaattaaaataaatttttaagagatgaagaagctatggtagagatagacaagagatgctctcttacacattatgttactagtgtagacactaagagaggatactagaggctcctagccacagaccgtccaagaaacaagacatttatccttgatgtgataagagtctcagatcaaggaagtgcttccccaaaggccatggaggggctggagggctccaactcagttgcttctctctcgtatctgaaggataaacagctttcaatacaaccaggatggaactgcaaatcctcaatttactttactcctccttggatctgttccctgcaagatcgcttacctgcctggggtctgcttatttgctgactttactcctccttggatctgttccctgcaagattgcttacctgcctggggtctgcttatttgctgactttcctcctccttggatctgttccctgcaagattgcttacctgcctggggtctgcttatttgctgactttcctcctccttggatctgttccctgcaagatcgcttacctgcctggggtctgcttatttgctgactttcctcctccttggatctgttccctgcaagatcgcttacctgcctggggtctgcttatttgctgactttcctcctccttggatctgttccctgcaagatcgcttacctgcctggggtctgcttatttgctgactttcctcctccttggatctgttccctgcaagatcgcttacctgcctggggtctgcttatttgatggaggagcagagtcaggccacagcataaagttccccttcccagatggaaaggcagcatgggaggagaggtaggaccgggtgtcatttggaggcaaggttgtagagaccatggattaggtgggagggccgtgcttctgagggccaggtaaccccagagaagtagttctgaatccaagaaccaacatttccttcctacagtgtctactgtccccattactattctgaaatgaaactcagagataatgtaacacacctacatacaacttttttttaatttaaagatttatttattgtatgctttaagtacactgtagctgtcttcagacactccagaagagggcgccagatctcattacagatggttgtgagccaccatgtggttgctgggatttgaactcaggaccttcggaagaacagtcagtgctcttaaccgctaagccatctccccagccccctacatacagctttaaaatcaatactctatctggaatataaggaaaacaaaaggaagccaatgtgaatagagtaattatgaagcagcaggaactcaacccagagctccctgcatgctaggcaagagctctaacccaaacctctggctctagacctgtaatttagacattttccactacaaacatgggagggcaagaggataccttttgttctgcgtccctaaggaacagcatctttcccttgggtctccatgagcctgtgagtacatgactagtgtcacactgagacattcggatgctggagtggcagtgacagccccttcctctgtgcctgctgtaaggcccttgcatctcagtgctggtctaaggagatcacagtacagtgaacttgggttgccaaggctgtcatcagaaccaagaggaaagagtagggcatctgcagggccccttgcagagacgagggactaggagtctgtaggtgctgtgctaactacccgcctcatgcaatctatccaggggtgagaagaggggaagacgtcaagaaagccagaaagcggcccagaagggaggccctgctgcttttgttctgtgtttagctgtcttgaaggggcatttgagtgaaatggaacaagcttgcaaagagacaggctgagaatgaaagcaagcctgttcaactgccagggcttagaagctgtctctgccaactgagtccaccctcttcccagaggaaagcacagctaacagccttctcacctgccagcctaccaaagggtgtctgtcccttcagagacacatttccataacaagcctggcaagtgcttgctcagacacattcaccacaggatgtgagaaaaccttcccttcaaaagggctgtggagttactcctgggtgctaggatcagagatctctgagtgtagacaaacaaaaaggccaaaacgttttggttttacacagaaattaacaaaaatgttacaaattgttctacacttatcatagcctctgcatgtatcttagacattcctcccaacaccctgtcctttgtctatatggccagtctggactcaaacagtgtatatatagtacaggctgcccttgaacttctgacccttaccttcctgtgttgggattacaggggtaccaccatgcccagctaaagctctttctttttatgtcagaaaagtgtttccctatatggattacagcacaaatcccttgggcaattttccttctgtgaccagcccatccttttgtcattatgggcaggcgtgcagcgagcatcctggtcccgtcaatcttcccagagggtaagcagctgattcatacagtctgcagggaagcagaacgggctggggttcccagggtccaaacgagacagtactacagtcaggaatgcaaaccagaaggaagcccaaccccactgtggctcaccgtgtgccctagaacccttggagctgagctaaagtcggactgttgctgacttcagagttgtgaggaagaacgggatcacacatatagactacaaacccatggtttcacacatagactgtatcctcacaagcactgaggctgccaacattattctgcctgtgtaacaaagccatgactttggccttggagaccttttccttccaagctgttacagatgtgagtctctgtcccgcgtctcacttggcctgttctgcattttcacaccagttttcactttctgaacacactcatccagactgagttccaggggaccaagggctgttacaccactttcgcctccatctcctaccacaccaccttgctcagtcagtacaaaccagtcccttcaccaccctctacctctggggggaactgcctgaatgcttggttttctgcttcctcagatgttctgcggttcgacaacacctacagcttcatccatgccaagaaagtcagtttcaccgtggaggtcctgcttccagacaaagcagccgaagagaagatgaaccagcagggggcagacacccccaaataacacctcgcccctgcagcaggcctggcccccccaatgtcttcctgtcagtttctttagtcattttcctgcaaccaattagcccaaagaaactgggctggagggaagacttcagactggacggagctcctgttcagaatcagaatgaggataaatagctagatgggtcctcgtcgtcagaatactaaggggtctccagggaccggctgtaatgatgtctaccctgtagactttgccaacttcacctgcccaggaacagctgagacagggagggaagggtacacaggatggtggcagggaagaacttagaaagaagtgaagcgattggatgtcatactcagggaagccagctgctggggagaaacttgctcctaaatgaacatggaccaaacctccatgattgtaatgatggttgcaaggtagcaggccactagatgtgatgggtatccaaagctctttgaaactttttgtcataagccttgagtctctcgtccccccccccccccaatctcaggagtaacccaagtcagcactggaaggaaggctaacagcccccccccccagaacctcattaactcctgggttccactggctgcctgtttaaaccctccacaagcacaagggtaattaatttcagggatcatagataggaaaggaccaaggaggcggtgggtgggccccaagcctctcactaagtaaccctccgcttgagcagccctacacaaagatgacaattggggctgagacagcactgagtgcacttcccagtccagtctcccacagtgcctgagaaccagtctcctgacaggagcaagggcttggtgggcccttctctgtggaggcgtgtaatagcagcagtggcttcctcttgcctggggatgcaggtagccagggtgggcggtttcccgggaaggtagccatagctgggcaaacatttgagccagggtaaagaggggggccaggcacaggtgaccttgcaataaaaagctcttgaccccacacaacttgagagccaggttacaggctgcccagaattcaggaaggatgccccaggcccttgcggggtctgccttttcctctgaacgaggcgttggcccagcctcgtctcaggaagcggagggagctctgggcaggtgcagggatggcaagcagagagggccgaggctacccaggatctagtcacacatctcaggggcacagcctggccttggtttacaatgctgttaggtacattaaccaatgaataaagtgatcaattttcaaagcaaagagcagaattcattgcccatcgccggcttcctagcggtctcttacattagaccccaaattttcagatgccaagtagcaggctaaaattacacacacacacacacatgttctgttcctttcccctctactctcacgacactcggacacaggcacgcacagagagacagtaacgtccctttcctctcctctcgcgacaacgttctccgaagtcctaacaagttgccttccgattggttcagccggtgagcgtcgtccgccatctttgttcaaggcattcggatgctcccgagagccttcacggtgagggcggaggccccgccccattcggtggttccagacgggttgggcggttctcccgcggtgaccggcgcagcgggtactaaatgggagggaggccgagggttagcgtcacgtggctttagggaccgtctcctaattccgctccagcactctaccttcccacccgcgccgggctcagtccccggtgacccacaagtttcaagaagacacgggctgaaaacactggcttccgaagggagtcggtatacacctttcggatctaaaaaagctaaaagaactgtgcaaagctagataagaccctgttcttacctagctggatattttttgtactgtgtagcctccaaccaggcctgaaactccctgtgtagacagggctggtctcgaacgcacataatactacctgtttctgcctcctacattctgagatgaaagcatgcaacaccatgcctggcttataagagatttaaggccatatttatttgaatttatctgtgtgtctcatgtgtgaatgtataggtgtgtgtgtttgggggaggtgggtgctgcctgtggaaaccagaagtgtcagattcccccgagatggagttacagatggctgtgagacacccgtgtagatgctgggactggaactccggccctctggaagagctgtaagcgctcttaaccactgagccatctctccattctcacccattttgctttacagacgtggtcgttgggaccggggtggggagtggggggaggggcggtgtgtgtgtgtgtgtgtgtgtaagtggcttacatctactaggcggcccaagtaggatttgtctctaggggccatagcattgcccctctgaaatcccagaggattcagagtgcttttgccccttgtaataactccctagctcccttttccattttaacagttgcatgagtcaggagagtggctgtcctctttgtgtctctatttccctactgtaaagtaggaccctacgctagtgccagagcttaaggaagcaaacttgagtctactggacacatgatgactgttataattaattagtccttgcgactgtctaaggcagtgaatgttggcacgcctcccatttacacacgaaccgcggctcagagaaatacacctttcctagaagccgcacacctaagaagattccattctccgattggaactctgacctatttaactccaaaaactagtcatgtctgggagagttttgcattaactgctcagagaaaacaagaccatctgtctgcaaaacccaagcctaggagaggggcttggatgttgtataaggcaattttcagacactccctgcagtggcgttagcgatagcgggacccgtccttcagcctcggactactggcgggttcttgcctggtgttagccaagtgctagtggagacacagttgtggtgagactctaatctgcagcgactccaaccttgccggggaagtcatgtcggagcagcagcggcagggcgccgagcgcgacctctaccgggacacgtgggtgcgctacctgggtgagcgtgggagtgacagacgcagcgaccccaccactccggaggggctgggggcggggggggggggaagcaatggaccgggttgccgatctggagtctgaaaaggggcttagttcttattcggcttggcctggagacagggctcaggagaaggctagggacttgtccaaggtcacacaaccctgttggttcagatctgtccacggggctcttctggaggcacaaaccgagtgtgtgggttgccctctgccatgaccgtgcactagccatggcgtcagaggatctggactcctagcaagtctgcctttcccaggctcttcctaagcttcagttttctcttctgtaaaaagggctgaatgcgaggcactcctgtcgggtgctgactgtaagagcgggctgaggtaaggccttaaaagacctggcacttgatactggtcagtggagcccaccctcagtgattcggtggcctccggtcgcctccctggtgcagatccccagaaccacggctggggactttgatcagtgagccatgaacttcattgtcggtgtcagtccgcgggcctagaaaccaaaaggtaaagttacttgactgaggtcacctgccgcactgtagtttaagaggttagggttagaagcagctttctgtgtagcgcccccttgtggaaagggccagagagttaaatgccttttccctccaggctacgccaatgaggtgggggaggctttccgctcgctggttcctgcagctgtggtgtggttgagctatggtgtgtccagctcctatgtcctggccgatgccatagacaaaggcaagaaggcaggagaggtgagtgttaattaaccctttccaacccatcctagtgtgggtggtatgcagtcttgcagtggggacagccctatccccgttagcgtctcatagtgcagtccataagctaatcttgtttgtaggattgttcatccccacccgaccaaaccatttgggtaggaggtgacagttggtacctctcctggatgtgggcaaatcacccccaaccctgaatgtagtacagcccagtcctccacccagctgccttctaccctactacctccgcatgttcttcctccttggtccaccggcatgcttctgtctataggtttcctacctctgccccagctgggctaaatgtctttgtacctttcaggtgccaagccctgaagcaggccgcaacaccagaatggccctggctgtggtcgacacctttgtgtggcagtctctggcctctgtggctatcccaggcttcaccatcaaccgtctgtgtgctgcctctctctatgtcttgggtactatgacccactggcccccgactgtccgcaaatggaccaccaccacacttggactgctggccatccccgtcataatccaccccatcgacaggtaggggcctttctggtctcagggaccagtcactctgcaggtagagttaggctgtgaactgtgggcacaaaaccggggcagcagaggcagggttgaagtagagaggccatctgtgctcttatcagctagagcggcagagcggcagaaaaggaagcagagtgccttatgggtactggacaaaggtcaagtaaattcacagaaataaagaccagtgctgcaaaatagccagagttagccaggagtgctggattgaagggagctgatatcggcatgagtcaaacttagtttgcaaggtaaatacaaaataaaagtcttaggatgttttccgcacggctggatccaagcatctgagcgctactgccacacagcatccttcatcttcccaaccttcatccatccttcagcatctctccccgtcccgtccttgtgggtttcactctcctgccatgtcccagtgactcatggtgtcctgtcccttacaacatcttacaccccattaaaacttctccgtagtgatagccaagatgccaaggaagattctcattggctccctcagatgaggggcccatgtatgagcagttgtccttctgagtagccaaccctgtgttgtgtgcttgcttttagcactagaggtaggaccagactggagggaacgctcagtggatacagcactgtctgctcttccagaaatcccgagttcaattctcagaaaagacaccacggcttacaaccatctgtaatggggtctgatgctctcttcttgcatgcaggtgtttatgcaggcacaacatgcatatacataaaaaatacagaattaaaaaaaaaagatttatttattattatatgtaagtacactgtagctgtcttcagacactccagaagagggcgtcagatttcattatagatggttgtgagccaccatgtggttgctgggatttgaactcaggaactttggaagagcagtcagtgctcttaaccactgagccatctctccagcccctgttttgttcttttgagataggattctctgtgtagccctgctgtcctagaactcactctgtagaccaggctggcctcaaactcagagattcacctgccacctgcctctgctttccaagtgctgggattaaaggtgtgtgccaccactgctcagctacagaaattattttttaaaaaatctaagagagagaaagagagggggtgggagcacctcagtggtggcaggggtaggctggaggggagcatagcttaccctgaacctcatggtgagtcctttacccactgtgcctcaatttctccagctgtagaaaaaaaaggaatatggctgttatccttggggggaggggtgtaagcatgacttccttaagggaagagaataatcgaatgtatcttgacatggttgctgttggtaccatgcatcgagagtctttcccctagcccttgtgtttcctgcatctcctcatccttggctacctgctcaccaggccttctctctctgtaggtcagtggacttcctcctggactctagcctgcgcaagctgtacccgtcagtggagaagcccagcaccccctgaccctgccctgtgccttgcctggggtcggcccactcacatcaaagaatgtggatacgtggctgtttggggtccatggcactgccatctgggtgggttcacattgatgggagcttagagatgaaggccccgaggagtagtggcagtgagttctgaggtgggacccaattctgtctgcctcagtggccacggttgtgctgagtgggaacgaactctggctgggcctgtcttttgaaatctttttttaaaagtatttattttatgtgtataagtgttttacttgcatgtctgtatgtatgtgcagaacccttagaggttaaaagaggtgattagacccctctgggactggagttagggatgcttgtgaacccccatgcgggtgctgagaactgaatctggttcttctgcaagagcagcaagtgctctgttcactaaagttcctcttagccccgggcccaccttctgatggaaaagttagttcctcccatggaagagaagaatactaaggcccagagagggcagggaatactgagatcatgtgacaagtgagagccagtcttctggctattctaagtcactttgtggtagtgtggctgagcgacttagggaaagatacagaggtacagtatttgggacactcagggcagagtctctggccagcctgttcctgttgcaggagctgctgggcctggtgagaggcaggacaatcacaacccaagtgctaacctaataaaactttcaaaaatggcatctccttttcatttcctcttcctggggataagcagggttgcgaccacagcacagtgcttcctctggaacaggtaaactgagggagaagtgggctggtctcctggctctgcaggaagggctatggggagaacaagggagggatgtgttcaagcctgttcaagagcaatatcagatccaaggaaaagaaaaagggaaaaaaggagtcagaaatgaaggtctaggtggagagaagtgggaggtgtttgtgttgtgggtggggtggtgacttagagtttcatcgctttgaacagacaccatgaccaaggcaactcttataaaggcaaacattcagactggcttacagtttcaaaaatttagtccattttcatagcaggaagcataatagcatgcaggtagacatggtgctggagaaggagctgagagttctacatcttgacctaaaggtagccagaagactgactgttccacaatgggtggagtctgagcataggaggaaacctccaaagcccatccccacagtgacacacttcctcctacaaggacacacctcctaacagtaccactctctatgggccaagtgtattcaaaccaccacattccacttcctggtctccaaagacttgctcaaacacatgagcctatgggggccataccttgccatagcataatgcaacatatttttagtccaacttcaaaagtcccatagtctgtcacagtctcaacattgttttaaagtccaaagttcaaagtctcttccaagactcatgtaatcacttacttaactctaatctagaaaatcaaaataaaaaagaagatcacatacttccaacatatcatggtacagaatacacattatgtcacagtggggaaatactggaccaaaccaagataaaaacccagctagacagactccaaggtctgcatctccatgtctgatgtccaactcctttcagctttgatgatcgcaatacacttctttttcttgggctggttccactccctgttagcagcttttcttgacaggtgtcccatggctctggcatctctaacattttagggtctccaaggcaacttcaactttacagcttcttgtttcagtgtctgggatccacacatgatctgagctccaaaggacttgggtcacttctccagctctgccttctgtagcactctaggctctgcttgattccactccactgctgctgctgttcttggtgatcatctcatagtactggcatctccaaaatgctggcatcattttgactagatgtcaccaatggcctctcataggctcttcatgatgccaagcctcaacttctttgcatgaccccttcaatcctgggccatcaactgcaaaggaggctgcaccctcaccaatggccttccctggcctctcatggtgccaagcctcagctactatccatgacactttcttgccttcaaaaccagtgactcttaacacattaccaagttcagctgcagcaaaaggtatgaccttggctatctttggaacacagcttctttgtgctctcagaaaacacttcccagaatatttcacctcagtggtactggtctcttcttcatcccaactaatttctaagttccagataacaagcatcaattgccctagtaaccccttctattctttactctaaatctaatgccatgtggctggagctgtggagttctgctgcatgctggggttgcaacatgccctccttgttctattacattattaccagctttctgttttcagtgaatttattctctaactaagcttggctatcctggaacttgctctgtagactgactttaaactcagagatctgcatgcctatctcctgagtgctgggattaaaggcttgatctgccgtgcctggatggacttaagcttttctttacttggaactttctctgtagcaggctggttctgaactcagagatctgcttgtatttgtctcctgggattaaagacatgtaccaccatgcctggacctaagcttctcatagccactatgcctcgagattcagatcaaaagcttgcatcatcccctgtcaagatctggattgctgggcggtggtggcgcacacctttaatcccagcacttgggaggcagaggcaggcagatttctgagttcgaggccagcctggtctacaaagtgagttccaggacagccagggctatacagagaaaccctgtcttgaaaaacaaaacaaaactaaactaaacaaaaataaaaacaaaaatatctggatcaaaagcctatgtcttccagcctcaagatatggatcccaggtgtgtccttcatttctggattgtagttcattccagattaaaggtctaaatgaaaacaataacctgataataataatgtctaacatgttataactatctcttgtctaattgcaaacacaaagaataagtttagttgggtgggatcatgtcccaagcccatttaatatccttggtttagctccactccacttcctgggacccctttactctttgaatgatacattttgtatttttttctttctaaccttgctatacttgtttaaattgctcttatcgagagtaaaccagaggataaaaatctatgctggacttttttgagacttcctttgtcaatgcaattaatctgaatctcttcaccttagtctcagacagactcttcagataagggcaaaaagcagccacattcttcaccaaaatatcataagaatgatctccaggcaacatactaaattcctcttctctgaaacctctagagtcaggctcctacggttcgaatccccctcagcaccaacatccttcatattcccactaggatgatccatgaagcccctcttagagcattccactgcttcccaaatccaaagtttccaaatccacattcctccagacaaaagcatggtcaggcctgtcacagcaataccctagtccctggtaccttagttagagttttattgctgtgaagagatccatgaccaatacaactcttataaatggggttggcttacagttttagaggcttagtccattatcatcatagcaggaagcatggcaacatgcaagcagacatggtgctggcgaaggagctgagagttctacatcttggttcaaaggtaaccagaagactgactgttccacaatgggtggagtctgagcataggaggagacctccaaagcccaccccacagtgacacacttcctctaacaaggacacacttcctaacagtaccactccctatggaccaagtgtattcaaaccaccaccggccatattgtccaagtgatgggggctctcaagagcggtggcagggagtctgaactggattctaggccttgtaagaagtgattgggaaattttggagaagatatggagaaagagggacccttatccgctgctagtgatatgcaaactagggcagccactatgtaagtcagtatgaagactcctcaaaaaattaaaaagagaatggctatctggcccagccacagcactcctgggcttagacccagagaatcctttatcctcacgcaaagatacttgcacatccattttctttgccactctcttcaccatagctgggaaacggagccggctcacccacagacaagtgaagaatagaaatgtggcacacaatggagttttgtttgtctattaaaaaggaaatgaaaatccaaggaaatggatggaagacagagcatgtctgtgccttacttgtagctgttttgctgtgaggcctctgctaggtcgtttgccttctctgatccttaggatctagatctggagaggtgagtcgtgccatctatcctcctcctgggttagcaggggagccagagcaggatgttgctagtcagtgtttaaccactggctgccttaggataggaagactctattgttcatttccatggcgaaaatacacccatcctgtcatctctgaaaccatccacgtgaagccctgggacacagctggggagatcatgtgctatagctgactgccagaagctattcctttcaatagcacctcaaaccacagatgccagcagactctctgtactgtgtctcttctggcacacacaggaatagggatttaactataataattatgtcctaaaagccaaccccctgcagggaactaggcaacatctccccagcaacaaaccagtttatttccactgaagttctccctgggaagccagtgatctcattaggcttacagagcatgcctgaggagttgcaaacaggggcacaaatgaccctaaagcacacacaggaagacctgcacccagcatgggtgatggcttccccatggctatagagatgaaaccatctccctagtcctttctgacctagatatgtctagccgttctctgaggcctcgtgccactagaacaggcctgcacagacctagctgagagaagtggctggacactgtc

SEQ ID NO: 1350 - DNA, 1056 bp, Mus musculus
gatgagcggcagagtcggtgacctgagccccaaacaggaggaggcactggccaagttccgagaaaatgttcaggacgtgctgcccaccctgcccaatccagatgactacttcctccttcgatggctccgagcccgaagctttgacctgcagaagtcagaggccaaacttgctcctaaatgaacatggaccaaacctccatgattgtaatgatggttgcaaggtagcaggccactagatgtgatgggtatccaaagctctttgaaactttttgtcataagccttgagtctctcgtccccccccccccccaatctcaggagtaacccaagtcagcactggaaggaaggctaacagcccccccccccagaacctcattaactcctgggttccactggctgcctgtttaaaccctccacaagcacaagggtaattaatttcagggatcatagataggaaaggaccaaggaggcggtgggtgggccccaagcctctcactaagtaaccctccgcttgagcagccctacacaaagatgacaattggggctgagacagcactgagtgcacttcccagtccagtctcccacagtgcctgagaaccagtctcctgacaggagcaagggcttggtgggcccttctctgtggaggcgtgtaatagcagcagtggcttcctcttgcctggggatgcaggtagccagggtgggcggtttcccgggaaggtagccatagctgggcaaacatttgagccagggtaaagaggggggccaggcacaggtgaccttgcaataaaaagctcttgaccccacacaacttgagagccaggttacaggctgcccagaattcaggaaggatgccccaggcccttgcggggtctgccttttcctctgaacgaggcgttggcccagcctcgtctcaggaagcggagggagctctgggcaggtgcagggatggcaagcagagagggccgaggctacccaggatctagtcacacatctcaggggcacagcctggccttggtttacaatgctgttaggtacattaaccaatgaataaagtgatc

SEQ ID NO: 1351 - protein, 57 aa, Mus musculus
MSGRVGDLSPKQEEAKFRENVQDVLPTLPNPDDYFLLRWLRARSFDLQKSEAKLAPK

SEQ ID NO: 1352 - DNA, 1932 bp, Mus musculus
gctgcggcggcggcaaacgagtcggagctccatcagctgccgcaggcaccgcgccccaaggctgagccacgatgagcggcagagtcggtgacctgagccccaaacaggaggaggcactggccaagttccgagaaaatgttcaggacgtgctgcccaccctgcccaatccagatgactacttcctccttcgatggctccgagcccgaagctttgacctgcagaagtcagaggccatgctccgaaagcatgtggaattccggaagcaaaaggacattgacaaaatcatcagctggcagccaccagaggtgatccaacagtatctgtcaggcggcagatgtggctacgacttggacggctgccctgtctggtacgacatcatcggccctctggatgccaaaggtctgctgttctccgcctccaagcaggacctgctcaggaccaagatgagagactgtgagctgcttctgcaggagtgtatccagcagaccacaaagctagggaagaagatagagaccatcaccatgatttatgactgtgaaggactcggcctcaagcacctctggaaacctgcagtggaggcctatggagagttcctcaccatgtttgaagaaaattatcctgaaacactgaagcgtctgtttgttgttaaagctcccaagctgtttcctgtggcctataacctcatcaagcccttcctaagtgaagacactcggaggaagatcatggttctgggggcaaactggaaggaggttttactcaaacatatcagccctgaccagctgcctgtggaatacggaggcaccatgacagatcctgacggaaatcccaagtgtaaatctaagatcaactatgggggcgacattcccaagcagtactacgtgcgagaccaggtgaagcagcagtatgaacacaccgtgcaggtctcccgaggctcctcccaccaagtggagtatgagattcttttcccgggctgtgtcctcaggtggcagtttatgtcggagggatcagacgtgggttttgggattttcctgaagaccaagatgggggaacggcagcgggcaggggagatgacggaggtgctgccaaaccagagatacaattcccacatggtgcctgaggatggaaccctcacctgcagtgagccaggcatctatgttctgcggttcgacaacacctacagcttcatccatgccaagaaagtcagtttcaccgtggaggtcctgcttccagacaaagcagccgaagagaagatgaaccagcagggggcagacacccccaaataacacctcgcccctgcagcaggcctggcccccccaatgtcttcctgtcagtttctttagtcattttcctgcaaccaattagcccaaagaaactgggctggagggaagacttcagactggacggagctcctgttcagaatcagaatgaggataaatagctagatgggtcctcgtcgtcagaatactaaggggtctccagggaccggctgtaatgatgtctaccctgtagactttgccaacttcacctgcccaggaacagctgagacagggagggaagggtacacaggatggtggcagggaagaacttagaaagaagtgaagcgattggatgtcatactcagggaagccagctgctggggagaaacttgctcctaaatgaacatggaccaaacctccatgattgtaatgatggttgcaaggtagcaggccactagatgtgatgggtatccaaagctctttgaaactttttgtcataagccttgagtctctcgtccccccccccccccaatctcaggagtaacccaagtcagcactggaaggaaggctacccaggatctagtcacacatctcaggggcacagcctggccttggtttacaatgctgttaggtacattaaccaatgaataaagtgatcaattttcaaagcaaagag

SEQ ID NO: 1353 - protein, 399 aa, Mus musculus
MSGRVGDLSPKQEEAKFRENVQDVLPTLPNPDDYFLLRWLRARSFDLQKSEAMLRKHVEFRKQKDIDKIISWQPPEVIQQYLSGGRCGYDLDGCPVWYDIIGPLDAKGLLFSASKQDLLRTKMRDCELLLQECIQQTTKLGKKIETITMIYDCEGLGLKHLWKPAVEAYGEFLTMFEENYPETLKRLFVVKAPKLFPVAYNLIKPFLSEDTRRKIMVLGANWKEVLLKHPDQLPVEYGGTMTDPDGNPKCKSKINYGGDIPKQYYVRDQVKQQYEHTVQVSRGSSHQVEYEILFPGCVLRWQFMSEGSDVGFGIFLKTKMGERQRAGEMTEVLPNQRYNSHMVPEDGTLTCSEPGIYVLRFDNTYSFIHAKKVSFTVEVLLPDKAAEEKMNQQGADTPK

SEQ ID NO: 1354 - DNA, 47666 bp, Homo sapiens
gatgaacgtcggttcagggtgcggggtctctagggagggttgagagaggggtttagtgatgcggccagatggctcagcagcgctcaccagcagcagacgaccgcccagcaggggcgccgggtcggcttcggagccgatcctgacgccctccaggaccagagcgtcctggcgcggcagtctcacgtccacccgcacggcgcgggctccgccccgccccgccccggccgccggctcgctgccgtccgccgcggccccgggccccgccaggcccagccacagcggcagcaggggcagcagcagcagcagcggagacggaggcggcggcggaggcggcggcggcgatctcagcgcggggcgagcggcggggcccatggccggacccggcgagctggcccaacagtggggccaggggtcccgggcgcgggggggatcggagggagcgaggccgctgccggacggggcggggcgccgggaggggcggggccgcggccggacggggcggggcaccaggaggaacggagtgggcgcttggcggctctcgcgcccagactgggccgcgggcgccccctggtggccgcggagagctcaggtgcccgcggctgagggagctggagaggggcaaaaccggggtcgcagcgggaaggcggaaagtcagagagaggaggtgcttcggcagcggacgcgtcagcggggcagacaggaaaatagttggaaagggcgacctgggggagcagagacacgatcagagcctgagaagggcaggagcaagggatgtctaaggggcctggtggcaggcccttgttctgcggcagccccgtggacccacggggtggccagggccaagtcacatccctctcttccccggtcctccctgtctcgaccccactaaacagcaggaggcagagaaccagagactggcgtgggaagccgacaggggagatagaggggcaggggaaaggggctggggggcaaggcaaaacgaagcaggcagggactcagtgcctcagtgggaccgagaggctgggtcacttccctcatctgtgaaatgggcaccataggccgggcgcggtggctcacgcctgtaatcccagcactttgggaggccgaggcgggcggatcacctgaggtcgggagttcgagacccgcctgaccaacatggagaaaccccgtctctactaaaaatacaaaattagccgggcgtggtggcgcatgcctgtaattccagctactcaggaggctgaggcaggagaatcgcttgaacccgggaggcggaggttgcggcgagccgagatcgcgccattggaatccagcctgggcgacaagagtgaaactccgtctctaaataaataaataaataaataagcaccatgtacaatcaacactgcctcacccccagcaaataactcaaatgtctactggaatgtggaagttccactactgttctaaaacttgtccgtttctccaagggttggggctgctgggagctggctcagtctgaaacctgagcctttaaaaattgtatggtgggcagggcgcggtgggtcacgcctgtaatcccagcactttgggaggctgaggcaggcggatcatgaggttagcagatcgaaaccatcgtggctaacaaggtgaaaccccgtctctactaaaaatgcaaaaaaatagccgggcatgttgggaggcgcctgtagtcccagctactcgggaggctgaggcagcagaatggcgtgaacccgggaggcggagcttgcagtgacctgagatggtgccactgcactccaacctgggccagatgagccacaacactcttttttctccagaaaaattgaaagaattttacagtgaacacctgtaggaacactgatatgggatgaccaagttgctcctgaagaagtgtgagacgggtatataagacagcccccgatatcagcctaaagacagacaaatggaacatgaaataggccagaaactgacccacacatctaaagatggtgtacatcagaggaaacattgtgtttgtggagatacaaggaggcagtagcatggactgtttggtaaattgtgctaagaaattgaattaaccattaggagaagaaattagacccctattacatacacatcatatacaaaatatgaattccatatagattaaagacctaaataagaaaagtaaaagtttaagcattaaaaaattatttatgcatttatttttgagacagggtctctctctgttgcccaggctggaatgcaatggtgccttctcagctcattgcaacctccagggtcaactgattctcccacctcagcctccaaagtagctgagaccacaggggtgtgtcaccatgcccagctaattttttttttttttttttttttttttgtagagacagggtttcaccatgttgcccacgctggtcttgaactcctgggctcaagggaactgcctgcctcagcctcccaaagtgctgggcttacaggcaatagccactgcacgtagctagattctctgttctgttccattggtctatagtagtctccccttacctgaggttttagttaccttcagccaaccgaggtccaaaaaaatattaaatggaaaattccagaaataaacagttcataagttttaaattgcatgctgttctgagtagcatgatgaaatctcttgcccttcctctccatccctccctggatatgaatcctccccacgctgtaaatgttaccacctgttagtcacttagtaggcctcagagttatcagattgaagaaacacagtatgttttcagcactacctgaggtttccggcatccactgaggatcttggaatgtatcgcccaaggataaaggatcactaattggatatgttactaacgttttttcatatgtgggaaagcactcttcataagctacaaaatgcactgtggaagccccgtggtgcccgtgaagaggcttgcttctccatttctgtgactgtcccagcccatctgtcagccccaacaacagggttgcaaggatgcaccctgtaatcagccaggtctttggctccatgttctgcctgccctgtccccactttctccctacccttcaccccactgacctagtcacccctcaacatacacactccaaccagatgcaggtccttgttcacgcttgtcccccacctagaacacagttctgcttccctacaaatatccacatcctagccttccatcagtgggagccggagcccccttgcaaacttggtgggtaaccagttccctgtggtgtgttcttccatggggtaacccctggttatcgcagaaggaacaagagctggaggatgttacctcaacgtgggtgggtgtagctcagcccagccaggggccttctgctgctttggggtgaggagggttagggggtgggtaaagaaacagtaaagattggagccaatgctggcggggggcagagtgcagtgtaagcccaggaagtgaggcagccaagggtgggagattgactgcaaggagacgagtgaccttgaggccctgcctgggagtggagtatctgaggagaaggggactggaggaccccagaagcgggggaagggatgccagctaagagacatgcaggcaccctgctcccagggatggacaacaggaccctcagccctgtgggctctctctggagtagcccaacccgcagatccaaactcccaagagagggtggggagctagagcggacaggactgtcactctctcaccatgggcctctgggcaagccacttccgttttcttggcctgtgtcctcagttgtaaaatgggagcttggactaaatgacttgggagggcctttcatcagacatgctgtgattccaagtagcttgtttcttgggatacaaggtttcctggccctgggctgggcagagacctgcatggagaaggccccaattcctctgtctctccttattctgtaaagttgcagggggacctaggaagaaacaaagctactaatgaaagtgtgaggcatggaatatgttacctcagcagtggaagggggtggtgatgaggatgaaatgttttagaattggtaccaggaatggggtgtatgacaaggcccttgaattccgtgaacctgagccctctgcttctcttcctttgctgtgaaatgagttatttggtcacacaccaggctgtgcaaatgccaaaaaaaaggcattccgtgagtacacagatggtggtgctggcagaaggatgaagggcagggaaggcaaatccacatctagaatatgtgtctattccagtgagcatgaacctgggccccacctatgaggaagaggccaatgtaatcaagctgccaccaggtggcaggctggtccctggggaatgtggccacatggggcccagtgactttgttttgtacaaaaagggccttgaagcagacaatgcctaactcatggaaatgtgtcaccatcagtgggggcttctggcccagtggccacagggacggctaggcctgaggtggtggtatttttagaacatggaggtccctaagattcctttaccttatggacatgaggcccagcacataaaacaagttgtcttagaagatcttaaagtgtcccttgattgcctagttccatctgccacctccctccactcacccagatgctcagagggtcgatgactcactcaagatcacacagggcagatgcaaagtagccgcagcttaactgtggcatgggctgtaaagtagagggggtcctgctccttccttgggtccagctctcagggacagggtgagcgtcatgcccacaaatggatatcaaaggacttctcggtgctaggcactgggcatggagcagtgaccgtgaccagcaatggcttctgcccttgagaacagagagaaaaccataaccacatacacaagcaagatcatttcaggccacggtaggtgccacaggaatgagataaaatagcctcagagaggggctgggggccagaggccacttcaacctcattaccagggaagggagacctctctaagaggtggtgtgtgggctggcacctgaatggcaagaatattcaagagaagaaacagagaatgcaagtgaaaacagctgataccagctgggtacagtgggtcatgcctgcaatcccagcagtttgggaggccacagtgggaggatcagttgaggccaagagttcaagaccagcctgggcaacatagtgagacccccatctctacaaaaagaaacccacaaaaaatttaaaaaaacagccaatagctttacagtgttccaggtactcttcaacgtttttttcatgaattcgctcatttaatctcattccaatcacatgaggtagtaagattatcactgccattttacagatgagaaattgaggcagaggtcaagtaactttgctaggttatagaacccggacccaaacctaggtagtctggttccagagttggtgggcccactcctatgccattctgctctgagaggtcactggtgtgggaacaagcttgcctaccgaatctggactctattttagctctatttggggtggaaatggcaacccatccttcccaagcgaagtccccaggctcctgccagctagtgccagagccatagcaggggccccagcacccctccggccctcccctcccctctgggggactcctgaggtcccagctccctgcccccagcctctgtgctcacagctatctgggccacctcattctaaagggatttggctcttggagacaactggagactggtgagaaagggcttagggattagacagtgatacccaggaaggtaagggacttaatcaggggttcgagtgtgggaagtggggtggggagaggattttgtttctttgcaaagccaggctggactgcagaagtgaggaggaagtggggctcgggggaggagccagacaggcttagtttctcactctctgttgtgccttcagaagcaacatgatagaataataatccctcacctgtgtgcgcccaccacttccccagccattatttcacttggaattctcacagtggcgggattagttctctccccagatcacagacacccagaggaggcaggtgacttgaggcagctgcaagccccacagggctgggctgggaggaggggaggaggttggggccagggcttttctgcatggctgcccgcaggcacaagggttttccagagagttcgcgctgccctggccccgtggaagtagagtgttccacaaatatttgtgaagagtttaaaagactgttctttccaactctcaaatcacaatgccaatctctgtgccacccccttccccctggcaccacagattctgaggccagggcacgcaggaggcctctgatctcaaggccagtgccctcattttagtgaggaaacaaccaaggtctagagggcacgggccagcagccctgaggagacccccaaatatgcgtcttgtggaatagtcacggcagcacattaagcaagaacatggtctccagcccacacaccagactcccggtccagtgctccttcctgtgcccagagctgccccccagaagaatctgaagcacagggctctgtcaacgctaggactgccatcccaacgcttctagatctctgcgtgccaccagccttctttaagttgttcacactctatgttcccctaagcaaagtccccagcaagatatacccagagcaacacacccatcacagaaggttctcccctccagcctgcctgacccaggaggcctggttcttcctgttgggccatgctattccctgagagttgccactacaatgcaaaatagtccacatcaaggccaggaaaggggacttctggttggcagaggtcgtgttgcattgggtagctcagggagaagctcctggaaacagtatttgatcagagtcttgagggctggggaagacctggcaggaggatacaggacacagcagcagctctcacagaggcaggagggcagaggtgtgtctaagggacagtgggaagcttctcagattgaaatgaagtgtgtggagagggcaagtggccgttggtgccacaaggaatgctgggctggggtgggggtaggcctcaaatgcagatcagtgggattgagtcaactcaggaaggaaccggggagccattgaagattcttgagcaggggtgcaacatacctagcagggaggaagaactgtagggcagggattaggggatggagaaaaagtggggatgggaaggagggactctctcttgttagccagctccaggacttcaccagattatttatttatgtgtttttgtttgtttgcttgtttttttttttttttttttttagaccgagtttctctcctgttgcccaggctggactgcagtgacgtgatctcggctcactgcaacctctgcctcctgggttcaagcgattctcctgcctcaccctcccaagtagctgggtttacaggcgcccgccaccatgcccggctaatttttgtatttttagtttcaccatgttggccaggctggtctcaaactcctgaactcaggtaatccacccgcctcagcctcccaaagtgctgggattacaggcgtgagccactgtgcctggctaggttttttttttttttttttttttttttgagacagagccttgctttgtcgcccaggctggaatgcaatggtgccatcttgggtcactgcagcctccacctcctgggttcaagcgattctcctgcctcaggctcccaagtagctgggactacaggtgtgtgccaccatgcctggctaatttttttttttttggtatgtttagtagatacgaggttcaccatgttggccaggctggtcttgaactcctgacctcaggtgattcacccacttcagcctcccgaagtgctgggattacgggtgtgagcaaccgagcctgggcctatttaggatttatatgatcaaattaactagctgttttatggtgggccagaagtaggttaagtctcagtggaggaagaagaaagaggcagctgttgaacctgggaagggcaggcctggggaagggttctttaccgaggcttttatttgggtaacttcagatgcggggagggctgtatcctgctgggtgaaggtgatcttgtactttcgtgggtaactttcgcaggcagttcccaggcccgtccacaccttggcctgggagcatacggcctagaaaccacaaacttgggtttaagtcccaactctgcacgtgcccacctatgaccacctctccctcaggctcctcaataagtcacctgacctgcctaccttagaggattgtcccacacttaagtgacaagctagatctgaaggtaccttgtgagctctaagttgctgaaccaatataagaggctgtgcttcttgtttttattttttgtttgtttgttttttttttttagagggagtcttgctctgtcgccccagactggagtacaatggtgtgatctcagctcgctgcatcctctgcctcccaggttcaagcaattctcccacctcagcctcctgagtagctgggactacagatgcacaccaccacgcctagctaatgtttgtatttttagtagagacggggtttcaccatgttggccaggctagtctcaaactcctgacctcaggtgatctgcctgccttggcctcccaaagtgctgggattataggtgtgagccaccgcgcccggccaagatgctgttcttctataatagtttcctttgagtaggctctagcctggaaagaatatcctggccctggaagggtcttatataaagatcttagccatgtatccagtaaggaaggcagccctgtcctgccccaggccagaagccagcgagcctaactagggcagaactgcctgaaaactctctgtagaggtgggcgttgggggcctcaaccctcactctgcaccctgcagcaggcgtctatggagggggccacaccaagggcagagcaaagtccttaaatgtctttaacaggcctggtgcctttgcctccaggtaaggagagagactggggacattctgctttgtctctcccagagacttgagtgttgagggggcagaagtatggctctgggagacgagatgcccacagactcctggacctagctctgcattaattccaggccataaggggagggcacagctgagcactttccatgtgccaggcagtgggcactccacatatgtcatgccactaacaactttgggcaagccatgccttatctgggcctcagtttccctagctgttaaacgaggtaagttgcatgatccctgaatgatctatgtttctctctccctctcagggttctgccagccccgggatctgtgtctctattggagcagttcttacattcattcattcattcaggatacatttattaataatccctgtaggctgggcaccgtggctcacatttgtaatcctagcactttgagaggccgaggcggatcacttgaggtcaggagttcgacacccgcctggccaacatggtgaaaccccatctgtactaaaaatacaaaaattagcttggcatggtggcgtgcacctgtaatcccagctactcgggaggccgaggcaggagaatagcttgaacccgggaggcgaaggttgcagtgagccgaggtcgtgacactgcactccagcctgggtgacagagcgagtctccgtttcaaaaaaaaaaacaatgcaaaaacaatccctgtgtgcaggatgctgtgctgtcctgcactatgcgagcctggttagaagagctcattagatagcacctttcaatccctccttgttcagaggcccagagagctcaggtgtctcttccaaggtcacacaatgaggtaaggataaatttggaactaaaactgagactccctgcccttctgatgcccactggcctcagtcccagtgggcacacttgctcgcctcctgcctgggtctctgacttcaggagggcggagggggcccgtgtcagagccttccgcgccccagcgcatcgctccctactccgcctctcgggatcctttaagaggcggggcttggctgccagctccgcggcccgggcaaaaggctgggactttactccgggtggcggcgaggacgagtctgtgctccatcagctgccgcacccgccgcctcccgcccccaaaccccatccccgcggttgagccacgatgagcggcagagtcggcgatctgagccccaggcagaaggaggcattggccaaggtgagctgtagccctggcccgggctcccgcctcgggctgtggccctcgccctcctgcggcagcgagaagggacggggctgggtgggggccgagggtccgtggcgggcggcggagggaacagaggcggctgtcccagcctggcccgcgcccgcggatggctccttcctccctttgccaccctcgaggtcccaggaagtttggccaccccccgcccaagctctgagcagccgtggcggtgccacctggggacaagtggttgcttgtgagtccccggaggccgctgagggcacaaaggcaacattcatcctcgggactggcagccgggccctggggcaggggcaggggcaggggcccaagtttcctcccatttccgggaggctttcttcttgtagggtcagtggcacgatggaaagggctctggatagctccttgggagacttggatagctcctgccccggcaccaagccgctgtgcgaccttgggcaaaaccctgcccttctctttgctcctcgatgccatggaatgaggaggttggaccagatgatgttgaagggaacacctccgtgtgtgaattccaggctccccccatgaggcactgggttggtgttagtttgagctgagaccagccgtcccctatcttgcatcccagacccctgcctggttcaggacttaaggtttatgctcctcagaaggcaagaaggtgagcctggctttgccttggcatctgtgacaaggagggggcaacagtttgagggcgggaccttcctcttcacgaactaaatctcttatctgtcacccctggggagtgaggaggtcggctcttctctgggcaagagccgatagggtctggccccaagatttggaggctccacagctggggagttttccatggctgggaaaggtggggcggggggcagatgtatcctgccactggcagcagtggggaggcaccagctccataaagcctctgtcccaggctgggcctcccccatcccaggaaggctggacagggaggcttcagattttactgctgactcgcaggagaggtcaggcagagaagggattaggtggtgattaaactggagaccaggggctggttagggtccttggagaggggtagcttcatgcctgcagtttggaggagcagtttccctggtgcactgggagctgctttgtggggtgggatggtctgagtccctggctgacctaggcaaggggcagaggtggccagtcctcattagtgtcctctgggactgccctctaggtcagtggtcagggaaaggtgaatggctgggagcaggaggctcagggagggcatataggggcctgttcgcctaccagggagtgagaggttggaggtaggtgtggctgtccattgaggtcactgtccacctcctttgtttggcactacctgcactttcccgcttcctggcttcccctactggaactgttccctccacctgagttgcccacctctctcccccgctgcctttgaagtccttcaagcccagcacaaatgccatgttttataggaagccgtgtgagaccacctctttcttccctctgctccccagcaaactcctcatccttccatggggcagaagaccatggtggaaagagtgtgtgctctggactcagacagacccgggtttgcatcccaactctgctaatgactagctgtttgaccttgggcatgttacttagcctctctgagctttaattccttcatctgtagaatggggacaatacttctacgggttgtgagtgaggagtaaataagctatggtgccaagatcagcgctgagcgacaggaaatgcttggtaaactgacagcttttactgcagtccgtatcagagtgcctactatcacgattagctgggaacacatctgcctgcccgcagactggtgtgtgggagcccttgttgtggggcaggggcagtgtctcactcccttcccacttcctgccctgcaacctggcaccccctgacaagacagtgctccaggcagcatgagtgcccagggagtgtctgcagagttgaactatgttaaagagaagtccagttggccgggcgtgggggttcatgcctgtaatcccagcactttagaccgagatgggcggatcaggacgaggtcaggagatcaagactaccctggctaacacggtgaaaccctgtctctactaaaaatacaaaaaatagccaggcgtgttggcaggcccctgtagtcccagctacttgggaggctgagtcaggagaatggtgtgaacccgggaggcagagcttacagggagtggagatcgcccaccgcactccagcctgggcgagagtgcgagactctatctcaaaaaaaaaaaaaaaaaaaaaaaagaaacaaagaaagaggcgtccagcaaagatctcagtggagagtcctaggcagagggcagcagtcagggcgggccctaccactcaccccgatgcctctccctacagtttcgggagaatgtccaggatgtgctgccggccctgccgaatccagatgactattttctcctgcgttggctccgaggtgagggaagaggggctgcgggaggctggggcaggggcttgttctgggcaacagaatagcaccctctgaaaaccctgcccttggcaattgaggcatctagagtgtccaacctttagcgccaaagggcccttggcaatgacataagctcaaccctcctagtggataaagacactgaggctcagagaggtcaagtgacttgttccaagccacacagtgagcgaactgcaggcagagaaaaggggagagtccaggtcggctgacccttggcccacagccttttccatctactcaagaaatctgctctgctgatggagttggggaaattggctgaagaaaaagtgagaaaggccccagccatgtggggggtcggaggcagagccaagtgtagaaccagagtcctggcccctgctatgccctagtgtgatggcaggtccctgcagaccacagtttaggcaacttgagggaggggcagagtgcatggggaacctgaggggcacagcctgacctagagtgacaagagtctcctcaaaccaccaccaggctctagagcccaggtcctggttccagctcttccccagcctggctgtggtgccttgttcagggtaaatacttccctaggatcctcctctggaagagcaggacaagacctgcctgctgcaagacgtgacatgacagaactctgcatgtggtgttgaaatgcacacatttctactggcatgagggtcaaattcagcctggtgccccaatccctgagatgtttccattccttcccctcctctcctttcctgtgattcaggtcatgtgccaccctccctgattcttctgacactttttttcccctctatatagaaattttattaacagacatagaaataataaagaaaattccattatggccaggtgcggtggctcacgcctgtaatcccagcagtttgggaggctaggcgggcagatcacttgaggccaggacttcgagaccagcctggctgacatggtgaaactccacctctactaaaaaacacaaaaattagccgggcatggtggcgggcacctgtaatcccagctactcaggaggctgaggtgggagggtcgcttgaacccgggaggtggaggttgcagtgagctgacatttcgccactgcactccagcctgggtgacagagggagactccgtctcaaaaaaaaaaaaaaaaaaaaaaaaaaaaagaaggttacctttttttttttctttttagtagagacctaggtttcacgttggccaggctggtctcgaactcctggcctcaagtgatctgcctgccttggcctcccaaagtgtggtatagaatcatatcctaaaatattaaagtacaaattatgccctattattttaattttaatttctttttttgagacagggtctcactctgctgcccaggcaatgggcatgatcgtaggtcactgctgccttgaactcctggtctcaagtgatttatttatttatttatttatttatttatttatttatttagagatggagtcttgctctgttgcccaggctggagtgcaatggtgcagtctcggctcactgccacctccacctcccaggttcaagcaattcttctgcctcagcctcctgagtagctgggattataggctcccaccaccacaccggctaagggtttcaccatgttggccaggctggtctcaaactcctgacctcaggtgatctgcccacctcagcctcccaaagtgttaggattacaggcgtgagccaccacacctggctgttatttttattttatatttttatttttattatttttattttttttgagacagagtctcactctgtcgcccaggctggactgcaatggtgcgatctcggctcactgcaacctccacctcccagtttcaagcaattctcctacctcagcctcccaagtagctgggattacaggcatgcgccaccacgcccggctaatttttttttttttttgtatctttagtagagacggggtttcactatgttggccagcctggtctcgaattcctgacctcatgatccatccgccttggcctatttttacttttgaaacagggtcttgctggcctcaaactcctgggatcaagtgatcctcccacctcagcctcccgagtagcttggcctacaggtacacaccactgtgactggccctattatttctttatggacacataaagacatgcacatgcacaccctaggagtcttggggcagatgaagagatgtattttccttttctttccagaaatttcacagagctggcacgctcctgagaggctgcttgtaaacatctgagggcagatccatccaggagcctctggaagtgtcacttgcccctttccccaaaaaagcttccataccatccccctaccccagtccaccgcccagagatggtggaggggtagtgtgggggcggcagtggaatcagttcaggctggaggaaattttggcccagcatttgctaaagggctgcagctagaagcaggtgggtggagagagtgggaagatagtagccttcttaaagggccagttgcaaaatgatccagcagactagggagctgctgttgggggagaagcatggtttctgagagccactgaacagcaacacagctctcttactgaggcaggggccagccaggggtcctggcagctggtctcctgattcctggggagcctcatacttcaggcacaccctaccccctcacagtggcggtcattcaaagaatgtggtcggtcattctcatttgccagatgagaaaacaggctcagagaggggaggggacttacctgaagttacagttaatgcgaagcagaatcagggcagaaacctaggactccagactccaggccagtatcctttccaggaagccacccctgctccttaaagccaagctcagcctcttacaacagaggaagtgtctcctctgcatttcatttgtgcctcacatttcctgggcaggagctcaggcctggtcagaacctaatatgaatctcaattgggttttttttttttgtccctaaaaaaaacccaaaacccaaaaaacaacaaaaaaccaaggcctggcatggtggttcatgcctgtaatcccagcactttgggaggccaaggtgggaggatcacctaagcccaggaattcaagaccagcctgggcaatatagcaagaccctgcctctacttaaaaaaaaaaaaattagctgggtgtggtggcgtgcacctgtagtcccagctactcggtaggccgaggtgggaagtcacttaatccagtagtttgagactatagtgagctatatcgcaccactgcattccaacctgggcgacagagcaagattctgtctcaaagaaaataaaacaaaacaaaacaaacaaaaaaacagccttttctctttctctccttcaatctgacaaagacctttcataaaagtcacacacgggcagaatgtctgtccctaacccaggtgtgtgcttggggctcctctccctccctttctccactgagggcttcagttttctgctggcttccaggcatggagagcaggtccgcaagtctcctctgcttccccctgactgaggctgagttctgggcaccccagcaagaaggatcagagagcaggataaaacaaggaagtggtggaagccctgggagggaggcagagcgggtctgagtctctgcattttacaggtctagggaatgaatgaaccaccaccacccagacagctgctcctgagctgggttcttgcagtgccccaagccatgctttgagttgcccctgaccagggcagcaggagcctggagaggcctcaagcaggcatggggaggcctcaggtgtggtactgccaagagcaggtggcaactctgggagagccctcacagaagatgctggatgttgggccttggcagataagggttaactggagagcctccccaagataaggggctcacagttcgccaccactcctgttccctaagaagataagggttctggctgggcgcggtggctcacgcctgtaatcccagcactttgggaggccgaggcaggtggatcatgaggtcaggagatcgagaccatcctggctaacaaggtgaaaccccgtctctactaaaaatacaaaaaattagccgggtgcggtggcgggcgcctgtagtcccagctactcgggaggctgaggcaggagaatggcgtgaacccgggaagcggagcttgcagtgagctgagattgcgccactgcagtccgcagtccggcctgggcgacagagcgagactccgtctcaaaaaaaaaaaaaaaaaaagaaaaaaaaaaaaaaagaagataagggttcttctcacaatagtggtgtccttcctatggaagattctcattttcatggcccaactcccccaccatgagaggacagtgccttgcatcttccaagtgtttctatcttatcagatgatttggtcagagatgtacagtatcttgtccaaggtcaagcagagaaatgaagagctgggatgcaaacccagaagatattcctctaaaagctgtcccatgctgccatggcagcacacaaaaaagggtgggattcagttctgccaggacgtgtccggcacctgtgatgggtgtggcattgttcaaatctcttgagggagcctatgggcccaggagaagggactgattttcataacggcagagtcagggaatgtgctcggcactcccagagagcgatggttaagggaccggtgacagtccagagggcagcctgtctggcccaggttccacaactgtcagcaaatctagatgccaaatccacagaggacatacaactgggagggacagttcataggtcagatggcaaaattgatctgaatctggatctcaaaactctttgaaggatggactgaagttgactgtaacaagaggaaatttgatagggaaggatctaaggtctctcctctccatgtatgcaatggaggcttagcagtggcacaggtgaaaaggatttggggggtttcagtgcctataagctccacctgagttaagggtgttgcctgttgccaagaaagttcttaggctgggcacaatgtctcatgcctgtaatcccagcactttgggaggcccaggcgggtggatcacctgaagtcagaagtttgagaccagcctggccaacatggtgaaaccccatctctactaaaaatacaaaaattagccaggtgtggtggcgtgtgcctgtaatcccagctactcaggaggctgaggcaggagaattgcttgaacccgggaggcagaggttgcagtgagctgagattgcaccattacactccagcctggatgacaagagcgaaattgtctcaaaaaaaaaaagaaaagaaaagaaaaagagagttcttagacaacacttggggctctgcgtggctcttagagcacactctgagggggctctggaaaattggaaaacactcaaagggaagttatttgcatggacttcagaccaagctgtggggcttcgtaaagtctctaaggatgggcagcacgatggtaggggagatgcagagtgaaagcacagaattttccagtcttggaagtgttgtcatgaggctaaggaggcaatcctactctctgagtgtctctgaaatgaatctcaactcagtatcaatcagctgagtgcaaattgcagctatgattacctgggagcaagtggccttgggggtcagtgaggtctttgtgttcaagcttgagcaggacaacttttggggcatcatgcataaagaggtgacccaggtgaaactgaattctgaaacttgtcaggagccctgggaggcaggccctttgtgtggctttagggaatgtgtgggccctttgaggacatgacaaggttgggtggaggctcatcaacccctctatcccactgggatgttctgccagctctgccacagattacaggggcagctatattcatctttgttttttgtttttcttgggatgggatctcgctgtgtcacccaggctggagtatagtagcgagatctcagctcactgcaaccttcacctcctaggctccagcaatcctcccacctcagcctcccaagtagctgggactagaggtgcatgccaccacctgtagctaattagtttttttgttttgttttgttttgtttttttggagagacgaggtctcactgtattgcccaggctggtatgttcatctttgaactgtggtgtcaaggtctcaggattggatgtgagactgtggaggagataaactttgtgcaagggggaaggccaaatgataagaggatccggggttcattttcactgagaggacggaagacctttaagttgattataaccactggagtaaagctctcttgaccctgaagttacaatagctgcccccagctgccctgaactttgacctgctctcctcgcaaacctggggcctgtggtgccccagaagttctcagtaaaggctctcatgttagcttctgcttgtaggatggtctgagggttagctggagagatgactgagaggaactggccctatcatgggaatatgggaatctccccatccttggacacccagtcctgctaacctaaccctgaccagaactgtttccctgttacagccagaagcttcgacctgcagaagtcggaggccatgctccggaaggtgagacacatttggctgttgcttcagttcctccccatcagaatcactccttgcgtggacttcttttgccgcacctcccatcccaatcacagcttttggctttgagtattagccgaccactgttgccttatccctctgggacaaattgcattcccttccctggcaacacaggctttcatagctctgggccagccaagaatgataatctgttctgctaagacctctaaaacaggcagggccttcttttccattcctgcctaatgccttctggtgaccacttatgatctggtggtccattcacgctgtcgcttattgctacatgcctattaaacctcccccaccatccctgctttttgttttcttttttatttttttctttttggagacagagtctcgctctgtcacccaggctggagtgcagcagtggcgcgatctcagctcactgcaacctccgcctcccgggttcaagtgatttcatgcctcagccacctgagtagctgggattacaggtatgcaccaccacagctggctaatttttctatttttagtagggacgggattttgccatgttggccaggctggtcttgaactcctggcctcaagtgatccacccgccttggcctcccaaagtgctgggattacaggtgtgaaccaccatgcctggctgtccatccctccttttaaaaatttccccattgtatctttgtagcatgtggagttccgaaagcaaaaggacattgacaacatcattagctggcagcctccagaggtgagcacaaattatcccacctcatccctatgctaggcctttcagacccacaacctgggtcctggatccactggatttggatccttagaggaaaggtctgacaatgcccactgagccctgatggtctccagaatgggcatctgttggtacccaggagagggaggtagagaaagatactgatgaacctggagtaaggccctgtggtccaggcaaggtatggatgcctgctgaccaggtggctcctctgtgtctttgcccaggtgatccaacagtatctgtcagggggtatgtgtggctatgacctggatggctgcccagtctggtacgacataattggacctctggatgccaagggtctgctgttctcagcctccaaacaggacctgctgaggaccaagatgcgggagtgtgagctgcttctgcaagagtgtgcccaccagaccacaaaggtgagtggaccaccatggctagaaatgagttgaccacagcagaggcattccagcagaagcagggatgtcacacaggaatataagcacagcttcagggccaaggcccagcctttttttttttttttttaatttttaaaacttttttagtagagacggggtttcatcatgttggccaggctggtcttgaactcctgacctcaagtgatccacccacctcggactcccaaagtgctgggattacaggtgtgagccactggacctggccgaggcccaggctttgggatttcctagaccagtgacatttccaagttttagaatattcccaaatatctattttgccatgtaaggactttaaaacaatgaccatctattgttgccatcattaacacccaaaactataagaatggcaataatctcagatgaaaaagcagtcctttaggaagctgcagtgagccaagatcgtgccactgcactccagcctgggcgacagagactccatctcaaaaaaaaaaaaaaaggagtcctttaaattgaataaatttagcttcataaaaaactcactacattattgttatttttctgatttatatggggacccagtgaaatcttactgtggaccaacccatccttgagcaagtatttgggtaccactggtgcaaatgatgtcagattcttgcttctctaattctgtatttaaaaaagataaggatggctgggtgtggtggctcatgcctgtaatcccagcactttgggaggctgaggtgggcagattgagcccaagagttcaagaccagcctgggcaacatggcaagagcctgtctctacaaaaaaaagtaaaaaattagctgtgcatagtggcatataccagctactagggaggctgaggtgagaggatcacttgaacttgggaagtcgaggctgcagtgagccgtgatcgcaccactgcactccagcttgggcaacagggctagaccctgcgccaaaaaaaataaggatagctgattcccttactgagaaaaagactgaagaacaagcaggagctgccacttccctcctgccctcctctcagcagttgtaaagatccagtgaaatgatgtcataaagtctaggaacattcccacactcatctacaaatgttcacagagagcctactgtgcgcagagaccctgcggagctggggatgcaggaagcattagacgtggatgcacccctgagggttcagggtgcacagaacgtctgtcctcgggcataagtggctctacgggtaccgtgcacagagcacacagtgactcaggaagggggaggccatcaggccaaactgcagaaccaaagccatctcagatgtcatctagatccacccagtcatgtactggaaaagaacacagagacctaggcaggaagagtgactcgcctagaccacaattctggcctggggtgattatctcagtttggaaaactctaggtccggccctaactagctctgattgctctctggatgcacagtgcaatcatttggcctggactggaacgggcttctgaagtaggacagcctgacaagacttcctgctctctgttccctgcagttggggaggaaggtggagaccatcaccataatttatgactgcgaggggcttggcctcaagcatctctggaagcctgctgtggaggcctatggagaggtgaggggcaggggtggggaggaaggggacagagggaaggggaggaggagtagacccctctcctaggctgtcctgtgggatgggtgaggcaatgggggcagattctgagcctgctggaatcaagagtgattttgtttccacagtttctctgcatgtttgaggaaaattatcccgaaacactgaagcgtctttttgttgttaaaggtaagttgggaatttcttgtgataaagccagatggaaaagaggggtcaaaaacatgactgcggcagatggagggtcaaacagtgagccaaaagagggggtctgaggacatgttcagaagactgctgcccctgctagtgtgctggctcacgcctgtaaccccagcactttgggaggccgaggcaggaggctctcttgagcccaggagtttgagaccagcctgggtaacacagcaagacctcatctctataaaaaagttaaggaaatgagctgggtatggtggtgcatgcctgtagttccagtttctcaaaaggctgaggcaagagcattgcttgagtctaggagtttaaggctgcagtgagccatgattgtgccactgcactccagcctgggcgacggagcaagtctccatctcaaaaaaataaaaatagggctaggtgcagtggctcactcctgtaatcccagcactttgggaggctgaggtgggcagatcacttgaggccaggagttcaagaccagcctggccaatatagcaaaaccccatctctactaaaaatatggaaattagctgggcgtggtggcccacacctgtagtcccagctactcaggtggctgaagcacaaaaatcacttgaacccgggaggtggaggatgcagtgagctgagagctcactgaggctgaggcaagagcactgcttgagcccaggagtaaaaggctgcagtgagctatgattgtgccactgcactccagcctgggtgacagagcaagactctgtctcaaaaaaataaaataaaaagaacactgcccttcacatacgcagactactttacaactcacagagctttcagtatttataatctcctttgagccacccagcctgatgagatgggaagagaccatttgattatatccactgtaaagatgggaaggctggacctcaaagatgcccatgctgagctgcacaccctgggctgcctatgtgggctccagagccctggggaacatgtggcccagcatgggctggcaggagggtagcaggtgctgcagaggacgctgttagggacagactgggcactgctcccagcctcacattatctggtctctgttccagcccccaaactgtttcctgtggcctataacctcatcaaacccttcctgagtgaggacactcgtaagaagatcatggtcctgggaggtaagtggtccagactgttctcaactccaaaggagggtctgtagcctaaatcgggtccagctttaggggtgtggccgtagccaccagggtgaaagctccctctgctagtttgggagcagtgggacccaggagcaagctggggtggagctagtgccttcttctgttttcctaagaactctttctctcagacactctagaagcaagcactgggtccattattgtagattcaaagatgaatgagactccagtccttgccctcaaggaacttacagtataacaggagacagaagacctagaaagagaggctgggtgcagtggctcatgcctgtaatcccaacactgggaggctcaggtgaaaggatcacttgaggccaggagctcaagaccagcctgggcaacaaagcgagaccctgtctttactaaaaaataaaaaatagctgggcataatggcgtgcacttgtagtcttagctatttggaggcttaggcaggaagatcccttgagcccaggagttcaaggctgcagttagctatgatcatgccactgcactgcagcctgggcaacagagcaagaccttgttttttaaaaaaagacctagagagagaaagctatgatataaactagaaaagacagtagactagtcatagagagggtgccatagaagttgcaggagcaaggttgctttcagttggggaaaactaggagcagcttcatttgacaagcacatagtatgtgccaggcctgagctactgccaagactacaaagatgaataagacagagtcctggctgggcacggtggctcatgcctgtaatcccagcactttgggaggccgaggtaggcggatcgcttgagcttaggagttcgagaccagcctggccaacatggtgaaaccccatctctgctaaaaatagaaaaattagccaggcgtcgtggtgtgcacctgtaatcccagctacttgggaggctgaggcaggagaatcgcttgaacccaggaggtggaaggttgcagtgagccgagattgcaccactgcactccagcctgggcaacagagactccgtctcaaaaaaaaaaaaaaaaaaaggggtcccttgaaggtcttttggcctctctgggaaagcagacacaaacaaatctatcagtatgctgtggtaaatgtacagaaggggaaaccacaaagtgcatgggagcactcagcgggagcacccactccacctgagctaggaagggggtgatgcctacctaagctgcgtgctatggaatgagtaagagtctgccagatggagcaaggcaggaagctgcttggcagaaagaagagcattgaacaaagaccttacatagcatggcagaggcagctgttatagaatgtgaggcagggtgtggcaaggtatgaggctggagagggaaccaggagtcaggccccagagaatcccgggcactaggttgaaaagctgggatatgactctacaggccactgggaatcagagttttcagcaggggagtaccacaaattttaaaccaagacacagtactagcaagattgcgaaggctaccagtttgcacgagcctctgtctctacaaaaaaaagtaaaaaattagctgtgcatagtggcacataccagctactagggaagctatagatttgtttgtatctgccttcccagagaggccaaaagaccttcaagggaccccctttttttttttgagacagagtctctgttgcctaggctggagtgcagtggtacaatctcggcacaatgttgtcacagtccacgcaagaggtgttgcaagcctgaatcggggaattggcaacagggatagagaggagaggatggatttaagaattatttagggccaggcgcagtggctcaggcccataatcccaaacactttgtgagtgtttgggaggcccaagtgggtggatcgcttgagcccaggaattccagatcagcctggacaacatggtaaaactccatctctacaaaaaatacaaaaattagccaggtttggtggtgtgtgcctgtagtcccagctacatgggagggtgaggtgggaggatcgcttagcccaggagttcgaggctgtggtgagtcatgatgggtgccactgcactccagcctgggcaacagagcaaaaccctgtctcaaaaaaaaaaaacaaacaaaaaaacaaaaaaaaaacaaaaaaaacttatatagaaagtaaaacagcagaactcaattgactagatgtaggaagtaagggagaaagctagaatgagctcctggtgtctggcagaggtgactgagagatggtgacgcattagttcaactggggaaaacaaaaaagcttgaagttgagcttgaggagtctgtgagatataaaaatgttgggaatacctgagtttgaagcttaggagaaaactctggtctggagatttgggagttatcaaataacagcagcagctaaaaccttgtcagtacgtaagactgcctacggaggaacagaggcagaaccctggggaacatccgagctcaagagcaggcagagaaagcgaacccagcagggagactgagaagtgattaatgaggttggcagagaagcaagtcaacagggaatggatatgcagggaagtaggggcaacatcagggtacaaggaaaagtgtgacccaaaacccagcaaagaggacacacaggcatcaagccagccagggacaggcaggagttcagttttgctgaagtggagtggagggagaaaaggctagaaaggtagattgggcatccaggtgtggtggctcacacctgtaatcccagctactcgggaggctgaggcaggaggaccacttgagcacaagagtttgagaccagcctgggaaacatagtgagacaccgtttcaaaaacaaaacaaaaaggtatattgggacaggctcatgaaagggtgaatgccacctatggcactgaactttgggggtaggtaagagggattctgaaggcttcacaatgttcatcttttggtgacacacgagaattggagattttccaaatgtatgctagtgagacccggggagtgaagtgaactcatcagggaagtgtaggacttctgggttccagacttagctctggcagcaacaagctcaagctctgttttttttttttcttttttaaatttaggtccccacaaaagcattcttttttcttttttgagggagccttgctgttgctcaggctggagtacagtggcgtgatcacggcttactggagcctcaatctcctgggctcaaatgatcatcccacctcagtctcctgagcagctgggactacagccagcacacccacctaaatttttatttttggtagagacgggagctcactatgttgcccaggttgatcttgaactcctgggatcaagcaatcctcctgcctcagcctcccaaatcactgggattacaggcatgagccactgcacccagccagctctctgctttttgttgcctcagttattctctctgtaagatgggaagaatcctcctggccttatcccaactctccagctggactgggggaagaactataaaagctgagcaagaggtttttatgatttttgttttttctgctgctaccacccaccatgggcatgagacggtttggtttcctggcagcagagctgtgtaggaggttcagtctgttcccctaccacacctaaaactctttcaaccaaacctgcctcaggctgggaagatacagaattttcaacagaggggggagattcactcgggctggtcactggagcttagcagtgcagattaaatcaccccaagaccacagacactgtgttcccaggagttgcatggtctttggtccctaaaaatctgagggctggcagactctggacagtttctgcgggtctccagccagcatgacactggcttgtaccccagggcctggagctgctgcctatatatgctctatatagtaggcataggcaggttttagtatcaaaatattgtacctggctgatatttgtgaatttggattggtgaagtggttcttagcattggctgtgctagagtcaaactctcctagacaggaaggagcttgggtattttaaaaaaaaaaaaaaagagccaaattactggtggctcaacagctgaaaacaatgggagcagaagtgaaatggtggctggggtaaagccaagaatccatttaaggggtgactctacagagatgcatttacttattaagtcacgacttagctgtaggggaaggtgggggaaagacacatagttctgccctcacaatgttcagtataatcaggacagggtatgtgcattcaggccttcctgcccgccacacgtgctgtttcctctgcatggaatgtccttctaccctttctttgtcccctctcctgctgtacttcaatgtatcacctccatggggtaataacatactcttaacgtgtataaggcactttatggtttaaaaagccctctcggccgggcgcagtggctcatgcctgtaatcccagcactttgggaggccgaggtgggtggatcatctgaggtcaggagttcgagaccagcctggccaacatggtgaaaccctatctctactaaaaatacaaaaaattagctgggtgtggtgtcgggcgcctgttgtcctagcttctcaggaggctgaggcggaagaatcacttgaacccgggaggcggaggttgcagtgatccaagattgcgccactgtactctagcctaggcaacagggtgagactctgtctcaaacagaaaagccttctcaagtacttagttcatttcactcccaccataaccaggcagggcaagaatgtcacttagctgttcagacacgagggcaggaaccagggtctcgatttctggcctggggcagagccatcctctggctcctgctgaaccccctgcagtactatgcatgcactgtgtgctcctaatgcaggaatttgaggcggggtgttgtggggtgcaatggatgggttttttctgcctctttagtgtagaccactagggttatggcgaaatcttacctagtgttgagatacatctttatccttccttccctctcctgccagcaaattggaaggaggttttactgaaacatatcagccctgaccaggtgcctgtggagtatgggggcaccatgactgaccctgatggaaaccccaagtgcaaatccaaggtatgagccgccagaggctagaggtgaacagggatgcctggctcaaatgcacattccagttcactccatgccatgcttctagatcaactacgggggtgacatccccaggaagtattatgtgcgagaccaggtgaaacagcagtatgaacacagcgtgcagatttcccgtggctcctcccaccaagtggagtatgagatcctcttccctggctgtgtcctcaggtaggggcctgggcccttccaggagacccgagctttcatctataggtcctgataggtgggctggaataggagaagccctggtgccaggaccccggagagggcacacacagacagaattatgtctcaattggtgatatcccctgcaggtggcagtttatgtcagatggagcggatgttggttttgggattttcctgaagaccaagatgggagagaggcagcgggcaggggagatgacagaggtgctgcccaaccagaggtacaactcccacctggtccctgaagatgggaccctcacctgcagtgatcctggcatctgtaagtatctctgccttggcaatgccttgaagccccatgtccagctttctgcctgtgaggttcctcttcctccatggatttttggctctgagtgttagaactagaagtggaatgccatcagttcaatcctctccttgtatagatgaagaaatctaggcttggagacttgtttatggtgacccaactggttaacagcagggtgggactttgatctcatactcctaggtatgggtgagtcacagtcctaggcgatcacaggggttcaacacgtctgctttctggtccaggtctaactgggtctgtgactggacagatatttcttggggatgctccttcccagaggtcacagagacagaactggctgggtgggcatgggatcacaaggtaagcagatgctcaaaagtgcagccttcacccctgagtttcactcatctcccagctgaccaaagaatggacacagactatgagcaggcagtttacacaagaatataagaatgggaaacagacatttgaaaaggtgcttaatctctcttaactttgtaataccattaaaattccccttgactcagcaattctacttgtgaaaatttatcctacagaaatacacaaatactcaaagatacaggaacaaggatattcccggtagcctgggaaactggcagtaaaccatatgaccatgataaggtctgttaagtaaattacagtccatccatacaatgttaaagagaataaactgacatgtaaactgtctgggacatgttaaacaaataagcatgaaacacagcatgtatggtatgtacttactttggttaaggaagtgtgtacacagaaaagaactctggggaaatttatgctaactctaacagtggttatctctgggatgataggatgtttatggagggctttcatttttacagtatttctgcaaatatattttatgatgactacgtattaatattacatttataagcagaaaaaccatacctacactcccttcaacacccacaatcaaatctccagtttctttttgtcagagccaatggaaaatcaatcagagcaaaggctttatcatcagagctgagctggacttgactaaaggctagctccatggcctttggcaagtgacaaaacctaagcttcggtttccggactgctacactgggggtatctcacagggatacctgatgatttgatgtgataggttctgtgaggcacttagcataatgcctggcatagagcaagcactcaatgcactgcagtcaccactattattgttaggacaaggcctgtgggagaagggccatcctgcagacaatgccgggagatgggagaagccctgtgccccatttctacggtagtaccagcactaccaggagatctgaactagcctcacagatgtcttggcctctctgcttgtctacatggtcacccaacctgagattttgcctccttcctcacatcccaggcacccttcatctccactgccccctcctcacagatgctctgtggtaccatatagctcctgggggaggcggaatattcttattagtgagcagccgggtcctgggggagaaggtgtatactgtgtgcttcagcaagaacaaggcttagcaccagcccagacaatgtcacccacagaggagaaagcacttaatacatataagcttgaatttttttgtctgtttctttgtttttagtagagacgaggtatcgctgtgttgcccaggctggtctcgaactcctgggttcaagcgaccctcctgccttggcctcccaaagtgctgagattaccagcatgagccaccatgcccagccttgaattatttttttaatggatggggaagctggggcatagagaagggatgttctcccataaagtagcttatgtagacatcaagacagaagacatcagagaatcctagagtcctgatccagaacctcttggccattgactgtcctggatgtgtcagagagtgtggaatcccagaccagggaagtaattgacccaaggtcacagagcctgtaggagagccccaaaccattttccagcatctgcccattacccctctatcttctctttagtatctgaaggacattgcccaagaagggaacatgaaccttttaacataatcaggcttgggcttgcaaacccccaaatttattttagttccttctggatacattcccaaccagaacctttacctgcctgcagggtcttgtctgggatctgctccttgcccattcccaagaggagcagaggcaggccacaggatccattcccccttcccaggtacaaagacaatgaagttggaatcagctgttacctggtgccacagctaaggttagatgtgagcccagagagaacccagtattagcttgcaagctcatctgcgggagggcaatgcccttggagaaccaggagacccctggaaagcagaacagtcatccagtggagaaattaaaactgtgccagcctccaatggcaagagcacattaaccttccccaggcttctctggtccttatcccagtgcactaaattaccaaggaggaaaaccaaagtttgaattgatttcgcttttgttttctcacctaatatttaccaagggcctactgagtacagaatactcaactaggaatgaaaagattcccaaagaaagatctggactttgtccactagaagtgcacaatgtggtcagaagactggaaacactatagaaagggtgagcagtgctgtggtgaaaagagcccagccaggcaccaggaggcctggtttctgagtccagctttgccaatgactctcccagtgttttcagcaagtgtctctattaggtttggttttccttctccttaaaatgacagaagtgatggccgggcgtggtggctcatgcctgtaatgccagcattttgggaggtcaaggtgggtggatcactcgaggccaacagttcgagaccagcctggccaacatggcaaaaccccgtctctactaaaaaatacaaaaataagctgagtgtggtggcgcatgctggtaatcccagctacttggcatgagaattgcttgaacccaggaggcggaggttgcagtaagccaagattgcaccactgcactccaacctgggtgacagagagagactctgtctcaaaacaacaacaacaacaaaaagagaggagtagaccagagcagatcttaatgtggggtcccccggagcagtggttctaaatcgtaaagaccaaacacttcctctttacagcaaatagtgtctaaaatgtcccctttactattctgaagtgaaattcaaaatacagaaattctgaatattatatcccaataatataacccatcctacctacacatgtaatttaaaaatcaatataatctcctatggtaatagaaaagagatataaaagggaactaatttagaatatatattttttcaatacatgaatgagagggtaaggttgtacctttcccattgggaaccatggccccagaggttctacagtgggctccaggaaatctaaaattatgtgcctttttttcttttcttttcttttctttttttttttttgagacagagttttgctcttgttgcccaggatggaatgtaatggctcgatctcgactcactgcaaccttcgcctcccaggttcaagtgattctcctgcctcagcctcccaagtagctgggattacaggcatgggccaccacgcctggctaattttgtatttttagtagagatggggtttctccgtgttcgttaggctggtcttgaactcccggcctcaggtgatccacccgcctcagcctcccaaagtgctgggattacaggcgtgagccaccacgcccagccaaattgtgtgctttcatcagattctcaagggggtcagttacccaactaaagttaaggagccttatcctggagggtgtctgggggctctgtgagtctatgattagtgtcaaaatgaaccatgcagactctggagctgcaatgactccacttccctctggcctgtggttctctgatcaacccctttcttgtttctgaggccaagtatcttgctaggcagggccattatcgacctagtacttggtgcaatgaatgcaaaggacctctcctccagcatggctgattctggttgctaagactctatcatccagggcagagatgaagcttcactcttgccagagggactattggctctgaaagacctctagtacaggggaaaaatagatgactaacaccttcaccatgaggaaagagtgggtggtgtgtctaccctttgtctaaactatgcattttgtccagggtcaggaaaaggttaagtcttaggattaaatacaggatattttttttcttgctgagaacagtgagagaagaccgggatagggatggggcagaactagtgtttttgttttcacattcagttctcctgaagcggtgtttggctgaaatggaacaacttctcaaagaaacagggttagattaaaagcagcctgttcctctgccaaagtgtggaagctttctctgccaagtgcatgcccattttctctttccagaggaaaccactgctaatgtctattatcctatcaaatatcttccatctagaagcattacatgtttccataataaacagggcatacagtgctcgctttgtcagcacatacactaaaattgaaacaatacagagattagcatggcccctgcgcgaggatgacaatcaggttatcttaaataaataaatagaaaacaggacatacacaaacacacacacacacacacacacacacacatattcacaggaattgtctgtcattcactgtatgtttgaaggaattttgaaactgtcaaactcatcgcaggatttcaggaaactttcccattaggacaagcaccagagtggtatcatcagagaatctgggagtctaagcagacaaagaagtaaagccaaaagtatttttacctatgtagttacaaaaaagttacaaactgtttacatactgttctgcaacttgttttggcctcaggacacattgtggacagtttcctgtcacttctgtggagctaacctcttttttaaaaaatatatcagtattctatcacatggattacaacataaaattgttgaagcaattctcctttgatgaacatttgagttttcccaatctcttattattacaaatagggatgcaacgagcatctctgtccatttacctttttgcaggataaattcctggttcacaaagtttgcacattttaccttttgtcagaaattgaagagggccaggttttccagggtccaagtcaggcagaacaaatgcagcaatgtggaacagacggaaactccagctctgtcatttcctcactgtgtgtcaccagagtcacaccacctcctttttatcagctataaaacaggactactgctgaactcgtagagttgggggaaagagtgagataacatatagattaccaacccagtgctgcgacacacagctattattgttattacaactgctactgctgctgctaattctcctccctcctttcaaagtccagttcaagctctaactcctttaaaaagcgtttcacatgatttcagtctaccaggccctcttcttccaagctggtacagacgagatggtctctgtcactcatctggcacttggcatgttctgcctatttttttctctccatgaatgtcttgtcaaccccgctagattaagtttcagaaggtcaaggatcattacctaggctaccttcatccccatgacctgccacactgccttgctcagtcactaaacatcaacaaaaatcactgtccccaagccctttgccagaactgcctgaatgtctgtctggtttctgccttccctcagatgtcctgcggtttgacaacacctacagcttcattcatgccaagaaggtcaatttcactgtggaggtcctgcttccagacaaagcctcagaagagaagatgaaacagctgggggcaggcaccccgaaataacaccttctcctatagcaggcctggccccctcagtgtctccctgtcaatttctaccccttgtagcagtcattttcgcacaaccctgaagcccaaagaaactgggctggaggacagacctcaggagctttcatttcagttaggcagaggaagagcgactgcagtgggtctccgtgtctatcaaatacctaaggagtccccaggagctggctggccatcgtgataggatctgtctgtcctgtaaactgtgccaacttcacctgtccagggacagcgaagctgggggtggcggggggcatgtaccacagggtggcagcagggaaaaaaattagaaaagggtgaaagattgggacttaacacttcagggaagtcagctgccggggagaaacttgctcctaaatgaacacataagtttagatcgcaatgaggagtagcagggtagctggttgctagagttacggtggggatcagaaactcttccaaacattttagcactgaggctggggtagcttttggcttttcccaggtctcaggaggtggcctgagtcagcacacatcttcccactcggtagacaggctggcctctccctcactttgagactttggcaactcctgggccacacggcctgcctctttgattactaatgattgtcagtgactcagagcttcctgggacttcgggtacccacccgctgttctccatgcaaacaaagcgccagggaaatgacccacagggatcgcagctgcagggagggccagggaggttgggggtgggagtgaatgctaaaagcagatcgtccagtgcccttttcagtgctaccggcctctcaccaagcagtcctccatgtgagcaaccccgagacaaaaatgctaagtgggatcaagagagcagcactcggagagggtgtttgccagtctgagtgtcccgcggtgcccgccaacccgcttcctgactgacctgagcaaggtcttactaagcagtcccatctctgtgggaggcatgcaacgcgtgcagggagttcaggtgccggtcggcgtagccaggcctggaggccccccaggcaggaggccgcccaaaggcggggccggcgtctcgcagactaggggctgggggcggccacagacggcctcgaaaccacagcccttaccccaatcccacgagccccgccaacgaaccacaggtgctgggctttagagaacatgggaaggcggccccagacctggcgggaacgcctttccctcagagccaggccccggccccgtctgggaagctcatcttgcgaagctgagggagctcagggcaaaggccaggctagcgcggaccggaaggggccgaggctgcacgggcctctgccagaacgctcaggacatcccggcctgggtttacaacgctgttaggaaaattaaccaatgaataaagcaacgttcagtgcgcagggagtgaaattcaatgcccaccgctaggctcctcgctgcctctcactcaagaggcccaaactcagacggcgtcagggacccggacccagcagccgtttcacgccaatagatagggcgcatgcgcagaaatcctcctcggctctctagcgtgagctttcccaaggggccacgcccagcttgccttctgattggtccagctggtgggttgtcttccgccatctttgatcagggcactaaggatgctccccacggccttcacagtgacggcggagaccctgccccgccagctgctcagtacgtgccgcgtagcccgtgcgagccaagtgtgagtccgggcgagcgcctgcggagctagcactgggcccagaatgagagggaggcggaggagcagcgatcacgtggttttagggactgtctaataattccacgccagcattgccggtgtttcagggggtgggaaccgctgcgttccccatcaacttttctcccacccaccaccctccccaacctacaagcccagctcagcttgaggtaactgctgaccggactgtcctatacagccctacaagacagaggcgcctagggctgaaagcgggggcctccgtagggagccagcgggggcctcaatagttactcattttctctacctttgatgaaaataagagctaattcttaataaggcctaccgggtatcacgcaaaaaccctgtgcttactattacactttgggttgttgcaaagattaaaggaaataagccgtgcaaagcgcttaagagcttggtataagtaagtgctcgtcaatgttggctactctcattttttttgcagacgtgggaactggggctcagggaggctaacagccagtaggcggcacagctaggatttgaacccaggattgtctccaacgccgctcaattatacccgccaaggagtcacagagacttagtgaagtgcacacattgctcacctgggtgaactgaggtccagcgggggaaggcttcctcctgttgtaatcactaaccccaactctgtctcccttgcccgattcattcattcgttaattaattcatccaacatcctgtccccaagaagctcagtctggggacatactgatccagttaaatgcgagtgcttcctagttatacatggcgactgctgagaagggactccagagtccaggcacctacctcccaggggctcaccgttcactcctctagcctcatttagagctcgcattaagagcacgggatctggatccacactgtttggattcaaatcacaacttcaccacttagcagctgtgtgttctgggaaaatgacccaccttctctgtgcctccattttctcacctgtaaaacgggctcccaggctggtgggagggtttcaggtgtaagacatggagagtcctttagcgaacatgtagactggcaataaactcaataaatggtgactgttataattaatcctcggaaccatcctagggagtggacactattgtgttccccattttatttattacattaattttttttttttttttttagtagagacgaggtctcgctatgttgtccaggctgttctcgaacccttgggctcaagagatcttcccgcctccggcctcccaaagtgctgggatcacaggcgtgagccaacgggcccagcctgtgtccctccctcgtttttacaaatgaataaagagatgctggataagcccgaggtcacaagctttgcagtgtagcatcccccaacttgatcccctgtctctttggctccaaaacctacactcagtcctgggagcgattagcgccaacagctcagagaaaacgtgacgaaaaccagtctgtaaaacccgagcctgggagaggggcttcggtgcgcggggggaatttgcagacgctccctgctggcggagatttcctgacctgtccttcggcgcgggactttcggcgggtcccggccgggcagacccaagtgccggcggcggagactgcagtggagccagtaccggctgtagtggccggggccgtggcgggagagtcatgtcagagccgcagccgcggggcgcagagcgcgatctctaccgggacacgtgggtgcgatacctgggtgagcgcggggcgacgggcgcggcgaccccaccaccactgggctggagaagcaggggtcgccggacgcccgcccggggcctggaggaggcgggatgatcttagttctcattctgcttttgggccggagactgggctcagacagggctagggacttgcccaaggtcacactaccctggtgggtcgcccagggcggaagctcccatggggtgagcgggctgcccgctctggcatgcgctctggctggctgtggagtcgggatctccactcccatttcggtcctgacacgcactggctctgtctgaacctcagtttcctcctcggcaaaaaaacaaaaacaaaacaaaaaacaaacgagatacacacgagggcctctctcattgggtggtggttgcgagggtggaatgggataaagcgcagaaagccctggcacttggcgagcgtctggtcagtggcgctgccctcgatcactctgcccctctgggtgcctgtcacctcattagtgcagttactcctgggaccaagaccaggaaatctaaccaataagcaatggtaacagtgactcagtgctcagtccgccctcagtggcccgagtccgaggtgggcatcatggcaccagtttacatctcggaaagggaggctcagagaggtcaagtcacttgcctaaggtcacccagggactgcttagctggctaggatgagaaccagcctgctccaacgccccctcgtggaacagttgcgagcctaggaattaaatgttccctcccccaggctatgccaatgaggtgggcgaggctttccgctctcttgtgccagcggcggtggtgtggctgagctatggcgtggccagctcctacgtgctggcggatgccattgacaaaggcaagaaggctggagaggtgagtgttagcctattttccaacccccaaccctagctctcttcttgtgtggttcagtccacagccttgcatgtgataaagtccctgtgggacactccagtccctacaaccttgcctagtgcagtccatagacagtcctgtttgtaggacagtgtacccctgcccccacactcccactccccgaactggatgtggcagactgtaccccactcctgggtgcggacaagtccactggccacttgcccctcccggtctagcctcgtgccccttgtcgcaggattttctgcctctgccccagctggattaagtgtctctgcgcccaccaggtgcccagccctgaagcaggccgcagcgccagggtgactgtggctgtggtggacacctttgtatggcaggctctagcctctgtggccattccgggcttcaccatcaaccgcgtgtgtgctgcctctctctatgtcctgggcactgccacccgctggcccctggctgtccgcaagtggaccaccaccgcgcttgggctgttgaccatccccatcattatccaccccattgacaggtgggtaccttcttggcctcagggatcatccactctccagtgatgagagtggatcatccagtctccaggtagagctagactctgtgaagtgtggggtatgcccactttgctggagcaatagcagggacaaggctggcacttggctcctgggttagaaaggacagcctgtacccttgtcatatggtatggcaggcactttagcaataaaagaagaggggtgcgttgagggtatgggacacaggacaagtaaattcccagaaagaaagtctagtgttacaaaacaaccagagagaagcaggagcaggtgcaccctagaggggatgcattttgggaggtattggtgacagaagcctaactcaaactgaatatttgaataaaatggagtaaaagtccagggctgtgttgcattcaggcatggctagatctaggtacccaaattatgtcattaggggtctgggtctccccatcctgctgcctttctccccaccccaccctatttcttgctggcttcacctgctttctccttgtgggagtagaaatggccctagcagctcccaagttctatcccaccagcttagcctcccccagcagaagcttttaaacagtaacaacaaaaatcccaaggaagggtgtcattggtccattctggactgcatgcccaccctatgagccagtttccctttgctgattggccaggcttgggtcacgtgcttggtcttagaactagatatgggctcaacccaaccagaccaatgtaagagtgagaggagcagtctttctccaggagaagatagctgaccctgaggccctgagcaagtcttttacccagtacctcagtttcctcctgaataaagaagaggatggcttctattctgggagtttgattctagcttccccaggtagcccaaggtggaaggatcaggataagggtgggtctctggctggatggcatttgtatcctgcatctaagcgcccctttccctaaccctggccttctgccttctgttccctcatgaacacccttggtcacctgctcaccacccttccactccctacaggtcggtggatttcctcctggactccagcctgcgcaagctctacccaacagtggggaagcccagctcctcctgatcatactctggtacctggcctgtgcatcggcctcctgcttcatgtcaacctcctactcctgccagggaatgtggacacctggctccctggtgtccaaagaccctggcacctgggtgggtttgagctggacagaagcttagagacaaaggcttcaagaagcagtggctgcagggagtcacagaagggcaggacctgaacgctgtctgcttccctggaatccaagatgctgagtggaagtggaccctgggtgggcccggccctgtctttttcaggaaaattacatcctcccatggaggatgagagactgaggctcagggagggcaaggaataggcccaagatcacttggcaagctgggcacccaggacccccaggtgcttgacagagtcaccccatggtggtatggctgaacaaggagcggcagacaactcagggagaaactcaggagtgcagtaccagggacacctcaggacagattctctggccaggcccttccctgacccaataaatcctgaagaggttgttatgtcttcatttctgtttgggaggagcagggatgtggtggtggggaggagggatgggtagcagtctccccgcccattagtgcttccctgcaggtgcctggcatcccacgttggtgctgccagcctcctttggggtaggcattaccctttacttacttacttttaatagagatgggggtctccctatgttgcccaggctggccttgaatgcctgggctcaagcaatcctcccacctcagcatcccaaactgctgggattataggaatgagccactgcactcagcctggcattgccctctttttctagcctcctaaagcaccaacccctctgggaggggagcctgttgggcagataccacctgagcctgaaggtggccaagatggtggtgtcagccccatatgagggtcacatgagacctcctcatgaggggactcggcagcctggagaaggaagtgaccagggggcttcttacactcagaatcagggaatggcctgttttccttgtggcttcccctgagctgctgggctcgagagtgctagagggggccattcctctgatcctgggccatccccctcaacagctcagagaggtagagaggtgggagcacagggctgaagcagacctgggcccctctcagccctgccccaagcaccaaatcagctcccaccaagaccctggccccatcccttgcagcccaggtgcagtcaggtaggctgaccctgtcctggtgggactcacctgcacctgggctgggacttaaaggggctgcagggctgggtaggggtgctgccagcaagacaggatgggggctccggggtggtggcccctgctgctctgggggtatccatggctacaggatgagtctgatgtgggctgagcctttctctgctactcttattgtcccacactggcaaggtccccttcccaagcccctatggcctctgcccagtcacctgtcactccctcccagctcccttaaaggctttaagccccgccttgttctctagcccccgaccccaccccccattccctgtctgagctggcactcacatccttctccagcccagcattttcccagctcatcttctcccccggcagtcacagccccatgcggggtacattcacacctgcatccctgtgacatctcctggcatctaccaccaattccttgctcactcactctccactttccactctgcaggctctccctcaagctgggatctgtgcaggccacatataggctttgtgctcatgggcctaagcgcccagccttgtccttctccccatcacctgccctcctgtgcctctatgcctttcctcacaacacactgttcctcagctgcaaatccttttcctcttggccagctatgagcacccttcagaaccagctccagtgccccttctgttgttgccccttactatgccttactgtgggccacctctgcccttgactgccccgttggtggtaacttgtgaggaaataccggggtgcaagtttgcagatgcctggcacatagtaggtgctcacagaaggggctttgaggcactcccaggccaggctgatagggatgaggtcggtggacatcctgtctgtagggggaaacaccaccatctccacaaccccccaacattttaccctgctccatttattattattattatcattttgagactgagtctcgctctgtcacccaggctggagtgcagtggcacaaacttgtcttactgcaacctctgcctcccgggttcaagcagttctcctgcctcagtgtcccaagtagctgggactagaggtgcatgccaccatgtccagctaatttttgtatttttagtagagacggggtttcaccatgttggccaggctggtcttaaattcctgacctcaactgatctgcccaccttagcctcccaaaatgcggggattgcaagcgtgagtcactgtgcccagctccctgctccattctggagatgcagggaattaattgaaggtgggggatgctgggggaggtttttgggcaccctctgctggccatgttctcgctgagtctggttctccgcctgagctagcctgggctggattgccaggagacagcctcctgcaggactgtaatcagacagatgtcctcctggcagtgaggaaggagccccaggtggatgcttgccacctgtgccttggcacctgcctgccctccccagtccctgccatacctggctatgaggtcttcactgccccattcaaagcttatggcttcatccaactggtgagggggctgttggaggctcacgaggacaaggctgccaagagccagggagtacccgggagattcgggggagaagagctggggtgtctgggctggaaagaagggtagaatcagatcatactgatttgcaagtcacagcctctccgagtgtgagtttttctctcaaagatgcagagccctgtatctctgcagaattcagtagctaaggatttgatgcagatttgccatttagcatctgtgtgtttgtacgtgccctttacgtgcatttgtttcttgcatcctcaacagccccgtgaggagataaaaccatcattcccatattccacatgaagacactgaggctcacagaagggaagaccccactgtctaccaccagatgcaactcagcacatcattcttcaaagcagaattggctttttttttccttgagacagggtctcgctctgttgcccaggctggagtgcagcggtgcaattatggcttactgtagtctttacctctcaggctcaagtgattctcacatctcagcctcccaagtagctgggaccacaggcgtgtgcctggataattttttgatttttttttttttttttttttttttgcagagactagatctcgctatgttgcctaggctggtctccagctcctgggctcaagcgatcctcccacctcggccttccaaagtgctgggattacaggtgtgagccaccgagccctgccagaataggcatttaagcaagacagggacctcgaatgaggcctagcaggaaattgaggcccagacagggcaagtgacttcaagaccacccagtgaggtgggggcccaagctgggagtagacctttcctgccttttcccaccatcctaaggagcaagtatcctcgcagatctcaggaaagatagtggaattatttgctgacctggtctatgcaccaccacccagttcagagcagccctgcagtgctgcctcccgccattgggtcagcagtgtggtcaaggcgtgagcaatgcctagcacccctaagcctgtctagggccctgccacctggaggtctgcaggaagagggaatggtaggttggatgggggctgcccctccagaaaggggccaccaggcgctgacctcctggcccccacttggtgtgagcctggggcagggctggaaatgctcacctgggggttggaatttggaattcctggccttttccctcctgttcttcctcctcatgggctgccctgggggacttggcatgggcctttagtgtttgttttctgggccccctcacatgccagagttgcaatgttccccgccccccccttatttccctgccagcccaggagctcccatctcacctcccacctccttggtcactgactctctggctgcgtttggaaatctggacttcagcatgagactttggcctggttctttgcctcccacaggtgggggacattggctgggctgaagtaatgtcccaagaggaaggtcttctagctcagggactcctgtgcctccagttctgggccaggttacccctggagaaataaggaagtgagggaggaccagtaacagagtgtgagggcactgggcttctggccacctggccctagcttttcctgcttctcctcttgctgtgtggcctcaggcaaacccttcagcatctctgggtctcgtgtcttccccatcttggtttcattccacctcagggtggggccatactggaggatccagaccccaccaacaccagcaccattttcctgggctctgagctccacatggagtttgctgtggttggcagctcccattagcctttacaggtatatgtggacgagtgtgtgatcagccccagccaggatatggaagtggcccctgcacactacagccttgtcaggaatcatgggtactgaacctggaggaggaggatagggtaggatgggtacaattcagtgggtgatatctctggggaggctgggacaggggctgagagccttccagggctggaaggcacggatgcccagatagtgctccctgggcgttcttgagtagtcctttctaggccaggggagcaagaatgctttactggccctttcacctctggagcctctgtttgcccttctgtgaaatggggatagtgccagaatcttcaaagcctgctgtgtagactgaatggggtgacgcttagctcagtgcttggcatgcagaattctcaacaaatgatggtgtatggtggtgttggggctaggaccagatcccagttcaggggtctgaccctgatgaccttccaacctgtgccttccaggtgcctggtgaacggcaagaacttccactcccacttcgtgccccaagaggtccccaagagactggagctctccttccaggccttcagctttactggtactcctgctgatgtgagtggaaacagataaccccctccccactctgccaccccgtaggaacagagacccaagctgaggaatctttggaagttacggggtgcaccacaagctgttgctctggaatctaaaggtcccatctgatgctaccaagaaggcctgttccttccacaggggcactcatggtgagtcatgttcaccaaaggtgtactgcatgccttaccctgtaactggcatttgaggtacatgacctcacttaattgtgtgggaggtgaggaaactgaggctcaaaatagctcagattgaatttctgcaatagttccccatgcttggctggaccacaagcccaactgctttggcctagagtgggcagtgtgaggtatactgggaatggaggctttggactgtgacctagacccaggttcaaatcccagctccagctcttgctggctgtgacatcatgggcaagtcactgaccttttgttagcctctgtttctttgcttgttaaatgcaggtctggtccatgccacccctagctcccatctctggtgcactgaccacctccatccctcacctctaggtaagaacttctggatgcctccctgggagtatgagtgacagttgtgagattacctgcctggccccctgattaccctatcaaaggtccttggcaggtaggaggcccctgttttgggtgtggagggtggaggtaggctctgaggcaagggaggcagctggcccggggaatcagtcacagccttgcatgaacaggcttatagaagacatcatcttgctactaaaggcctctgaggaaactgacactggcctggaccacaaagacccactcaaggtgcccattgatcagaaccaaggagggtcctggcttctgga

SEQ ID NO: 1355 - DNA, 3584 bp, Homo sapiens
cgctccctactccgcctctcgggatcctttaagaggcggggcttggctgccagctccgcggcccgggcaaaaggctgggactttactccgggtggcggcgaggacgagtctgtgctccatcagctgccgcacccgccgcctcccgcccccaaaccccatccccgcggttgagccacgatgagcggcagagtcggcgatctgagccccaggcagaaggaggcattggccaagtttcgggagaatgtccaggatgtgctgccggccctgccgaatccagatgactattttctcctgcgttggctccgagccagaagcttcgacctgcagaagtcggaggccatgctccggaagcatgtggagttccgaaagcaaaaggacattgacaacatcattagctggcagcctccagaggtgatccaacagtatctgtcagggggtatgtgtggctatgacctggatggctgcccagtctggtacgacataattggacctctggatgccaagggtctgctgttctcagcctccaaacaggacctgctgaggaccaagatgcgggagtgtgagctgcttctgcaagagtgtgcccaccagaccacaaagttggggaggaaggtggagaccatcaccataatttatgactgcgaggggcttggcctcaagcatctctggaagcctgctgtggaggcctatggagagtttctctgcatgtttgaggaaaattatcccgaaacactgaagcgtctttttgttgttaaagcccccaaactgtttcctgtggcctataacctcatcaaacccttcctgagtgaggacactcgtaagaagatcatggtcctgggagcaaattggaaggaggttttactgaaacatatcagccctgaccaggtgcctgtggagtatgggggcaccatgactgaccctgatggaaaccccaagtgcaaatccaagatcaactacgggggtgacatccccaggaagtattatgtgcgagaccaggtgaaacagcagtatgaacacagcgtgcagatttcccgtggctcctcccaccaagtggagtatgagatcctcttccctggctgtgtcctcaggtggcagtttatgtcagatggagcggatgttggttttgggattttcctgaagaccaagatgggagagaggcagcgggcaggggagatgacagaggtgctgcccaaccagaggtacaactcccacctggtccctgaagatgggaccctcacctgcagtgatcctggcatctatgtcctgcggtttgacaacacctacagcttcattcatgccaagaaggtcaatttcactgtggaggtcctgcttccagacaaagcctcagaagagaagatgaaacagctgggggcaggcaccccgaaataacaccttctcctatagcaggcctggccccctcagtgtctccctgtcaatttctaccccttgtagcagtcattttcgcacaaccctgaagcccaaagaaactgggctggaggacagacctcaggagctttcatttcagttaggcagaggaagagcgactgcagtgggtctccgtgtctatcaaatacctaaggagtccccaggagctggctggccatcgtgataggatctgtctgtcctgtaaactgtgccaacttcacctgtccagggacagcgaagctgggggtggcggggggcatgtaccacagggtggcagcagggaaaaaaattagaaaagggtgaaagattgggacttaacacttcagggaagtcagctgccggggagaaacttgctcctaaatgaacacataagtttagatcgcaatgaggagtagcagggtagctggttgctagagttacggtggggatcagaaactcttccaaacattttagcactgaggctggggtagcttttggcttttcccaggtctcaggaggtggcctgagtcagcacacatcttcccactcggtagacaggctggcctctccctcactttgagactttggcaactcctgggccacacggcctgcctctttgattactaatgattgtcagtgactcagagcttcctgggacttcgggtacccacccgctgttctccatgcaaacaaagcgccagggaaatgacccacagggatcgcagctgcagggagggccagggaggttgggggtgggagtgaatgctaaaagcagatcgtccagtgcccttttcagtgctaccggcctctcaccaagcagtcctccatgtgagcaaccccgagacaaaaatgctaagtgggatcaagagagcagcactcggagagggtgtttgccagtctgagtgtcccgcggtgcccgccaacccgcttcctgactgacctgagcaaggtcttactaagcagtcccatctctgtgggaggcatgcaacgcgtgcagggagttcaggtgccggtcggcgtagccaggcctggaggccccccaggcaggaggccgcccaaaggcggggccggcgtctcgcagactaggggctgggggcggccacagacggcctcgaaaccacagcccttaccccaatcccacgagccccgccaacgaaccacaggtgctgggctttagagaacatgggaaggcggccccagacctggcgggaacgcctttccctcagagccaggccccggccccgtctgggaagctcatcttgcgaagctgagggagctcagggcaaaggccaggctagcgcggaccggaaggggccgaggctgcacgggcctctgccagaacgctcaggacatcccggcctgggtttacaacgctgttaggaaaattaaccaatgaataaagcaacgttcagtgcgcagggagtgaaattcaatgcccaccgctaggctcctcgctgcctctcactcaagaggcccaaactcagacggcgtcagggacccggacccagcagccgtttcacgccaatagatagggcgcatgcgcagaaatcctcctcggctctctagcgtgagctttcccaaggggccacgcccagcttgccttctgattggtccagctggtgggttgtcttccgccatctttgatcagggcactaaggatgctccccacggccttcacagtgacggcggagaccctgccccgccagctgctcagtacgtgccgcgtagcccgtgcgagccaagtgtgagtccgggcgagcgcctgcggagctagcactgggcccagaatgagagggaggcggaggagcagcgatcacgtggttttagggactgtctaataattccacgccagcattgccggtgtttcagggggtgggaaccgctgcgttccccatcaacttttctcccacccaccaccctccccaacctacaagcccagctcagcttgaggtaactgctgaccggactgtcctatacagccctacaagacagaggcgcctagggctgaaagcgggggcctccgtagggagccagcgggggcctcaatagttactcattttctctacctttgatgaaaataagagctaattcttaataaggcctaccgggtatcacgcaaaaaccctgtgcttactattacactttgggttgttgcaaagattaaaggaaataagccgtgc

SEQ ID NO: 1356 - protein, 399 aa, Homo sapiens
MSGRVGDLSPRQKEAKFRENVQDVLPALPNPDDYFLLRWLRARSFDLQKSEAMLRKHVEFRKQKDIDNIISWQPPEVIQQYLSGGMCGYDLDGCPVWYDIIGPLDAKGLLFSASKQDLLRTKMRECELLLQECAHQTTKLGRKVETITIIYDCEGLGLKHLWKPAVEAYGEFLCMFEENYPETLKRLFVVKAPKLFPVAYNLIKPFLSEDTRKKIMVLGANWKEVLLKHPDQVPVEYGGTMTDPDGNPKCKSKINYGGDIPRKYYVRDQVKQQYEHSVQISRGSSHQVEYEILFPGCVLRWQFMSDGADVGFGIFLKTKMGERQRAGEMTEVLPNQRYNSHLVPEDGTLTCSDPGIYVLRFDNTYSFIHAKKVNFTVEVLLPDKASEEKMKQLGAGTPK

SEQ ID NO: 1357 - DNA, 3256 bp, Homo sapiens
cgctccctactccgcctctcgggatcctttaagaggcggggcttggctgccagctccgcggcccgggcaaaaggctgggactttactccgggtggcggcgaggacgagtctgtgctccatcagctgccgcacccgccgcctcccgcccccaaaccccatccccgcggttgagccacgatgagcggcagagtcggcgatctgagccccaggcagaaggaggcattggccaagtttcgggagaatgtccaggatgtgctgccggccctgccgaatccagatgactattttctcctgcgttggctccgagccagaagcttcgacctgcagaagtcggaggccatgctccggaagcatgtggagttccgaaagcaaaaggacattgacaacatcattagctggcagcctccagaggtgatccaacagtatctgtcagggggtatgtgtggctatgacctggatggctgcccagtctggtacgacataattggacctctggatgccaagggtctgctgttctcagcctccaaacaggacctgctgaggaccaagatgcgggagtgtgagctgcttctgcaagagtgtgcccaccagaccacaaagttggggaggaaggtggagaccatcaccataatttatgactgcgaggggcttggcctcaagcatctctggaagcctgctgtggaggcctatggagagtttctctgcatgtttgaggaaaattatcccgaaacactgaagcgtctttttgttgttaaagcccccaaactgtttcctgtggcctataacctcatcaaacccttcctgagtgaggacactcgtaagaagatcatggtcctgggagcaaattggaaggaggttttactgaaacatatcagccctgaccaggtgcctgtggagtatgggggcaccatgactgaccctgatggaaaccccaagtgcaaatccaagatcaactacgggggtgacatccccaggaagtattatgtgcgagaccaggtgaaacagcagtatgaacacagcgtgcagatttcccgtggctcctcccaccaagtggagtatgagatcctcttccctggctgtgtcctcaggtggcagtttatgtcagatggagcggatgttggttttgggattttcctgaagaccaagatgggagagaggcagcgggcaggggagatgacagaggtgctgcccaaccagaggtacaactcccacctggtccctgaagatgggaccctcacctgcagtgatcctggcatctatgtcctgcggtttgacaacacctacagcttcattcatgccaagaaggtcaatttcactgtggaggtcctgcttccagacaaagcctcagaagagaagatgaaacagctgggggcaggcaccccgaaataacaccttctcctatagcaggcctggccccctcagtgtctccctgtcaatttctaccccttgtagcagtcattttcgcacaaccctgaagcccaaagaaactgggctggaggacagacctcaggagctttcatttcagttaggcagaggaagagcgactgcagtgggtctccgtgtctatcaaatacctaaggagtccccaggagctggctggccatcgtgataggatctgtctgtcctgtaaactgtgccaacttcacctgtccagggacagcgaagctgggggtggcggggggcatgtaccacagggtggcagcagggaaaaaaattagaaaagggtgaaagattgggacttaacacttcagggaagtcagctgccggggagaaacttgctcctaaatgaacacataagtttagatcgcaatgaggagtagcagggtagctggttgctagagttacggtggggatcagaaactcttccaaacattttagcactgaggctggggtagcttttggcttttcccaggtctcaggaggtggcctgagtcagcacacatcttcccactcggtagacaggctggcctctccctcactttgagactttggcaactcctgggccacacggcctgcctctttgattactaatgattgtcagtgactcagagcttcctgggacttcgggtacccacccgctgttctccatgcaaacaaagcgccagggaaatgacccacagggatcgcagctgcagggagggccagggaggttgggggtgggagtgaatgctaaaagcagatcgtccagtgcccttttcagtgctaccggcctctcaccaagcagtcctccatgtgagcaaccccgagacaaaaatgctaagtgggatcaagagagcagcactcggagagggtgtttgccagtctgagtgtcccgcggtgcccgccaacccgcttcctgactgacctgagcaaggtcttactaagcagtcccatctctgtgggaggcatgcaacgcgctgcacgggcctctgccagaacgctcaggacatcccggcctgggtttacaacgctgttaggaaaattaaccaatgaataaagcaacgttcagtgcgcagggagtgaaattcaatgcccaccgctaggctcctcgctgcctctcactcaagaggcccaaactcagacggcgtcagggacccggacccagcagccgtttcacgccaatagatagggcgcatgcgcagaaatcctcctcggctctctagcgtgagctttcccaaggggccacgcccagcttgccttctgattggtccagctggtgggttgtcttccgccatctttgatcagggcactaaggatgctccccacggccttcacagtgacggcggagaccctgccccgccagctgctcagtacgtgccgcgtagcccgtgcgagccaagtgtgagtccgggcgagcgcctgcggagctagcactgggcccagaatgagagggaggcggaggagcagcgatcacgtggttttagggactgtctaataattccacgccagcattgccggtgtttcagggggtgggaaccgctgcgttccccatcaacttttctcccacccaccaccctccccaacctacaagcccagctcagcttgaggtaactgctgaccggactgtcctatacagccctacaagacagaggcgcctagggctgaaagcgggggcctccgtagggagccagcgggggcctcaatagttactcattttctctacctttgatgaaaataagagctaattcttaataaggcctaccgggtatcacgcaaaaaccctgtgcttactattacactttgggttgttgcaaagattaaaggaaataagccgtgc

SEQ ID NO: 1358 - protein, 399 aa, Homo sapiens; identical to SEQ ID NO: 1356

SEQ ID NO: 1359 - DNA, 135245 bp, Mus musculus
  misc_feature (1)...(135245): n = A,T,C or G
ttgattagagtcttctttcactgtgtgcctcggtttctctagctatcaaaggttgacctggatgatctggttataactggcatgcctagaaggaataaaggcattcttaatcaggtgctgtatctggcactctggctatctgaactattgaaacaagccaccctaaggtattgaaattgcttctgaaatgacttctgggagaaggaagatgctgaccctggtgccaaccagaagagacttggagtgctgacaacatttttgaccatctttcttgaaagagacttggagcctgtgacaatggagggtagggctgcccttggccaggacttcataattattcatatcttttgccctctgtttaacctgactctcatcttaggacccttaagatggtcctaatggggtcgcagtgagtaagtctttttatattattgattgggtactttaaacttgcttttcaaggacaagtggcatgggctctgactctaattatggtaacattttcagttttaaggatggagctatctggctctgaatggaagggggaaggagagggttcatacgctctacctctaattggctgtgtggcttagcgggaagctcctctctgagctgggagtacattattgagtcagggagtttcttccttccttccttccttccttccttccttccttccttccttccttccttccttccttccttcttttcctttgtttgttttttgttgtttaattggttagttgttttgtttttctgagacaaggtctctctgtgtagccctggctgtcccggaactcacgccgtagaccaggctggtctgaaactcatcgtgatgtgcatgcctctgcctcctgagtgctgggattaaaagcttgcatacccctgcccaatacccccaccctctgtctagggaccttctttcttggtttcctgagaactatagccaggaggagaccgcggtgctggcacggagccagccctcaagagtcagctaacactggactcctgctcctgagctgttgtgggtccataaccctgggtgggggttagagggccttgatgcccctaactctgagtttctggcttgtggattgctcagtgggggcagggtgtactaatgagcgcttgaaagtcctgggcaggaggaaagaggagctattttcagtgggttctggttctatttgtagcaggtgagttggcccgggctgcagggaagcttgctgcagagcaaaccgggtgctgagaggggtgtgtttcattaccctggccccgtcagcccctcccctcccctccccaacttcttgccaatttcatttcctctacttttctttggagagtttagaaggggcaccggatctttgaaaggtagatttagtttgtgacatgaagcattcatcaagcttgctaacttggtggaggctgcacactattgattctctcaggctcaagtgagatttgtatccccgctggaactgtagtgtttgtgaaagcacgcagtagctaaactgccaaacctcagagtcgtttctcaaagaagagacaatgtcctttcattttcccaaggggtcttaacaaagagctgacattttctcccccactcttggcaacgtggctaaactaattgtttaatttctctagtcctcagtttattaatttgtgaaatgggatgtgggtgccagggagacatcttgctcttgagccctttccaggagagaatctgtgattttctgacgcagtcatcaaacaaataaggtcaatcctttaatgagaggatggtgggaaggcctggcaggctccagaggatatgacaccctaccctgtcatttactggatgggaaaactgaggctgtaccagcgagatgggatcagtctgtgagtcagtgagccaggccttctacctcccacagttggtctgtcagtcttctctgatgctaggctacaggtagctctcttcagaggaaaatggaagtcccttgagcatgtgctaactcgtttaactccttcagccacctgttctaccaatgaaagccccacacagtacagaggggcacagatgtgctgggtgaaaaagctctatcaccggcgttatgcaaagcccagctatttgggcttcatatagatgcatttttgacgcaatctggtttttactactattgacttcctatttttctttgttttcccatcttcccgcctctgtcctgaagtaatgagattacacgcttttggcttcacatttagtttttttttttttttttttttttttttttttttttgatccagagtttcatagagtttctgatcctcttgtgtctaccttccagatgctgggctaggagtgtgctcctgcacccagcttagcctttcttttcttatgataattttacttatttactttatattatatggtttttttaagacagggtttcatgttgcccagttggccttgaactcactatgtacttgtggttagtttgaaatcctgagtcttctgcctctacctccaaatgttgggggttacataagccactactattggcaggtcatttgatattttttcctcttttcaaattgacaactacaaattgcagctatttctgagctataacatagtttttgatatgtctgaacactgtgaaatgagtgaattatctgtttagcatatgcattgcctcaagtccctttctgtgaggacatttgaaaacctaccctcttacagaatgcattgttaacatatagtatgcaatataactgtacaatagaatgctgtgtaactagaattccttttgtctaatatcttgtatcatttgacacaatagcttcccagtcgacctcagtctcaacctcttgtgactaacatttcactcagttccattaggaccgactccttttagattccatgtatctgtgagtgtattccctacttacctgcctctggcttatttctcttagcataatattctccaagtcatctctcttattggaagcaatgtggttttcttcttctttgacctgaacagcattttttgtatatagaccacattttctttatccagttgtctactgttgggacatgcattctcacatgattctttccgctgcttggctattgtgactgatgttgaaatgaatacacattgtagatatttatttgttctatacacgacaatgttgcttcctttggatatgtacccagtactcagattgctgatcctgttctgctcctatttttagctttttggacatggtatggtgctgtccaggttggcttcaaattcactatgtagccaaggatggtcttgaccttctgatcctcctgtctccacactccaagtactagcattgcaagcatgtgccaatgctccaagtttatgtggtcatgggtgggggtcagaccagagtttcgtgcatgctaggcagcactctgatgactgcgttacagcacagctctactttaattttttgaactctcttcatttgttgtccataatgctttactgatggacattccagccaacactgaagttccccttctctctacattttcacaggcattcgtttgtctgccttgttgataatggccattctaaaaggcatggtattctttctttctttctttctttcttttttttttttttttttttccgagacagggtttctctgtgctgccctgactgtcctggaactcactctgtagatcaggctgacctcgaaatcagaaattcacctgcctctgcctcccaagtgctgggattaaaggcgtgcgccaccacaccaggcaccattgtattttttcttaatgtgggtttatttaggcacacagtggtgctggattcttggtcaaggccttgctcatgctaaacatacaagcatacattaccatcgagccatataccttaaccctttgtgaactctgcgtgtgtgtgtgtgtgtgtgcgtgtgtgtgtgtgtgtgtgtgcatatgttgtatatgtgtggaggccagaggtcaatgtttgatgttttatctattgttcatcaccttactttttgagacagcatctctttctgaacctggagcttaccgactggtgagaccgcttgctcagtaagcccctgggtcctcctgtcctgtcattctctgctgtgcctggctttttacatgggtattagagtccagattcagttcctcattcttgtgcagtgagcatttttatccactcagccatctcctctgagtgtacacttctgttttaatgtacatttcctggatgtttagtgaagttggacactttttttccatataccatctggacatttgtacgtatgtcttctttggttttgctttgttttgttttgagacagtgtctcactatgcagtcttagctgacctagaatttgctatgtagaccacgctggtcttgaatgcagagagatctgcctgcctctgcttttcaagtgctaggattaatggtgagcgctactgcagctagccatgtcttcttttgagaaatgtctgttcacaccttcaatttatttttcatttgggttacttgtttgcttatttttaggttgaattccttgaatactttgtatttttcctaggtacgtggtttgcaaatatagtcttgtattctctaaattgtctgttcactattactctttgctatctatactgaagctttttggtttgatgtaatctcttttgctaattttggttatgctttgtgggccataattaaaaaaaaaaaaccaggctgggcatggtgacacatacctttaatcccagtacttgggagatagaggcaggtggatctctgttttttcttgtccagcctgatctatatagtgtgttcctgaacagtcagggatctgtatagagatcctgtctcaaaataaaataaattcattgcttagagtaatgttacagaggttttgtttctttggtagtgtttgttgttgctggttattcgagtttacatttatttctttgtttactttttatttattttattttatttttggttttttttcgagacagggtttctctgtgtagctctggctgtcctggaactcactttgtagaccaggctggcctcgaactcagaaatctgccttcctctgcctcccaagtgctgggattaaaggtgtgcgccaccaccgcccggctttgtttactttttattattcgaaacatttatacttgtatgcaatagaataaggtcattatctaccccaatttcccccttcagtttctcctgaataccactatacatccttctcccaatgccaatgtttttttttcttaaaaaaaaaaaagagaatgtatttttgcttatgtgtttgtgtgcacctgcttgtttgtctgtgaaaccttcgctgttatactcgcatctgcttttggtgtgtggcaatctgctctggtgaaagtactcaagacaatcttgtctcgtacaaataagatatttgtgggtatttttttcctcaatgtactaagacttgccagagtctaaagtttctggctgggtaatttgtaccaatgaacttctagcattctgctgcactaaagttcatcggtctgtcttccacttggaatggtaccgtctggtagcatgagttgatcctatgtaaaatattagttcactggtttatctgactctcttggctcatttcatcctgtgttatgaaatattcacttttgccagtattaccactcatctcagtataaaatactttcattttgagacagggtttctctgcatcctgaaacttgctcttcacacaaggctgaccctgaacttagggtcacctaccttactctgccttccaagggctgggaataaaggtatgcccaaccttcaatagaaaagactttatgtctcatgaagcagttagacttatgataggacattcacattcccgaaaatcataattaagcagtaattttatcactggtaacaagtacaataagttgtatttgtcagaaacataatatatgtttggtgacaagccaactaaccaaatatgagaaactggatgttgcatgataaccattctttcctgtaaaaatagtgttccttcctcgaggtaatttaggaaacagctgcttgtaggacatcacattttatttgagagttctgaaagcactgggggaggagaaggggaggggtacagaaccactggggtgggagaagggggtacagnnnnnnnnnnnnnnnnnnnnnnnnnnnnnnnnnnnnnnnnnnnnnnnnnnnnnnnnnnnnnnnnnnnnnnnnnnnnnnnnnnnnnnnnnnnnnnnnnnnnnnnnnnnnnnnnnnnnnnnnnnnnnnnnnnnnnnnnnnnnnnnnnnnnnnnnnnnnnnnnnnnnnnnnnnnnnnnnnnnnnnnnnnnnnnnnnnnnnnnnnnnnnnnnnnnnnnnnnnnnnnnnnnnnnnnnnnnnnnnnnnnnnnnnnnnnnnnnnnnnnnnnnnnnnnnnnnnnnnnnnnnnnnnnnnnnnnnnnnnnnnnnnnnnnnnnnnnnnnnnnnnnnnnnnnnnnnnnnnnnnnnnnnnnnnnnnnnnnnnnnnnnnnnnnnnnnnnnnnnnnnnnnnnnnnnnnnnnnnnnnnnnnnnnnnnnnnnnnnnnnnnnnnnnnnnnnnnnnnnnnnnnnnnnnnnnnnnnnnnnnnnnnnnnnnnnnnnnnnnnnnnnnnnnnnnnnnnnnnnnnnnnnnnnnnnnnnnnnnnnnnnnnnnnnnnnnnnnnnnnnnnnnnnnnnnnnnnnnnnnnnnnnnnnnnnnnnnnnnnnnnnnnnnnnnnnnnnnnnnnnnnnnnnnnnnnnnnnnnnnnnnnnnnnnnnnnnnnnnnnnnnnnnnnnnnnnnnnnnnnnnnnnnnnnnnnnnnnnnnnnnnctggggtggtattagatgccactggttagtttgctttaacatgactaattgacctgtgaatttcagctcaataacctgttaaaaaaatgtgcattatatggaatttccatatcaccatctggaagagtgaaaggcttgccgtcaaagagcaaataaaattaggcctccctttttcctcaatacaggacattctttttttgtttgtttgcttttttgtttttttgtttctgttttttgagacagggtttctctgtatagccctggctgtcctggaactcattttgtagaccaggctggcctccaactcagaaatccgcctgcctctgcctctcgagttctgggattaaaggcgtgcaccaccatgcccggccaatacaggacattcttaagtgaaactgccatattgtttagtaccagcccactttgttaaggatacaatggctagtggaacacactgtaccaccgccttgattgggacaaagcaccagcaatgaacctggtccttttgtgccattggtataaatatcaacatgataagaagacaagctactaattggtattattatgaaaagactttgaaccaaatagagccctgagcgtttcaggttacctgaagaacctgtgggccatgcttcaaaagccattgctctacactgaattagaacgggaatgaaatggatccatttccaccagtaggggtaccatgtgctgtcagaaaaatcctgggagatatttttatacttactggaaattttaattcaagcacacacagtgctatgcttgccttgttttagattcctaccactgaatacagaataaaagtaacgattttgataatggcatatgcattacattgtttttaagaaaatgatcactttcaggcatttttgctgaagtaattatattctccttaaatgttatcaatgtcactgtaatcttattttgaatatagaaaggttttttttttttttcctgcttgttaaaaatagggcctggtgtgcgctcaacacacacgctgtatcctcagcccctacaaagggagttttccaggccatgcagagtttgctcttttgtatttagagacaatttcctaatatctgccttccaggcttccaggagtggagaggaagggaagtatgatgtgcacagatgtccctcaacatcagatcacttgagttcaaactctggccttcttgtttcatctacatctaaggctgaagtggtttggtgcaagctaaaagattcggtgcacaccatgaattcaagggtacagtaaaatttcttcaaacattttaaatactggtcgaggattcagtcaaagatttcctttctcactccagatcaaaaagcaaattgttattgttgataaacagagaggcaagcgacaagctgatccatgtgctctttccatgtggactgtgggagctgtgggattggtggagcaggtgtgaatttcctgttgcctgagttgtttacctggagccactttatcagtgtccagccatccagcagggattgtcctggcagtgaagtgctagctccagttcaggttccccactgctggcagtctgtctgtctactctgtgtgtcctgttgtccatctatttgatgctctatttttttttcttgtcccacaaaggccatgagaatatacacaaagggaaaccaggacagtggattataaatgaaagtgtatagtttactgctatcactaccaaaagatttttttttttgacccaagaggtgcaatcattgtacttccaatttagcctgtgcttttctagtgaaggtgaaaacggagacacaatcagctgcattgaagaggaggaagacaggtccttggagggcggtgggaagtctttgctaactgatctgtgatgtagtgccttccttgaccttccttgagattctgtgatgtggtgggtagcccagagagtaataggacagtttgtgttgttatctgggcctgggtttgaagtttaagttaaattcaacttattctgggttttactttttttttgtttgtaaaataaagataggcctgaccatttatgaagattcaactagataaatataaacacttgctcttccataattaggagatttgtctggctattgtgttgtgcaattttaggttctggagacataatgacaaataagacagcatcctttttttctaattattcttaaactccagtgggggcagagaggcaataatgttgaatacaaagaaacaaataatggggggggggagataaacaatttaacaaatacagggataaatttcatttacttgtcttctgataaaaaatcaaggtcatgttaaaattcatctaaggaagtgaaatatctttgaggatttgttaggacctaagccagtagatctcaacctttaaacgctgtgactttaatatagttcctcacgtatgctgactcccaacttactttcctcgctaatttataactgtaattttctactaccatgaatcataatgtaaatatctgaggttcaggatatttgagaccccgaggactgctgacctaaaataaggtattacagtgttagactatggggctcttctggaggccagtcaaagtagggattcttttcccccttgcttttctttgagcactgaggttttttttattaggagctggcgttgaggcagtttgaacttgtattctgggcataacttatagcacactatatttacatgcacggtattaagttagttttatattgactatacttgctggggatataatatcactactgttcttagttttaatagaaagtagagtaagctgaagtgctgtcttggtccattaagttggaaaagaagcctgaaaaatctttctaaaccttgtttttctttttcttaattcgtaacggtttatttattcacttctcatttttcttttcttcctcctgacgcttctctgcagccacagtctggtgacttgcagccccgcccacatcctggggcgtgaccaacgagccaggccccgccctcgcccatcccgtgacggccagtcttcccccccgccccccatcccacagcggacagcgcgccggagcgtgcgcgcgcgcccccgctctcagctccgatcggtctcgggagcgcgctctgtgtggccgctgccgccatgttgttgtggttgtgagaaggcggcggcggcagcggcggcggcggcggcggagcagccggcggagacgctccagcggcccaggcgctggcccccgccgaccctggctggcagcctcctggggtggcggaggaggccctgcggtggcgggcctcgccatgtcctgccgcctggtaagaagcccaccctccggctctggtggcgaggaggtgctggaggaggggcggacctgggccgagtgcggcggctgtcaccggccggggaggcggcggcgggccgagggctgggttggccgcggcctcccggggcaagctctcagaatggagcaccgaggcccggtcgggcgagtcgggggaggcggggtcgccgagctcggcggccatcctgaacctggcggtgggtaacactcggagtgttgggagctgcggctggggcgccctggaaaacgctcccgggcctccgggaggtgagcgtgtggcccgaggccctggtcgagaccgtgggagtcccttagtggcgagaggccggaggtcgtgctgttggaaaccacgggcgagctgtgcgggcctcagcctaactgcagcagggcatnnnnnnnnnnnnnnnnnnnnnnnnnnnnnnnnnnnnntagctctgcaaaagatcagtattatttcttgggttgaaattgtactggatgtattgcatttcatgacccaagatggtattgttggggccagaaaacttatttcaaaaattggaagtagagtttgcacactctgttaggccaccaggagtcagatcatctcacttgtgagttttacacacaggtttctgttagatattaatgttcagtcattgtcagaatgaagtttacgtttttattcttcttactatcttgacatccacttggctttttgacatttagggtcttttttttttttttttttgtattaaaagtgcatgtgttcttgtagtggaggctcagcctcgttcctcttgtgaacagtgagccgtcagaagttacgattgaatggtagatggttctgtatcaaaatgatcttgtttgtggggatgtgaaggaggccttctttgagattctgcaatgtttctgtgttttttacttggaaaccaaataacatgcgttgatggccagtgaaagacttcttttccatgcttgactgagtagaagagtttacagaatgacaccgttgtgggtaaacactatgcaatatgttattaaactaaatttggaagcttctagaaggttagagtgattgcctatgaagacatatttcacccctaccatttttactttttaggtaactgtgagcagcataatgaatttgttcacaaggcatcagaacacattttatcaaattaaatgttgtatagctgaacgtatgtccaaaaacctagaggaaaataaaggaagtgaggcctgaagtctgcttctggcccacagaggggtcctaaaggtgctttctaacatgccaacattgtagttacttctaaaccatctggctcaggtttccagtaaagtggagggtagcagggtgtgttacagtcatttgagaccagggttgtggacctggaaggtgtactgtaggttgtgacaagttcttgaaatttgctccaggctgtgaggtatggtaaagtcagtttaaagaccctcttaacagcactagtttttgctttctgtgataaagtggaattctgagttaccaagagataaattcatatttcaaaggtgtgttgaggattgttacagttttggaagaggtggaagaaagtgttaacagttgcatagggttgtattctgacatatcatagagaggctcacccagttgttcactaacaccagaaaccttgtctgttttgtttcctgataatccccactacttaccatagttctcacagaattttcttttcagattttttaaaaaaatcaaatgaatagtattggtatgagaaacactagttagttattaaaaattacttgatgtcttacattgaagagggattttcattctctttttaagtcttaatgcatttaaaactttaggtgttgacacatgttactgactttataggtggtatagacagatggccattctgtgctgctgggtatatctggatcatttgtggcattaatggctgttgggatattacttctctgtactcaagtttcctcatttacataatttagaactcatactgaggccaagtttttacatattttaagtatatattttttaaaaatatgggtatttaaaagaaataacaactcaggctaaaatttccaagagtttgagatgactgtgggccagccacataagcaagtaccacattagccagggctttataggaagatcctatcttaaaaattgaaaacagaagcagaagagatggcttactgggtaaagacacatgcttcaggggctgacaacttgagtttgatcccctggacccatgtggtgggaggagagaacaaaactctaagttgtctgacctccacatgtgtgcactgacacatatgcacacacacacacacacacacacacacacacacacgagaaactcaaaaagaaataaaactcttataaatttgtcctaagattccagaaagagtattctgttcttgagttttgcttttagcttatggattttatacatttcccaaaaatgctcaggaaattgagtgcatgttgcaagtatgcagaaacagtactcgtatgctgttgtaattctctttatgttgaaatcgagtcaatttcacagagggcacttcataatctggtatgaagacacaattctaagaatgtttgggagaagtttgtgcacattttatgtctagttgtttcttacggattacccagttatatattttaaatagtgaatttgtttttatattttagaaattatgtctatttctgagtatgagtgtaggtgcacatatgcaatggtgaacatgtgtaggtcagaggacagcttgtaggagttgattctctccatcatgtgtgtctgaaactcaggttgcaggtttggttgtcagtgcttctatctcctaagctagctccttagagcattggtggtgaattttatgtaatttcataatcagtgaaaccaatttaaaatgaagtttgagctaaggttctcagtaattcaagactactacatgccattgctatttttaatcttaattttgcgatcttgatactagtgtgctttcattttcattttttgtactgtatgaagaaacaaaagccttttaaagttgacattttaaagttttatttgataaaaataaagattgttttagtgtgatagtggatagctcaggaagtctcaagtctgcctagtgctgctccttagcccttttgtttttggcaagccatagaacattccctcattattaaaggaagaacaatgttttcttatttcacaggttgtgagggaagagcaatggaatggcacataaaaaacaagctaaataatgtaatgatagaatcctattgcattagaattctttttttaaaaagtttttcatgaaagagttgaattgtctagctaggcagtggtggctcatgcttttaatcccaacactcaggaggcctaggcaggtgcatctctgagttcgtggacagcctggtctacagagtgagttctaggacagctagggctacacagagaaaccctgtctcatccttgacctcccagtaaacacaattggctagtgagcagaagtcaaccaggaacatgttaaatgcagaatttcctgatgccactgggaaggcagctgaagtggagaaacccttgagtacttgtatctgttacagaaagagtcatggggttgcaggggctgcagtagagtggagcccgtcttgcagggtgagttcttgttgggaactggaattgaagtaaagccatcaattcaaatgccataaggatcaagtggaatacacttcactgtatttgatctctttcttattttggagctgtgatggaaggtggttggagcaaagagcttagcatgttctgtgtaaaagttatagaagtgtgtttttgtttctttttaaagtttttaaaattttgtatgtatgtgggtataccatgtatgtgcaggagcctgcagaggtcagagagatgtcagatcccctggagctggagttacagatgattataagcctccatatggtttctgggaaccaaacccagggcctctacaatttctccagccccagaactgtattttctgaatggcaagtggcatattgcagggtaatgaagtcagtgtggttactgaaaaaaaaaaagcattaaaaaggataagtcagtacattgctaatgataaaacttgatttgggagttctttattattattatctaagtttgtactgggcgtgacatacaccttaaatctggaagcagaggcgtgaggatttctgagtttgagtgtagcctggtctacagagtgagacctctagggttgcatccatatgtgccagtatatatatgtatgtatgtatgtatgtatgtatgtatgtatgtgcatttgagcagaggctagaagttagcctttggtgccagtctttgacgactgctcattttatattttgaaacaaagattctctttgggaccagtgcactgtagttgagtttgtttaaactgaccagcagctggcctcttctccaatgttgggattataatcacgaaccaccaacacacaaagttttaggtgttatttagggattgaactcaggttttcatgactgtgtagcaagcactttatctattagctatctcccttgtaactcttttaggcttaaattatatatatgtatatatgtatattctttttttttttctcaagacagggtttctctgtgtagccctggctgtcctggaactcactctatagaccaggctgcccgcaaactcagagatctgcctgcctctgccttccaagtgctgggattaaaggtatgcgccaccactgcctggcttttgctatatttttattgtgtgtgttcatgtgtaggtatgggtatgtaggtgggcatgtagaggtcaggggaccacttgttgaagtcagttttctctatctttcttgttgatcccaagatttcaactaaggttgtcattcttggcagtaggcttcttcagctgctgaactatcttgttagcttaaaaatgtctttttttcttagtgtaaaaataatttcatttatataaccttgtactttgcatgtaaattcatttgcccattgccctttgctccccacttcctatggtaccctttttccacctcttctgacttcatgtcattcatacacacacacacacacacacacacacacacatatgcatatatccgtatgataacatgtatattgttaaatttagattccacataggatggaagatatatttacctttccccgcttttaccctctccatctttcttttttccccctttcctcacatctcttcttctcatatagtttgcttttaaagtaaatttatttctgattcagaatgttatagtacatgttcattgtaaaaatcctacaagatatgctgggtgtggcagtgcacctgtgaaatctcagcacttgggaggtgggtgcaagaggatcagttaaggctaactttatccctagtgaatttagagcctgcttgggctacaggagattttgtcagaaaaagccaacaaaacacattcccaagcccaagcaaccaacccagtgtcaaaccagttgaatcattcctagagaatgcataaaagtagaggtgtctagtcgacttgactttaacagtcattaactcttttataatttgttatcaattggaatacttacaagaaaagctttccatgggaaatttatattctcatgatggagattattctgtgatcatattctataaccatagtttacaataattttttgttaatttacattgccttaaattttcttttaaatagtgctctgatgaacttgtgtggacattttctgcagctatgctgttttcctaatcttgtaagtttgcttctcaggtcaaaggatatggttgttcttttgttgttgttgtttttgcttttttgaacaatgcttagaacctccatcccttgaaatagaggtgttttaacatttggatgtattgaaggtaccatattgataggatagacatcttaattttccatcaacatgttagaacccacttccatgcattcatactagcagtttaccaattatagtttgtaattctgacattaaagcaggttagttttttcttttctcttttcagcaccaagacttaacctctatagtttaacttcgtggaggggtaaaaataagttaaatgatgataaagcagtactttaggcctctgatggctttctggttgcttgcactatcagtacaaaggtttgagcactaatcgttaatattttggtgcttaatttataaactatgtatttgtgttttatgagatggaagacagaacgaacatggatgagaattataaatgaagctcaaatccatttttctttcacccagtgggacatctcttgaggtatattgtattctgctctggctgtcaatgcttaagatttctttttttttttttttttttttttagattcatttatttattatgtgtaagtacactgtagctgtcttcagacactccagaagagggagtcagatctccttaatggatggttgtgagccaccatgtggttgctgggatttgaactccggacctttggaagagcagtcgggtgctctaacccactgagccatctcaccagcccgcttaagatttctaaggtggaaaattgtatttttctttttttgagactgggtttcaccatgtcagtggctaggctaaaagaacagctatatagagtattctggactggaactcatagagatccacctgcctctgcttctaattgggcatttctccagttatacaaatgattctgtttagtatcatcaacttaatacttcatatgattgctgactaattgaattagaaaaagacagaaaggtaaggaagagtataaacgtctacttctcacaggcacagtggagactgtgtagagtagaacatggtttgtgaaagcagttctcctgtaaagcatccctgttcttccgagtttggttttggagactgagtaaagaaacgaattgctgcttgctatccttcgcagaggaccacaatgcctgttgtttcagctctccatttggaagggcctggtctattccattttaaaaaggcttcattgaggtgtggtggtgatgactgctcctccacctccttatttttggcctgggaattgaacccaaggttttattcatctaggtgagcactctaccactgaggtgtagctccagcctgcttggtgctttttattttgagacaggatctcactaagcttctcaggctggcttctgtagcccaagctggccttgaacttgagattctcctgcttatacctcttaaatgcttgggttagaagtgcacgtctccattcctgttgataacttttaagttgtgttttgacttggtgtcccttcacccatgttatgaagttaggaaacatttttgtaaaattatttgtttattttatatgagtacactgtagctgtcttcagccacacagaggagggcgtctgatctcattgcagatggttgagagccaccaagtggttgctgggaattgaactcagtgctcttaaatgctgagccatctctccagcccacagaaaactcttttttttttttttttgagttagaagaaaaataaaatttccccctcttctccattgtagggaacttatttctttttttttttgtatggtcattgtcaaagaaagataattaaaatcttagagattgtgaaaagagattataattaagcagcttgagtggttttctttttgttaactaaaaggaatgaaatatttaatgttgaaggtgattgctttgtaaggtgccttggacacataccaggtgtctttttttttttttttaaatcttgtacagtttgatatagaagattctttctgttgggcagtagtggcacacacctttaatcccagttctcaggaggcagagacaggcctgagttctctgagtttcaggctagtctggtctgcagaacaagttccaggacagccagggctacacaatttctctctcaaaaaaggggagaggggtgttctttttcatgcatcttagatcccacaaggatttgagaccaatattattggagatgttgtaacttagagggtttgatatcaggcttaggtatagactgaaaactctgcagtaaggtcaggtagctgtttgctgtatacatctaagtattcgtaggctgattaaattctcaacttgttttgagacagcatcttatggaacttaggatagccttgaacatgtgtagccaaggctagacttgaacagcctgatcttaccttaggctcctaggtattgggattatagccatatgtcatcatgcctgaccagcacatatttacttactcaaatgtacataaattaaattgttctcttaaaaacaccatgtacaattttacttattatcatcatgtatttctgtatactatggcatatatgtggaggtcaggatttgggagttgaaccctgggtttctgggatcaagctcaggtagccaggattgcacgggaagcacttttacctgctgaactattttgctagtccagattattgttttatgtaatgtgcagagaagatatttttgtaaggtcagtaattgtagatcaaactttctggtattccttttcctctcaaagtcttatcaagggttgaaaaacaatctcttaaaagtccttttactaagtatattagcaatatactttgccctggataatgttctgtttgtttgtttgtttttcgagacagggtttctctgtatagcctggctgtcctggaactcactttgtagaccaggctggcctcgaactcagaaatccacctgcctctgcctcccaagtgctgggattaaaggtgtgcgccaccactcccggctctggataatgttcttaaactgcttttcatgtttgttgtaggagtgaaggaaatggatggagtaaggttgattcttttcaccggtctcattttcttcactcctttaaacatatattcataaaacatgcaagaaagtgaatcttccagagaaacaggatcgctcccttgttctgcggtacttaaattaatcaatatggttatacacagaagacagacatcttgcagaacacgggtagaaatgttagtggtgattaatatctgtccagtgagatatgactttttttgttttttttgttttttgttttacaattgactagttttctccaatgagttatgtttctttatagttaagaaaaagaacaggtttgaaacatcaatttaaaaactagttgtagttctaccagcacagaatagaggatagtggagctaaagataagcttctaaagtatggtccacaaattgttagactccaatcattaaaatattggcattttcttcttctgtgtgtactgaatccttttaggcttttgaaatgaaaggcagtgtaagggaggaggtgttgggtgttaatgtgcctagagctatggaaagattggaaacagtgatcctatactatactcagaaataggatctgaaataaggctgtggcaaagtggtaattcagtggaaaatagctagctagttagctccttataggaagtatacatctgttaatcagttgaatggtaggtaagagacagcaatttgaagttgatagagtttaagcctgcaggaataaattgaagtttgctaattggaaggggaagagagttttggtaaaggactgagctgaaaccctttatgtatttaatactgaggctgggatatagtcaagaaaaaaattgcctacaggagcttggttacagagaacttgaactgggaaggaaggtaaactagtatgaatgaggtcttggatttaaaagaacacatttaggtgactagagaaagtggagctaagtattactgcctctgtctcatcattgctggggtcacaaagatccacctgcctctgcctcctgggtgctgggattaaaggtgtgtaccatcaccactgccaccacagccactacttggccaattatagaatcttaacgtgaaagcagttacatagtaggaagagattatagaataaaatagaaccatttggttatttatagattttgttggagaacagtggttttcagccttcctaatgtgaccccttaatacagttcctcatgttgtgatgacctccaaccataaaattattttgttccttttcacaactgtaatattgctaatgttatgaatcatgtcaacatctgatatgtgaccgcaggttgagaaccactattgtagcgcctgtgagatggcctagcaaataaaagggcttgccgttcaagtctgataacttgagtttgatccttggaacctagggtggaaagaaagcttactcctaaaaagtttcctctgaccttcacatgtacacatgccatacacatgcaatactaaataaagtaaaataagttggggttggcgaggtggttcagtgagtgaagacatttaccaccaagactaacaactagattttagtctctgcagctcacattatggaaggagagaactgactcttgcatgttgtcctccaacctcctctctctggcacatgagttagtgtgaaagatttttcagttcatttctttattttaacatgagtgagtgtgttctctctatgtatctctgtgtaccacatgtgtacctggtgcctgtagaggtcaggagagggtactgggttctctgtaattggagttgcagactcttgtgaactgtcatgtaagtactcagaaccaagtcgtctggaagagcagcaagcacccttaaccgctgggccatctctcagcctcttgaaagattttacaaacattctttagatttctaggcaaggtgtataatggagaaaagttttttgttcttgcctgccacccaatatcttgtttctgctgctggaaataattaagattctatcacatgtatggtttaaaattattctttactaagatatactttacatatagcagtgtttagttttttaaatatttatttattattataagtacactgtagctgccttcagacacaccagaagggggcatcagatatcattacgggtggctgtgagccaccatgtggttgctgggatttgaactcaggacttttggaagagcagtgagtgctcttaaccgctgagccatctctccagcccctagtgtttagttttagacacataattttgtaaaaactattatgatcaaggaagaatagtttatttgataatcacaaacacttttcttgcagtcctttgtgtagttagtctggtctctggctgtttgttttctttttatggctttgtctattttaaaattctatgtatgggccacacagcatgcagcctttatagtgagatggcatctcactatatgtatttctggctgtcctgaaacttcctgtgtatactagggtggctttgaacatgcagtgattctgcctttgaaaggcagaggttataatatggcatattgtacttgatatagtgtgatttgatactcatcctgtttttggttatcagtaatcagtttttacttcagaatagtattttgttgtatgaatatgccacagtttatatctcttattttattgtattgtttttagattttgataattacaactaaaggtgctagaaagtatacacatgtatgtatgcccatgtatttattgttttgatggaaaaagtaaagtgcctgtggctgaagagatgactcagttggaagcgtgcttgatagaacgtatataagcctgaagagtttgtatcctatcacccacataaaaaaccaggtgtatgtctataatcccagtgctggttaaggcaagagatttcactgtctcagtggaatcatgggttctgggttcagtgagagagcctgtctcagaaaataaagtagagagtaattgagtaagacacttgatattgatacttgacctgtacatgtatgtacactcaaatataatatctagctgattcagctttttgtttgttttaaagttttatttatttaatttatatgagtacatttgtagctgtctttagacacaccagaagagggcatcagactagtggttgggctgtgagccaccatttggtttctgggaattgaatccaggccctctggaagagcagtcagtgctagtgctcttaaccactgagccatctctccagcccttttgtttgtttttttaagacagggtttctctgtgtaaccttggctatcctggaattcactctgtagataagactggccttgaactcaagagactcacctgcctctgcctcctgttccgagtgctgggattaaagctgtgtactaccactgcctggctctgatccaacattttgatgttgtgacttgacattgactataagtgtatttgggcatactctgttctgggacacgtgtgaaccttgggtcgaacatgcctagtccttttgtatctttactacagaatctgaaaaggctgggaattttcatagagcattgttagtttagcaaacttcacttctagaaaaacccacttagagaataaatgggagtaacttgtttacatgagtattcttaaactgttacctctaaagcaaaaattttcttttatttaaaaagtttatccaaaagactcagatttgattctcagcatccatacagtggctggcactcaatcatctgtagcttgtttgaggagaggctctcttctgtactccaaaagcatcagacatatttggtacacagatacatacatagccaaatacacagaacatactaatacttttttaaaattaactatttttattgtgttgtttgtttgtgttcatttgcatgccctcaggtcaggggacagacaagttgtgtgagttagctcagtttcacccgtgcaccctagggttagaactcaggtcattgtgtttgctagcaggtaccttcatgcattgagccagcttgtcagcctcagaattttttaaaattaaagaagttaatgcatacatactttttaatgaatatgtaaactgccttagtgttaaagtcatattttgtttttagtggcttttaaattgtcaataggatgaatggtagtaggatggttatcaaagtctgtcagtaaaattttcctatgattttagggcaacctccttaacttctctgactgttttctttttagaaatgggaataataacactcctgtgaggatttagcaagtgtctattgcagtagctagccagtggtaagggctatgtttttgctgtttgtagtgatgatattgtcattacttgataatgacaacattatcttctttcaactaggcaacattcagggttagagaaggaaatgcaagaatcaaaaatactgaaaaatgatagattatttattccaggaccataagtagcaggggaagatttaggcaggaggatatattggtataataaagggagatccattttcttagcgtttcagctctgcagtatttcttgagtctgtaactgtgttgaggactgactcagagtcttgagcatgctaaaccagtgttacattctatgttagaggttgtatggtttgtggtttggtgcttgggccctctttttttctttgtttgtttgtttgttttttttttttgcataaagtggtttaagataatgttctttttctaacttaaatgtaagctgtttaaatctacttcttagggaatatctcggctttattatttaaattgaattacataatagatcctaattacataatatatcctaaaatgtctagaattttttttttattttatatgtatagcctactcatcttggatattaaattatcttttacatgtttttagtgaaggctttatttactaaaactgcataagcttatatatatatataatttgttttttggttttttgaaatgagatttctctacgtagtctttactgtcctagaactatgtatgttaagttggatggctttgaactcacagactgacatacctacttctgttatctgagtgctggaattaaaatatgtgccaccatgcaagaccatagctgtattgtttttcaagacaggatttttgtggagccctggctgtcctggaattcttagaccaagctggctttgaactcaaagatccacctgccggtgcctcctgagtgcttctttttttttttttttgagacagggtttctctggctgtcctagaactaactttgtagaccagactggcctcaaactcagagatcaaggggtgcaccactgtgcctggtttattttactttatttttttaattaatttatttattatatgtaagtacactatagctgtcttcagacactccagaagagggtgccaaatctcgttaccgatggttgtgagctaacatgtggttgctgggatttgaactcagtgaactaccatgtggttgctgggatttgaactcaggaccttcggaagagcagtcagtgctcttaaccgccgagccatctctccagcccttatttttttttaactttctctaagaactactgttctttctttcttcctctttctttctttctttctttctttctttctttctttctttctttctaagaaaatgaatagcattctcttataaggtattaggactagactttctcctccatttaactgatattcttgcctgatatgaaaaagttaatgacttttctgttttcagagtcacacaaatttaaatgcgcttatttgtatagaatatactcaaaatcaggaaattttacaggacagttttgaacacatgcatacaaggaaaccttgtaaaattctcctgtctgctgtattacttctttcttttggggggggcattttttaaaattaggtatttatttcatttacatttccaatgctatcccaaaagcccccacatgctcccccacccactcccccacccacccacccccacttcttggtcctggcattcccctgtactgaggcatataaagtttgcacgaccaatgggcctctctttctactgatggccgactaggccatcttctgatacatatgctgctagagacacgagctccagggggtagttcatattgttgttccacctataggttgcagatctctttagctccttgggtactttctctagctcctccactgggggccctgtgttccatccaatagctgactgtgagcatccacttctgcgtttgctaggccccagcatagcctcacaagagagagctatatctgggtcctttcagcaaaatcttgctagtgtatgcaatggtgtcagtgtttggaagctgattatgggatggatcctcggatatggcagtctctagatggtctatttctttcttctaactcaaactttttatttgtgtatgtagggaggttgtatgttattaaaacatttgagtggcttgcttgatatgtatctgcatcccttgcttgataagtactttagggagccttgaaatgtgttgttttactcactgttcccactctccaaaaatatgtttttatgctagatccagtagaaagcgtgttggcagtagtccagatgctgactcactaaggagcaatggtagacactgaagggaatgacctatcgcaggattctatttcaaagcctaatgctgtgattacatcagtaaaaggcagccaagaaatcatgatgagatcttccttgtacctcctgggagtattgctacacagaggcaggccctttcacagaagtaggcactactttatatatagataaaagcatttttttttttgctaccaatcttacataatttaaaggtgagcaataaattgaggactcataatggtggtgccgttgtgggactgaaggtgtcttttcccttttctggacctggatgagaatagcctatggtgactaagggttaactcaagaagctcaatgcagatcagttttctagagctaaaggaatatacttagctacgtatcatgttcatgccagacactgtagcctctgtctcctaattaaacagactggaagaaaccaaagcaagatcaggtcctttgcctattcctattgtacattttaggagtaaaaatggttagaaaatgggcttgctttaataccgtgaaatagatactactaaatatgatggtttggattggagagattgcagttccatctttaaatttgatttcatagccataattggtttttggtggccaactaaacgtttataatcactaggaaagtttgtttttattgcaaattgggatggaaagtgcaggagcatgcacattttctgtttaaaggtgtcttagagatgagaaaatacccaaatgacctcaaaagagtttttcagagataaaccctagtgtacttagattgacccatttttattatggtaaaagtttctacttctctgtaaactatgttaatcctaaagaaaagtgttaagcatgatagtattttgctataaatgagatgtttgtttagctgtttgatgtatttcaagtatactgtttgggaattaaaaagttagttttcaactgtttttccagagtatgcttctcaaaagttaaaattactttgctttctttaaggaatatgttatatccatccatccatccacccacctttccctccctccctccctgcctgcctgcctgcctgcctgccttctgtctttcagccctttagtctaatttcccaccacagattgccatctttcctgttgtttggtcctggtcattgcactgggaaaaaaaaaaaaaaaaaacttagtttcttttcatctgttttttttttttcctttcttttcttcagccttttctatatgtagtgctttgacaatgacctttaaaaaataaagtgtagggctggtgagatggctcagtgggtaagggcacccaactgctcttccgaaggtccagagttcaaatcccagcaaccacatggtggctcacaaccatctgtaacaagatctgactccctcttctggagtgtctgaagacagctacagtgtactttcatataataataaataaatctttaaaaaaaaaaagtgtagcaagagagaaggttgagtggttaagagcacttgtccttgcagaggatctgggttcaggttccctagcaccggtaagatagcttacaaccatccacgactccagttccaggggagccagttcctccttatctctgcaggcaccaggcttccacatggtgcacatacatacactcagtaaaacacttacacacataaataaaataaatctcaaaacaaaacaaagcaacaaaccctaaacaattcattcatttagttacagcatacagggtattgcaccctggcactctggtacttaacctaacccttgctgacctttgtttttgaattggctctgcatgtactggtcctacttaatttcttatattatttaaacctgcatctttagaatatttactgtttaagcttatgacttaacaaagtaatttttctgtacctcagtttccttctttgtaaagcaaggcaatattacctgccttgtggaaccttgcgattgagtaataaacagtgaagtacttaaaagaacgcactgtgtgttgtggcttttagaagccaagaatcttgactcatacatattttctacagtgcttcatttttattaactgatttttagaatttaacagaactttgtgttgataagtgtattagttagggttttactgctgtgaacagacaccatgaccaaggcaagtcttataaaacacaacatttaattggggctggcttacaggttcagaggttcagcccagtatcatcaaggtgggagcatggcagcatccaggctgtcatggcgcaggcagagctgagagttctatatcttcatgcaaagtctgctagtggaagactgacttccaggaactagggtgaggatcttatgcccagacccacagtgacacacctactccaaaaaggccacacctccagatggtgccactccctggtccaagaatatacaaaccatcacaataagtaataaactttaccttgtatttaattcatcctaaatgtcaatttactgcttgctaaaaatataatattttgttgctctagattatgcttagaagataacatgttagcagaaagttgtttttctgtaacttctaggactctatgtttttgaatgtaatgtatgtatgagtgtagagttgtgttgttggacagaatggtatgcatgggctgggaggactgggagataagaactacagccgaccagcaaagaatctgaggttgcagcctgctagttaatactcagttgttttgcatttgttctgaaacaaagtatttaaaaccaaatatgcaaggtaattttggatttctttccaattaaaaatccatctttcttctttctttcttggaaagggagaactatttctctagagataatttagaacttgaatgctttatgaatgttagtcatggctgtgatgactgtgtgatcacctgtactctactcttaaacctggttatgaatccccttttctctgaggtgggactttttcagtgacttttatgagagttagattgtttttttacatttggtagaattattgttaattcctagactttatcctttaactagattttctatgtatgtagaaattatcttgcgatatttaattatattagtaaaaggaatagggtatttgctggagttctaaattttttgaggtttttacatttaatttatgacagcaaaataaatcaacatggggttggagagatggctcagtggttgagtccttgttgctgttacagaggacttgggtttgattccagcacccatgtggcagcttacaaatatctctaactctaattctggccctcttctggcctctgtgggtaccaggtatgcatatgatacgcacccatgtaggtagaacacttaaaaacaaaagtttaacaagcaaaataatgtttttaaaacagcaaattagaagaataagtcagtcaatatatatagtggtcagactattacagtgtatattcagtgtgtacatggaacactccttttttttttttcttgttggctcaagggtagaccatgtctacaaggcatgagcagttttctactaattcatcctgtgccgatgggcatttgccatgaagggtcaatatctaataacatattatctataatataattaattatatattattcattatcatgtataatatgtaaaacattaatataaatacatatacatatatacacatatattactgtattgacaacagaaacgataagaacaaaatgtcagttttcttttgggcttgtgaagctgggactgcctccagctgcatgcatctctcctcttgctctgtcaaaggtagatggtgtagctgcagagggagagaatgaggccaagaaagtcaagagtagcgtgaaatgaagaaatggatctggtggcactgagcttttgagggcctgctatcttcagttggtttgctttcacatgtatgcatttcacgttggacatgcctggatgttagaccttttgtaactttactatagaatctaaaaagaatattgtcagttatttagccaactttactcctagaaaaacccacttggaataagtgagaatataagtattcgtgtgctgttaactgtaaatcaaacatttttgtttaaaaatcttgttggggaggtgctggaggacactcaagcaagcaccactacaatggataaatatgtaatggagaggtggaaaagaaagaaagaaaggtagaaaaactgagaggtgcctatgctatggagagaggaggacctagagctgtcatggtggtgacaggtgagagggaggactgaggtctgcatgctgtcattccccaggagggtcagcaggatggtgtactacagcttatgctgacgcagactcagtccctcaacatgccgcggggcgggctgcaggatcccactggctctgggcagtgacaggcccacaatgaggaaaggttcacttcttggattggacctccttgatggaccactggggtctgcaatactacctgaagatatgttggtattggtggcccatgctgctgcccagaccacgatgaagcctgagatccatgtgggatgtatgcagtcttagtgatgtcctcaggctttgctgcctcaggagccttgctggtgtgagtggcatgtccaaccacttgagaccatgatggtctgagcagctgctgagggaatgaatagatcagtgctcctgacacagccaagggccaagttgatggccgtggcctcatgtgggtgtggtggtccgggctgcaggggctgaggtctgcatgctgtcattctccagcagggcctcatgtgggtgtggtggtccgggctgcaggagctgaggtctgcatgctgtcattcacctgcagggcctcatgtgggtgtggtggtccgggctgcaggggctgaggtctgcatgctgtcattctccagcagggcctcatgtgggtgtggtggtctgggctgcaggggctgaggtctgcatgctgtcattctccagcagggcctcatgtgggtgtggtggtctgggctgcaggggctgaggtctgcatgctgtcattctccagcagggcctcatgtgggtgtggtggtccgggctgcaggagctgaggtctgcatgctgtcattcacctgcagggcctcatgtgggtgtggtggtccgggctgcaggggctgaggtctgcatgctgtcattctccagcagggcctcatgtgggtgtggtggtctgggctgcaggggctgaggcatgctgtcattctccagcagggcctcatgtgggtgtggtggtctgggctgcaggggctgaggtctgcatgctgtcattctccagcagggcctcatgtgggtgtggtggtccgggctgcaggggctgaggtctgcatgctgtcattactccagcagggcctcatgtgggtgtggtggtccgggctgcaggggctgaggtctgcatgctgtcattctccagcagggcctcatgtgggtgtggtggtctgggctgcaggggctgaggtctgcatgctgtcattctccagcagggcctcatgtgggtgtggtggtctgggctgcgggctgaggtctgcatgctgtcattctccagcagggcctcatgtgggtgtggtggtccgggctgcaggagctgaggtctgcatgctgtcattcacctgcagggcctcatgtgggtgtggtggtccgggctgcaggggctgaggtctgcatgctgtcattctccagcagggccagtgctactggatcattctcccttggggggctgcccactagaaatttgatcatgcttcagtgaatatatggaccatacaaaatggactttttcccccttttttcttttctgttggggtgggagagatcatgggaagagtagggggtggacttgggaagactaggaagtgaccaagatagaatatatgatgtgagattcccaaataatcaataaacaaatattatttttttattagggctggagttggcttggcagttgagagcacttggtttttcagaggacctggatttggtttccagcaccaacatggtggcttacagctatctgtaactccaattccagggcctgatgcctgctatgacctctgtaatgaggtttatttttatgtagactagagcatacgtgatgtagtcatgttcataaaataaaaataaatcttaataaaggtgggagtctataggggaagagacattttgcccttttcacaagcacacaaatgtgcacttacacatacaggtttacatggcagcatgctccttatgtgtgcacacacccaaaagaacagtaaaatcacaaattaggactgttgattattcttgtgtgtgcgttcccatcccctcttcttacatattttaaagttctgattttaatgcatacctattttggaatctgcttcccagttcactctttcatcataaagtctcctctcattacctgctctgactgctttttgaatggtgagccagtaaagctgagggagaaattgttgcagcaagcaaggcagctttatccgaacagttggctgcatgagaaggtggaagactttcccaaagtctgtcttgctgggaagctaatttagtaatggcttacatgatgatgggtgttcccagacttaatgggaggcggacaggacggggagagcaggtaaaacatgacggatggagtacatctgatggtacttgctgagtcatgagagccttttattctgcagatgccaggactgagcgtggttgagctattcttgtcatggattagtttgccaattatgtagtctgatattggcaaagtatagactagaggaggagcttctctaggctctcaccagttgctaaactataaaagccctataatggcttttatcattcagactcttgcataacttgtttgagtctaactttcctaccataaaaaactaaaaaattgggtaaacaaagtacatgaaattgttcttgaacttgggcaatagctaacacagagaaacacactgcttaagttacatgattgtgctttgatacacgttgctgaaggagatcagagaatccaagcagaggagagacccttttgagcacttcagtgagttttagaaggcggcagcagccctgtgtctttaccagactaaatgccaagtgttggaggaggtttcttgagagtggtcataaattgttatatagtaagccactgcttgggaactataaatgtaatgatcagaattacgcagatgttccagttctaagccaccagggtaaaaagatgtcacttaactcaggccacaccattcagctaagagcttattagcaagactaacctggacctgttaaaaagggctttcttgtaggcttcttctaacagagctttaaataaagacaagtcttgagttcagataaagatatctttcctctttgaaaccaggcctaggggcagaggtttataatcccccaaaccagggagatccatgcagaaagatggcaagctccaagctagcctggtcaatactagtttaaaatggtagaatgcttgtctagcacaatcaaagtcctagttttaatcccagtaccagaaaaaggaagagaagataatatagttgatcatttcacagttgggtatagtaacaatgaattatggattttgtaatatatctagaagaaacattaatgataatagtgttggttagttactttgtcaacttgatataagccaaagttacctgggaagagagaaccacaataagcctactgtgggatggctctatcctgggaaaggctcctcctgggaaagatggtttggatggtataagaaaacaggctgaacaagcaagctagtaagtagagttcccctccttggtctttgttttagttactactttcaggtccctatcctgtttgagttcctgccctaatttcacttagtgatgaattttgactaggacatgtaagccaaataaacccttccctcccaagttgcttctggtcatggcgttttgtcacattaatttgcaatagaaagcaaactaatactacaaatagcaaacaaacaaacaaaaacaaaaaacaaacaaaaaccccaaaccaacaacaacaaaaaagacaaggtggaaaatggagatggactctaatacagcaagtaatacagtttcatttgaaggcattatgttaaagtacctactgtaaagtacaggaactgaaaaatggagtaaaagccaagttagcgatgtggcttaggggtgcaggggtttgtgcagcgtgcataaggccctagggatcttgatctaaagaaaaacaaaactcagtgtggagggcagaggacaagctatgatagttctctaccacatggacccctgtgtggcacaagtgccttactcactgccttagtagtagtgttgcattctatagtgcaggcttccctgtagtcctcttgtcttcgagtgctgaggttagaagcatgtattaacatattcggcttctgttcttgaccagaaatactagcatatttaaatacaataaaagacagtacattgtatagaccagactgacctccagttcacagagcagtagaggctgaccttcaactccagagttttagcatgacaggtgtaccacctgtgtgtaccaccatgaacagtgcatacgtgtaatgctagagagcaaacccaaggctttgtgcatgctaggtaaacacttggccaactgagctaaatcttcagctccaagaagtttttttttaattgacttttacgaatttgtattaattagtattaataattcaagaggttgaagctttaaaaaaatctttaatattttaggaagagaaggagttagtcgcaaatggctagttcatataaaagagcattctattattgtcctgaggaaattactgccaaaggtgtatatatggcatatatttgggttactgtttatgattgcacacttcaattttgtatagtagtatttgtcactactcttcactacccaacaaaggacccttcctgtaaagtgctgcttgtaggcccgactgccttcctctcttcttcccatcttcccatccttcttttatcaatcttgctctatgttgcccaggcagacttctagttcctgggcttaagtgaccctgtgatgttaaatcttagtgtagctgcacagaccaggcacctggctatttgtgtaagaggtaaaaaatggaaattgcataacaagttgcaatatagacatattttgttatagtttattttggttttaaaattttaaaattattttatgtgtatgggtggtctgcctacatgtatgtctgtgtaccacttgagtgcatggtgtcctctgaggctaagaagaggcacttggcacaggaatttttgattgtgagccacaatgctggacactgaacctgggccctctggaagagcaaccagtgcctgtaacctgagtcatttctctactccccccaaccccccatgagattttatagtcatatagagtatgattttttaaaaagatttattaatttattatatgaaagtacactgtagctgtcttcagacatcccagaagagggcatcaaatctctttatggatggttgtgtgccatcatgtggttgctgggatttgaactcatgacctttggaagagcagtcagtgctcttaattcctgagccatatctccagccctagagtatgatttttagttgacttttaagtcaaatcattttcatttatcctttgtttcaccaggatgagtctaccaggcaggagcatttaaatatttatcaatgaggatgaataatttctcattttactgtcagtatttctgggtaaataatagtgggttagtggtagtaggtaaattgtagtaggtaaattgatactatatccatgttatatatggataaggtttatagcttgaagattatatggataaatgttatttactaactattgagtcaaatctgaatagttaaatgatcaggggatcacttaacagagggggaagttgcagataaactttaaaattttaaaatattttttgtcttggaacttaatgcaagtttgaatttaggaaatgttagttgctgatgttggaatctacacgagatgaatttgaaatattattgaatgtgacatgtccttgtgctgttgagactttgtctagagatttgtagttcttagcaagggtctctaaactggccacctgatatataaatggcttctatgtcttccagttaatgttgagcctaatttttttcttcttgattagcaagtagcaattctctggaagacatactctttttgcaaagtgaaacctcccccacccctgcacatgttagacaaatgttctaccctgaggtgaatctccagccccttgaaatctctttgggtagatgaatggcttctgatctcattcagttcctagcttgagggaaaaagcaatggggttggagacttactcatgccttttctcctctcctctcctctcctctcctctcctctcctctcctctcctctcctctcctctcctctcctctcctctcctcttttcttttctctttttagatttatttattatatgtaagtacactgtagctgtcttcagacacacagaagagggagtcagatctcgttacggatagttgtgagccaccatgtggttgctgggatttgaacttgggacctttggaagaacagtgttctttttttttttttttttttttttaaagatttatttatttattttatgtatatgagcacactgtagctgtactgatggttgtgagccaccatgtggttgctgggatttgaactcaggacgaccttcagaagagcagtcagtgctcttaacctctgagccatctctccagcccccagtcagtgttcttaaccgctgagccatctctccagccccgccttttcttttctttctttctttaaaattttttttttttctagacagggtttctctgtgtaacagccctagctgttttggaacttgattagtagacaaggttgccctagaatttacagagatctctctgcctctgcctcccaagtgctgggattaaaggtgagcaccagcatgcctgactttcctcatgccgttcttagttaaatggagaaatatcccacatgattgacagttttcaagtttcttttggcacaggagtttcaccataaattttcttagttaagtttagtttaaagggaataaacattaagatatagaatatctggtgagataattcagtgggtaaaggtgtttgtaggcaagcatgacaaacctgagatttttttttctttttaattatttatttattgagacagggtcttactatgaagctgtggctggcctggaactctctttctttgtagaccaggttggactcgaactcacagagatctacctgcttctgcttcctaagttctgggattgctgagtggaattctgacaacctgagcttgatttctggaaacctacatagtagaaggaggagagaatctactgcaaattgtcttctgacctccatgccctcatacatagacacacatataataaataactagaaaaaagggaattttaatgtcaaagataaaagtacaaaatagtacctagctttagtacaaagaaatggactgatgggccaggcggtggtggcgcacgcctttaatcccagcacttgggtttaatcccagcacttgggaggcagaggcaggtggatctctgagttcgaggccagcctggtctacaaagtgagttccaggacagccagggctacatagagaaccctgtctcgaaaaaccaaaaaaaaaaagaaaaaaaaaaagaaatggactgatgagttggttcagtagataaaggtccttgctgcacaagcctggtaacatcagataggagagaggtgactccacagagggtctgctgtcctccacacgcacactagcatgcacatacacactatgaagaggtcttcagataaacaacttccatctttccacatggggtattgcagcgtaaagtaaaaatctgagtgagctccaggacggccagggctccacagagaaaccctgtctcggaaaaaatcaaaaatcaaaaatctgaacttagtgctctggatgtttgggggacaaatgtataatgatgtagttttgctagcagtcatcaagtcattgttacttcattttatgcttcctgacattttattattactggaagtgtttttctaggccctacagcacttttctttttcttttttctttttttttaaaaacatggccacgttttcttttttttaaggtttataaaagattttttattacatttatttatttttgtgttatgtgttgtcatgccatggcatgtcatgtggaagtcagagtaccactgctggaatcatgtcagtcaccttttactgtgtggattctgggaattcaggtcgcctgtcttggtagtgttgcctttatttgctggccccattttttttgtctgttcttcctattgcctaccttcttttctttctgaggtagaatctgtcagtacagctgagcctggccttgaactagtgattatttgcctctgcctccttagtgctggaattacaggcctgaaccaccttgctgggaggataatttaatcttagtcgttgggataatcttcctgagcactgggtaaaggttgtctttgtattattcacactttgatttcagtacctggcaggccaaggctttgtttggtattgttatttttatgaagcatcacctgtctcagggttttgtaagcattcttttccactttctgattggtttaataaagagccgattagccagtagctaggcaggaggagataggcaggatttcctggcagagataggaactctgggatagatagagtcctataggtgagggagatttaccagcggtcgctgaggaagaagcaagaagaaagaaacaggtgccaggactgtgaggaaagataatgagcaagttgggaagaagcttaagctataaggcctaaatatgcgtaaatacaagtctctgtgtcactatttggaagctggcagttgtgacagtctagtgatacttaatagtgtagacatagatacttaggggtagacatgactactaagttaaaagtgatgttttggagcacatctttactaccagcactcgggaggcagaggcaggcggatctctgagtctggggctagcctggtctacagagcgagttccaggataatcagaactgcatagagaaaccctgtcttgacaaaccattaaaaaaaaagtcttactgtggctttctcaccaattttatatatacagaacaaaggtagccaagaaaggacaaagtttcctcttgacaggattaataaaattatagttttgaaacagtgatatctaacaaaacatgttaatgaacattttgaattaatttatattcactctcggcaagttctagtcctgattttaatattgaggaaatagttttctagattaaacttaatcagtagaattatacttacaatgcacttcagatatctaacttcattaggcaattgactgagggctgtatagacattttattttattagtgcttttgttatagagttaagaatttaactttaagaatttaattagataaatcctgaattcattagtttttctttagtagctaaaagttaccttaggttactaggtcatttattacatattgtactagttaaagtgatttactttggctaattaagacatctatgctaatctagataaataaagatttttctagcatttctttttttttttttcttttttggggggggtgcagtgaactttattgatggtattcaagagactagggagggctccctaggcccctcctgttatgggggtctgggatggaaattgtgaggtcaatgccagccccagcatcgaaggtggaagagtgggagttgctgttgaagtcgtaggagacaacctggtcctcagtgtagcccaagatgcccttcagtgggccctcagatgcctgcttcacctccttcttgatgtcatcatacttggcaggtttctctgatccacaacagacacattgggggtaggaacacggaaggccatgccagtgagcttcccgctcagctctgggatgaccttgcccacagccttggcagcaccagtggatgcagggatgatgttctgggcagtcccacggccatcacgctttccagaggggccatccacagtcttctgagtggcagtgatggcatggactgtggtcgcgagcccttccacaatgccaaagctgtcatggatgaccttggccaggggggctaagcagttggtggtgcaggatgcattgctgacaatcttgagtgagttgtcatatttctcgtggttcacacccatcacaaacatgggggcatcggcagaaggggcggagatgatgacccttttggctccacccttcaagtgggccccggccttctccatggtggtgaagacaccagtagactccacgacatactcagcaccgacctcaccccatttgatgttagcggggtatcgctcctggaagatggtgatgggcttcctgtcgatgacaagcttcccattctcggccttgactgtgccgttgaatttgccgtgggtggagtcagactggaacatgtagaccatgtagttgaggtcaatgaaggggtcgttgatggcaataatctccactttgccatgtggagagcagatggcagccctggtgaccaggcgcccaatatggccaaatccgttcacactgcgaccttcaccattttgtggtggcactgcacaagaagaagcggctgcctctggaacagggaggaacagagagccttcatttttttaattaggtattttcttcatttacatttctaatgctatcccaaaagtcccccagcccccccccccactcccctacctacccactcccacttcttggccctggtgttcccctgtactgaggcatataaagtttgcaagaccaaggggcctctcttcccaatgatggccgactaggccatcttctgatacatatgcagctagagacacgagctccagggggtactggttagttcatattgttgttccacctatagggttgcagacccctttagctccttgggtactttcaggctcctctattgggggccctgtgttccatccaatagcatccacttctgtgtttgccaggccccagcatagccttgcaagagacaactatatcagggtcctttcagcaaaatcttgctggtgtatgcaatggtgtcagcgtttggaggctgattatgggatggatccctgggtatgccagtctctagatggtccatcctttcgtctcagctccaaactttgtctctgaactccttccatgggtgttttgttcctaattcttagaaggggcaaagtatccacactttcatcttcgttcttcttgagtttcatgtgttttgcaaattgtatcttgtgtcttgggtattctaagtttctgggctaatatccacttatcattgaggacatatcatgtgagtccttttgtgattgggttacctcactcaggatgatgccctccaggtccatccatttgcctaggaatttcataaattcattctttttaatagctgagtagtactccattgtgtaaatgtaccacattttctgtatccattcctgtgttgagggacatctgggttctttccagcttctggctattataaataaggctgctatgaacatagtggagcatgtgtccttgttaccagttggaacatcttctggatatatgcccaggagaggtattgcgggatcttccagtagtactatgtccaattttctgaggaactgccagactgatttccagagtgtttttttctagcatttctaactacttaagaatatgtccaacaagagatccatgattaagactttaggaatactctttacttatcaaactctaatttcctatttgctcctcctactggtactggtaatcaattttccattttctgtttctatgaatttgtttattttaagtacttccatatgtggaaacatacaatatttccttttggggaagaggagtacttaattttttttttctttcaaagcagtgtttcaaagttcatcatcttgtggcatgtgtctaaattttcttccatttaaatagtgagtagtactccattgtatataagcatcgtgcttatatatttatgtgttgatggacagttataatgttgctatgcatattgatgtacaagtgtctattcaagttaacttgttctgtttcttctgagtacatatctagaagtgcatttgttagatcatgttgttattttgtgcttactatttataagaaatctccatactatcacaatggttatatctcagatcccacgattgtcccatatcctaaataacatgtaaggaagaagaattaaaaaaataaaagcttagtggggagggggttggagagaaggctcagggctaagaacactgactgctcttgcagagacactgagttcaattcccagcagcctcgtggtggctcacaacaactagtctgatgccctcttctggtgtttctgaagagagcaacagtgttctcacatacataaaataaatctttaaaagaataaaataaaaagctcttattaactaggcacggtggcacatatctatacttttagcatttaggagctggaggtaggatgattaagagtccaaggtcagtctcagctcaatattctgctcaaggccggcttgagctctaggatagcctgtctcaaaacaaaaagaagtgaaagataaacagcacttctaaggaataaaatgattttttctaattgtggttttcatttttatgtctttaatgactagtgatgttgggagtgttttattgttgtccttttatagacattctttgggacagtgtatattttaagtctctatttgaggttcttgcatggtttagtttttgcctagggctgacttctggataataatactggtatctctcatatgtatggtggtcctgtaggactgggccttacttgtacaacttggtttaactaattgcagcagtaaaaaaaggccttgcctgcatagtgacgttataggttagtgtggttagtgtgaagcttgagggactgactgtaaagaccataacaaagtcctttgccctctttataataggtctgcttagttttttatttgagttgtagaaatttaagatgtattctgattattgttatctttagtcaggtatggggtttgcagatattttgtttgtttgtttgcagatattttaaccactctagaagtttcctttatagtgtgttgatagtgctgtttaatacacaaaaggttctcatcttgatgtgactggcacaggttggtttttctttcggtgtctgtgtctttgataacaaatgcagtatcatgaactttcttttttttcttcgaaaagttttataatttagtttttacttcattttgacctcaattttacattttatgtaaactaaatgactaactttattctttcacatatgggaatccaaattatctaccgccattcattgaaaaaaatgtcctttccctcttaatggttatagtgtccttgctgaaaatagtttgactgaacaataagtagtcttacaaccctgggtgaaactctgaatgcctagaaggtgctcttcaaacccttgatacacgtgtgtgtgtgtgtgtgtgtgtgtgtgtgtgtgtagtgtgtgtgtgcgcgcgtgtgtgtgtgtgtgtgagtgtgtgtgtgtatatgtgtgtctgaatgcctagaaggtgctcttcaaacccttgatacacgtgtgtgtgtgtgtgtgtgtgtgagtgtgtgtgtgcgcgcgtgtgtgtgtgtgtgtgagtgtgtgtgtgtatatgtgtgtctgaatgcctagaaggtgctcttcaaacccttgatacatgtgtgtgtgtgtgcgcgtgtgcgtgtgtgtgtgtgtctgaatgcctagaaggtgctcttcaaacccttgatacatatgtgtgtgtgtgtgtgagtgtgtgtgtgagtgtgtgtgtgagcgcgcgcgtgtgtgtgtgtgtgtgagtgtgtgtgtgtatatgtgtgtctgaatgcctagaaggtgctcttcaaacccttgatacgtgtgtgtgtgtgtgtgtgtgtgtgtgtgtgtgtgagtgtgtgtgtgtgagtgtgtgtgtgtgtgtgtgagtgtgtgtgtgtgtgtgagtgtgtgtgtgtatgtgtgtgtgtgtgtatgtatgtgtgtgtgtgtatgtgtgtgtgtgtgtgtgtgtgatacatatgtgtgtgtgtgtgtgtgatacatatgtgtgtgtgtgtgtgtatatgtgtgtgtgtgtgtgataatttgtaaagtaagtactaggtttgattgttggtggtggtggggttgtttgtttgtttgttttgttttttttccgagacagggtttctctgactgtcctggaactcactctgtagaccaggctggcctcgaactcaagtgatccgcctgcctctgcctcccaagagctgggattaaaggcgtgtgccactacagttagctgtatggtaagattaataacaaagaacaagaataaagtatgatgagttatgtgagtatggtttcgaacattttgtactgtgctcatccttatgataatggaacctacaggatgagatgaagtgaggtaggcattgtgatatagcattagactacagtgtgagggttccttgacgcaaatattactatgttggtagagtcatcatagcagagaaacttgactgatggaaaggatgtttgtgtgtgcgtgtgtgtatgtgtgtgtgtgtgtgtgtgtgtatacgtacacatgtgtacatacagggcacatacacaggacataggcatgatttcaggtcccaggatatattgagatttcatcatctgtatttagaacaacatccggtttaaaatttaagaattacttatttctggattttaatatttagtatgtttggattatggttcatctagggtaaatagaacaatagaaactgaactacagatatatggttatgaaagggtttatctcaaggatctttgttttgttccattggtgtttgtatctgttgtgtatgtccgtttctacagtttggtatgtgcttttttaatttctaatttttatttatttattgtcactctacatcccactcactgtccccttcccggtcaccccctcccataatctttccccatccccatttttatttttattttttaaagataaggttttactatgtagtcctgtgtggctttatataacagtgtagactagaatagtgtggactcaatagaggttgtcctgcctctgcctctggagttaagaggcatatttcaccatgcccagctagttttgaattttaaaaaagttcttgtttttcatttcctctagattttgagttgtatataatgatcacttttagttttctagagcagtagtagttaccaaaagaataagacttgggtattgatggacttttccaaagcattgtgcaacgtggcaaatgcagaaggcacaatgacaattgtacaaaatgataaaaatgtttcctatgtgttttctatcagctgctttgcatcagtaccttccaaagcttactttcaatatgtgaacaatagggtctttgtaaagtccctttatcttcattcttcctttctgtttatcattgacagtctcctagtatagctcaggctggcctggaacttactgtgttgctcaggtgagtctgaaaactcagcagccatcttgttttggcttcccaagagctgagattgtaggtgtgagataacacgcagcagctacttttaccaattttcaatccgggacttttttccttgtctctcaatccttatattgagtttctatttttattttctgctagtcccttcagccccaatatatgtacccctaatatataatttctttttaaaacacattgtctatttctttgatgttaactgttatatgtatggacatttgctctgtgttgtcttgtacctatagtcattgctttgaacagaaaatgtatagagtgatacaatatttgattcttacttaatatttgcttttttaaaaaaatgttgtagttttctcagaagagagactgatccaacaatatcacccctcctccaattttttttgaggggtgctatttatttatttattgagacaaggtttcactttattttggctgtcctagatcttgctatgtagaccaggctggcctcccaattcctagagaccattttcctctgtcttctgagtgctgggattaagggtgtgtgtcactattcttggttcctcctctttaaaaaaaaagtagatatggtgtgtgtgtgtgtgtgtgtgtgtgtgtgtgtgtgtctagaatgtgtagtatgtctaacctgatttctgtcctctcacccaaaatgactttattgggaattagggatgccactcagtcagtagaatgctcactgttgaagcctgaggctttgaggtaggattggtaatactggtgtagaaaactgggtgtggcagcatgcacctgcgaccccagctggacaggtggaggcaggagcattgtggggcttgctggctagccagtctagctgacttggcaagcttcaggtttgctgagaattctgtctcaaaaactatggaggagaatgaaggaggaagagacctatttgttgacctgtgatcaccacatgtacatgcacatatgtatgtgtacctgtaccacatgtaaacaaagaaaataaccttttttgacatgtaattcacatatattacctatttggactatataagccagtgatttttgtctttgttcagagaattgcacaaccatcaccacaattttaaaatgttttcattatctaaaaaagaaacagtatttccttcccctctatcttcttcctagccaaccaagtctctttataacatgtttcttttacattaactcctttttttgtgtgcctgtacatgatgcatctgtgtgtgtctatttgtgcacttgtgtgtatgtgtgtgtgtgtgtatccaggcatatgtctgcattaatatatggaggtcaaaggataaccttgagggtcagttctagtcttctacctttttttgagatagtcttgtttttatgcaggctagctggcctgtgggcttgcaggggttctcctatttcagcctcctgtttccacctaggagcactgggattatagacatttgtgcggcttatatattttattgggtcctggggctttgatctcaagtccttatgctttcatggtacagcattttttttcttctcctgagacagggtttcactgtgtagccctggctgtcctagaacttgggctgtaggtcaggctggcctcgagctctcagagatccccctgcttctacttcttgagtactgggattaaaggtgtgctctgtgtgtgtgtgtgtgtgtgtgtgtgtgtgtgtgtgtgtgctcatatgctgtagcacatgtggtaatcagaataattgtgtagagtaatttccttctgccttctgcgggttctggggatcaaactgaggccatcatcttgtgtggcaagcacattgcctgtttgaccatctcactgacctccagatcacctgtaaaaccaccatacaaatgtgtttttaggtagggtctcactatatagaccaagctgtccttaaactcactgtgcctggctaactttttaagattaaatgtatatgtgaactcatgcggtattttatgtctagctacactttgcttactttatttaccatggtgttctccagcttaatccatattgtcacaagtgacaggatttttttttcctgttttattgtaatcattgttacatgtaccacattttcttcatccatccaacacttgacagtcttaatctaacagactgtctaaccctattgtgaggtagataatattaaatatatattcaataaaatatcaagttatttgataggtactcattttattattttaaaatgaatgttttgtgtgtgtgagagagagtgaggagggagagacagacagacagacagacagaccaatgtcttgtggagtccagaagatagggactctgatagtcacctttatttcattactgtactttgatttcattgcacaggatccatttaaaactctgtagtgattattttgttttgttttgagacagggtttggttatgttgtgcagggtgaccttgaacttccaatctgcctcagcttcctgagtgttgagattataggcagtgggtctcaatctatgggttgcaactgctttaggggttgttttagttagggttttactgctgtgactcagagacaccatgaccaaggcaactcttacaaggacaacatttaattggggctggtttacaggttcagaggttcagtccattatcaagcagcatccaggcaggcatagtcaaggcagagctgaggatgactttcaggcagctaggatgagggtcttaaagtccatgcctacagtgacacacccactccagcaggaccccaccttgtaattgtaccactgcttgggctgagcatatacaaaccatcatcatatgggtcaaaggaccctttcacaggtgttttctaagactatcagaaaatacagatatttaccttatggctcataacaatagcaaaattacagttatgaagtagctacaaaattttgtggttgggggtgttgcaggatgatgcagattgagaaccactgatgtagtttttttttttttttttttttttccccgagacagggtttctctgtgtagctctctggctgtcctggaactcactctgtagaccaggctggtctcgaactcataaatccgcctgcctctgcctcccaagtgctgggattaaaggcgcgtgccaccaccgtccggcttgatgtagtatctttaaatgaaagcttaataaggtctcatgtatgtgtagacccatgatttatatataaatatgctgcacagtatttacaagtatttccttaggtttcctcctgtcccttctcagttcacactttagatgatcacttgccagaatgcctttgcaggcttttgttttgttttgttttgttttgtcttttgattcatgctagaaagacctttttagaatgttcctttttttggtttgtaaagttggcatacctaaatgattagaaatgttaagagcaaagggaggccaatgatatgacttagctgattaatggcagcattctaaggacactttactggaattagagaataaagttctttttcatttttaaccttaaggaaacaaatgatacaatgtagtagatgtccatatacctacctatgacctaattaaatattacttatcttgttttactgttctacgcttttttaaaaaaaagaacatttttattacactgtcacttgaaatgtaaaacaaatcttagaatcagtgtaagaaacttccagtactttctgaatagttgtttatgttttcttttatatgcatgactctattttttttcctgtttggaatcatttgagaataagttagaagcactctattttccttctaaatacttgagaatttattttctaagaataataaaagcaatctctcttgtatcaatagccttatttttgagacagggtctcactgtcttactcctggcaggcctgtgactcaaacagagctgtctatttttgccttcccagtgcttgggttaaaggtatatacatttaaagaacagacatttttacgtgttctttctatagactacagcttcaggactgtatgtacatgtaaaatcagattgtgacttagaataatgatacatgtatttctggccatgagaaaaaagttaaattgtagtgtttttacaaatacaagttcttgctcttagagaaacataatgatttaattatgaaaacaggatagtcattcttgtcatctcttggcatgcgagcatcaaattagtgtctctttgtattgtcttgtattagaatgtttgattttagtttttaatttttgttcgagacactgacttaaattgtcaatacttgaatgaattttggctttctaaaaatttctgaaatggcccgaaatatactgttgctttttgtactgtgtgcttaggtgaaagtgttcccagtactgaccactataagaacaaagtatccattgactctatgagtctctacatcttgtgctatcaaatagttggccattgtaattctttatataaaagtaatcaaacatacccattagtatgcaaatttcctttttacctttaatgagttatgtgtattccaaataaagttttaaatgatttttagtaaacgttttacttgtatgcatgctttctatatgtaactacctgggcacatagaaacatttcttgggtgaaagggttgcaattagagaatgtttaggaagccctggtttagtagacagataaagacaactctgcactttgaagccccatgggttagctggcatttctttatctgtacccagcaggtgtaatatgtaccaagattatttaatatttttatgttgctaaccatgacttcataattaattttggatatgcgagggaacttttaggaagttatagcctgatacatacactgaccccatggaccaaactgtctccagtcagctcttctctctggcttgtgtgtttgctctgtgccagctctacaacaatctaaatgcacagtgtggaaatactgggcaaggagacttccttccaaccctggagcttttttcctaagctgatgccagttctgaggattgtgagcttagttaagagtttaatggaaagccagttttcctgactttccctatcagatgatgtctcagtgttgagatgaagggtggggatgtcaggggctaagagaggtgtagaaagtagtgcctggcttgaagatatttttaataatgtttgacttttgaatgagtaggttattcactctgttaatttctgaaagtgccattagctttagcacatctagcacaacatttaatgctgccaggttttttttcattcagtggctacttggtttggtaagaaatttgtgttaagtgcttgctggttgccaagatatcctcttccaagacttttgtatttttatacactgtctatctttgaggttcagcaattgttttattttctcactttttctttcagaaaactttgctgccttttagaacagtggttcttaacttttgtaatgctgtgaccctcaatacttaatgcttctcaaaccataaaagtattttcattgttacttcataactgtaattttgctactgttataaattgtaatagaagtatctgatatgcaggatatttgatatacaaaccctgtgaaagagccatttgacccccaaaagggtcatgacctatatgttgagttgagaatggctgcttttgtttatttgttttgggtttccgagacagggtttctctgtataacagagccctgtcctagaattcactctgtagaccaggcctcaaactggaagatccacctgcctctgcttcccaagtgctagggttaaagagatgtgccaccaccaccaggctcaagaaccactgttttaaagtataaaattttggtgagtaatggtattatatttaattcttaggtctgaagtaggtagcaaaatacacctcataaatttatgctaaaagagaccttgttattgaatcatgatatcaatatttataaaagcctggtttttggtttatagttctctctttggcatcatgctgtactggacaaatgccactctaggtatataacctttatgaagtcagtctttgatttggaatcatacacacaattctggtcatgccaatgaaaaatttgtattgatttttttaagcttaggtgtgaaattttcttggtcattagagtaaggttgtaactcagttgtcttgttttttttctggagaacttgcctaggactggctatgtgatttaccaggaacttttgtttgaaaattattagggattttaaggtggtaatagcagaacatttaatcaggtgcagggtcctgtggagctatataggtcatttgtccttgaagctagctgtgtctggtttttgtgctcatttctttataacacgtgattaagaaagcacatttcctaatttttgttttataattatatattttacttttttaatttgaagaaaatgcctgtactgcagtttaaaatactttcaaaatattttataatgttttgttttctcatttaagatctgattaaggtgggctggagagatggctcagcggttaagagcacctactgctctaccgaaggtcctgagttcaaatcccagcaaccacatggtagttcacaaccacccgtaatgagatctgatgccctcttctggtgtgtctgaagacagctacattgttcttatttataataatgaataaatcttaaaaaaaaaaagatctgattaagcaatagttcaaattttgcttgtttaatataggtttattgttaaagatttaaataaatataagcataaaacacagtatttaaaattaagaaaaaaactttattactgctgatagtttgttgtattatattcaggcttctttgtcttttggattttagaattgatcatccttttagcctgagttaaacacatggctaatcatcaggttagctaaaacttctcttaatggccagggagatggctcagtcagtagagtgcttggcctagaagcatgaagacagaattcaatcctatttaaaagatgtacctgttatctaaatgctgggaaggtggagacaagagtaacccagaagcttgctgggacactggtgagggttttgtttttttttttgttttttgtttttttgactcacccactgttagaatcagtaggatttatttattgttgtcttatgatgctagggatagaactcagggtttcacatatgccaggtaattatctcacctcttagctatatcctcaggtccctttttatttctgagtgaggtagtccattgtagaaaaacagcacaatttatttatctaatcaccggttgttagatactttgggtttctggtttaggacagttgtgaaaagctgctgtggacatttgggttacagttcttgtgattctgttttatttctcttgggttaatacctagaagcagaactactagttctactttagtaggcgtgagcatttctgtgtgctgagctttataaggagactgctcaaactgttttctagagtagtaatgtcaatttgtatttatatactgcaatgataataaaaaaatgaacaaattatagcagtatacaatagcagcagaaatttttttttaaaaaaagcaatacaaaataattctacaaaatgattctattcaaaaggcaaacatagccagacagtagcactaccttcaattgtagcactcaggatgcagaggcaggtggatctctgagtttgaggcctggcctactttctcgttcaggacaaccagggctacacggagaaatcttctcttgaaaacaaaaaaacaaaacaagacaaacataaacggcacttcttagaaatatgtatacacaggctaataatattaacaggtgtatatgtgaggaggtcagagactaagtctctgtcatttgctgatatatatacataccagactagttgtccaagcatttctagagattctccagtttccttcccatttctcccttcttagggcaggaggataatggaatgaaataaagaatggatgccagcgaccttgaatctacttagcactgccattttattccaatgatctgaaatattaatatataatgatgtttgatagttaagttaggtagaaaatcaaaatgacatcagaattctaaagaaacatggaaggactcaaatctacccactgggtagcaaaataataatttaggaaataggttgttagaacatgaagcttagatcttttgtaaagcagctaaaagcactgattgcttggacagaacctgagttcagttcccagcacccacatggtggctcacagctgtctgtaactccagttccagggatctgacatatttcctgacctctaactcctctaggcatatggtatacatgtacatgcaggcaaaacacatacacacataaatgaaacaaacaccaaaatatgtaaagtagatccctagtaacagatttgcaatgcatggggaagattaaaactagtatgtattagataaactaggaaaccaacagttaacattgggagagaaagatattaatctagttattaatcagttgagtataacttcatttctggaagcctagttttcctcttcctttaattcttctctcatttttcctcttaagcaaccccatcattgttttgttgaattttatgttcatgtttctttaggtccctgggaacatctacatttatagtagactatgtagtctagactcagtcttgggggaagcttaaacattttaaaacactttatataatttacccaaaatttcaggcaacctcatcaaatcacttctatccagggaagagccactttaataaatagtgctgcattgaaagtaaacgtttactatggacacatggagtatgtgtgtgtgcgcatgtgcgtgcaaacacacgggaacatgcacactcacattccagtaatgtgggtatgtgcatgctatagtgcacttgtggaggtcagaaaaacaatgttgtgtgtcagtctttatcttccaccttgtttgtaacagggtctcttgtttgctagctggccgtgaacttctgggattcctaggtctcttaggctcattgggagtacaggctctgtctgatgctctagtgtctagcttgcacctgggttctggctgttgaatctcaggccctcaggcctgctcggaaagtacttttagctgctcagcatctccctagcacccaactttttgttttgttttgcttttttgtttttcagaatgaacaaaggacatggacacacaggatgaaaatgaatatatgtagagatctgcctgcctttgcctgattaaaggcatggaccacagtgttggacttatgattaaattttaacaaaagatattcagggtagatatctagatatcttttatttacagataaaacaggttgcctatttttgaaaagcagtttgttttacaatatgacaaatggtaacaagaatttttttttcttaaactttggagaagatagtaaatattcacagtggcactttaatgcaagacagattggagggccatctttattattacttggagtttgacaactggaagagtgcatggggcaagagcaagaccagtgggttgacttggtgtcagtggtagttgacactattgacacaggaagtgatatattcaaaatgcattttcacagagcagcttggtaggcatgaaaccttactgtttttgaatgatatgtacaccacatactgtggtgtgtgtgtgcatgtgtatgtatgtgtgtgtacgtgtctgtctttctaagtagggactgctgcatataggtacttcacattcacatgccctgtgtctattggacattctttttttttttttttcccttgaatgatttatttagtggtggaagccattgtctaggtttgcctcaaatcttcttcctatgttaacttccccaccacacccagctagtctctgtttttaatgtgtaatcattgtctttagattactctataatgtatgttgagtaggtttctgtttggctgtttttttcatcttgagacaatttcaccaatatttgtatgaatataagtttctcttgaaggaacctcctctaactttccaactgatttcatagtagccgaagaagtttttaaagccacggttctggattttggcttctgttgaacacaagattgtttaagcttttctgaattgctaatttaatggtggcacacgcctttaatcccagcacttggtagtcagaggtaggtggatttctgagttcaaggccagcctggtctacaaagtgagttccaggacagccagggctatacagagaaaccctgtctcgaaaaacaaaacaaaaaaaaaaaaaacaaaaaaacaaacaaaaaaagcccaagagagaattccttttacttaacaacttttattagcccttatttaacttgataattttgatttccttttcataaataaaacatagtgataaactctttttggcattagttaagaagttctgtacgtgtcaggatggcagacgtattacccttctgcttacatgatataaatattataaagtgtggttttttttttttcctgagtatgtgttgaagatgctgatttctggtcttttggcctttaactattccaaggaagactgtttagagaggctaggtctttgagtttgcttcgtaaacagaggcctcattgtggtatgtggttattggaggttattggagtttttattggcttgttttcagaaatatgagtagccccctacctaattgccagtatataaattttaactaggccagtagaagagtaggctctttttattgcacacagtctttaccttgtgtgttttatttctttgagtgcgctcttttctgaatgcgtttatagactggagaggtataccgtttgttttgtatgtgctaggtaagtacagcaggttaaaaacactttttaagatttatttattttaattttatgtgtgtattggtttgcttgcatttctgtctgtataccacatgcttgtctggtgcctgtagaggatagaagaagggatcctgtccccagaattggagttacagagagttgtgagccacagtgtggcttacaattgaatccaggccataggtaagagtgagaagtgcttctgagttatctgcttagcctcaagcacagcagtttttaagtgtgatgacatagttcaaagtttatttatttacttgtttgtttgtttgtttgtgtttctctgtgtagctctgtctgccctggaactctatagaccaggctggccttgaactcaagagttctgtctgcttctgccttccaagtgttgagattgaaagtgtgtgcctttactgctaggcttaaagtttaaatttttatttttaatttgtaggctgaaaggatgggtatgcattttcattgagctttctggtccttacctattttagactgatgcagattgaacccatggcttcattcatgcagggaaagcactttaccagcaaaactgaatccttgtcttgaccattttggtgcctgttaacgatacataaaattcaagactcaattcacaaaaggggcaagcaactttatcactcctaatacaatacttaaacgtgataactagtgtacagatcagcttggtttagaggactttttttttttttagtgtgatttactttcatacttttcctggaatttgtgtttaaaatgtcaagtgtctagagaagataggaaaataagacatgttatttaacatggacatagtttggggtttcctttagcgagctgaccgccagattaggccttttgtttttctccctttttattagacaactgcttgttgagagagttagggaatatcgttcgacgtttgctttgtgggaagattcaggagcaaagtgtgctggtataagcggtgtcagtttggcgggtttcaaaactacattgatggttttataaattttttctagagctttagtggcctttgagactgtatttgtctttgtaattttctttatttctctgaatatgtaagaaactgttatgatataaatacagtataatgtaattttttagaaaattaaatggtaaaaggtataggagttcttaatttaaccattattgcagaatccttttgaaaacctgtttatcatagggacaagtattttaagtcttttacctaagaaaatccacttaaatttttcttctgaatagagtggatagattttgtggtttaatgttaagtaaaatgttaaggcaggcgaagtcattataaacttactattaagtaaatttaagtttccatgacattctggaatttgaattgtctttctgttttttagtagagtatttgatctgttgttgaggtggggtgaaagaagtggacaacagctccagccgcttctgtcctctgtgccaaaaggtaactgagagcaagtgccaagtgccagacgttagtgtgtgttaggaaggttgccttcccagaggtaggtatgccttggaactagtcagagaaacaaaagtcaggagactttccagtgctacagatagtctttctgatctgtccactgaattataaataacaatcagctctgacacttagataaattgatcctacatggcttttaattacattaatttctagtgattccatgctagatttcctatcattttttcctttaataattgagatttgaacagtcttaaagaataattttagggtctggagaagtgacttaggaatttaagaacacttgttgcttttctacaggacctgggttcatttcctaacagctgtatggcaggcagctcacaaccatctgtaactctagtcccaaaagatctgaaagcactcttctgacctgcatgggctctgtatgcacatgctgcacagacaaacacacaggaaaatatccacacaaataaaatgaagaggggaaaattgaaatgattctatttactctgtgtgtgtgtgtgtgtgtttatatacgtatgtgtggctgccttcagaggctggaagcaggcttgggtcgactggttgcccagtgtgggcactgggagctgtccgtccttgtgattgagcagcaaatgctgttagctgctgagctctctccagtcccagacggttttgttttcagtaaattatgcacctccccttttagacaatagggaacattttttcattttagatgttaagcctactgaagtgctgccttatagtgtgtgtaggtgtgtacactcgctagtatacatgtattaggaagcctaaagttgacattgtgtgtctatatttccaccttatttcttatacagagccactgaacctctctgccttatgtctctatctcctcagcacaagtttgtgatatcatattagcttttgaatgggagctggggatccaaattgaggtctttacttaaaccactgaactatcttcctgtctccaaaattggtttttattttttttttaaagatttatttatttattatatgtaagtacactgggagctgtctccagacacaccagaagagggcatcagatctcattattgatggggtctgagccaccatgtggttgctgggaattgaactnnnnnnnnnnnnnnnnnnnnagagcagatggtgctcttaaccactgagccatctctccaggtccagggatgtcctaattttcagtaacaagtacagccaggagttatacagatgccatacacaccaataatcccaatgagccaaattagtaatgtgagcaagctattaaccatgatttctataaaatacacgtcagaagaaactatttcctgttctctcttcctcacactttcactcccttgcttgcttattttaaaaccaccatgtggttgctgggaattgaactcaggacctctggaagaacagtcagtacttttgggttttttttttttttttttttttttttttggttttttgagacagggtttctctgtatagccctggctgtcctgctggcctcgaactcagaaatctgcctgcctctgcctcgtgagagcagtcagtactcttaactgctgagccatcttaccagccctggttttttaattcttaatttcagtaggaagtgataccttccctctttatagaggaagtcagaaaataacattatagattacttgtgcaacttccttataattctgttaatggcttaatacatctgagtcaaataggaaaagaaaaagaatatatcacagaagtaattataaagagcaagttagaaaaatgaattatctttacattttggaattttaaattttaactttttaaaaattgtatgtggttgtggtagattttttgtttgttgttgtttgtttatttgggtttgttttttttttattgtttttttttttttaagacagggtttctctgtttagccacggctgtcctggaattctctttgtagaccaggccattgctgaactgagatatatgcctgttttgcttccttccctttaacaggtttaaatttaaaagaaaaatccttgtaaaataagttatgttaatggtcaccaatcagattcgctttcagtttgaatacagataatcttttctgtgattattcggcttccttgtgctgcattatttccttgagaaagtaataaggtgcttgggagagttagtcaagttttagtgtcttttcagggaaaacagttattttggtgtaggctcattacagtttgaggtccacagctgggaaagttgctgccggcatttcagttactcgttgaagacaaatgatcttcattgctgatcagcaactgaaatcctattgcagaacaccctttgaagagtgcattgtgactttcccatgtttaaaaaagatttttgtataatctatgagccacatactctatgtctatgtcttgtctaattccagaattataccagagtagtactttggttattttctgctgaaaccagacatttccttttagtggtggcttttgagaattaccgtcggaagcaacttgttaccagtgtacgttctttgatactgaaattgtaacatagggtctggttgtttctgacaatttaggtgtttgggttccccccccccccaccaagagaaggatggttgttttgtggtaggcatgataacagttagctgcttatctgtgccccacagctggcagaggaatgcagtaaactgatcatgaaactgcatccagggctctgactatgtcagtcattagtgtctccagaaaggtaaaagacacacagggtctggttttgattttaaacatggtgcttaatggtttctctgcattgggcactgacttcttctgtgtgtaccgttgtttgttttcacaaaccatgtttctaaataaaatgtcacaatttgagaaggtcacattcagactagacaggtaggaactttattttatttatcgctgtgtcatgccccacccacaagtgctcttaggtgagaggccctccatcacttaccctggggagtgcatgtggtcactcttttaaactgcctccttgtttctgtttccattcattcttgatttcagtagcaaaggtttcaaagaaaactttagattcagcgaataagttttaatcataatcagttcattcagttattaaatttgtgggtttaggttaattcttgtgattaaataattttcctaccatcgaataatcctagtaggcatgctactgaagtctagttttggatgtcagaaatgtaaataaccataatcaggaagcactaagatggagggagaaaaagtcacccagtgtaatgccagctgtagaatgctccttaaagtttaagtctactgagtttttgcttttatttttctctttctctctctttcttcctcttcctcttcctcttcctctcttgtctgggttggtttgtttgggtttgcgtgttggtttgttttgagacagggtctcgtgtagctcaggctttcttggaaccccttttttagccaaggataactttaaacttcggatccttctgattccacttgggaatgctaggcttagaggcctctatgtagttctggggtaccatgctgggttctatgtagttctggggtaccatgccaggttctatgtagttctggggtaccatgccgggttctgtgtagttctggggtaccatgctgggttctgtgtagttctggggtaccatgctgggttctgtgtagttctggatgttgaaccagggcctttctttgctctcatgttaggcagacactgtcagccgagccatatcgcgcagccatgagcttttaaattgtgtctatatctgtttcttattatttataagcaagaaagtccttttgttttcattttggtggaaaataagagatcatttaaaaataaggtttaatattgctttcttaaagttttgaactcttattctccatttgaaaagtgaagcaggactgtgtaaaaagcactttattttttccctaaacataccaaagtcaacaatatctacttacccattctctatccctaaatattttaggaggcatagcatatctttagattttctttatttgttttaacttggttttcatatttaatttaaaaaattatgtacctccctacctttgttgaagccagtgtgccaggtttcatgtacattgcattatatacattccatattcattacataagctatttcattggggaattgaatgtgtatattccttcttggtctcagagccttgaggcccttcagttgtcacctaatcatcttccagtgtagctgcacagtatactcactaccatggtgtttaaaattaggtttattgatctttacactctataggactccccacccccgagcctgcgtgtgggtgaagctgagtgggcatgaagggagccagagattgtctttgctcattttccatgattgcttatccagcttattttttgagaaggtctctatctaatcctgaagctcactgactgggtagactggcagactagcaggccccaggatcctcttgtctccaccttctcagttctgggattataggcatgtgctgccacatctgtcattttacattgatgttgaggatctaattgtaggtgtgacctatgtccttagccccaggaccatttcctatagtaaataaaattacattcacatggcagtttgtgtgtgtgtgatagaaatttatatcttattgagagagatccaaaaagattgatttcccccccccccagaccttagttatagaatttagggtaatgctaatgcataagagctactttaaagttactctatctttgcctcatcccctgctttgatttgtgcctcatgtacttttatagttatatcttttaattaattgtttggatttaacatagctatattatactctgtctcaacgaacaagagaatattgaaggtcactcaaacataactattgctattctctgaagtatttatgacctcatggtgtaggtgcaggagagcttctttcagactcactgtcctataccccttgtcacagtgatgacccactcacttactaatgacatgtctgaggatgggaactgaggagtcattgctggcacaacgctgatctgcttcagtcttttagttgtggttttgagatgtagcattaactcttttgtttaaatatttatcattcttgagcttttaaaggttttgtgtgtgtgtgtgtgtgtgagagagagagagagagcatgcatgtgcatgaacatattgcaaagatcagaagagtgtgttggattctcaggagctggagttacaggtggtataaggtctgctggaaaccaaactcagaattctctagaaaagtagtaagcatttctaaccactgagccatctctccagctaccattctggagattttaaaactgaaactgaattcttaattttgcattttcttagatagctatttatatgaaatttaagatctcattactagatttaatagtacggctgtgataatgtgttaatagtacacatgtgtgcatgtgtgtattttgaaacaagagtgtgacctgagacttgctgtgtaacagaggtgtccatgaactcttgatcctcctgggattacagacttgtaccatcagcaagtttggaggaccaaactcagggcttcttgcatgctaggaaagcactctgccaactaagccacatacccagctatttattttatttatttttagagacaggatctcaactatgtagccctggctgtccttgaattcccagagatcttcctgtctctgctgagattaaatgtgtgtgccaccacaccccactcattttttatttgcgtatattaagcatatataacaatggacaaaatatatacatttttcagacatgcatatattttgggtatgcttgcccccagagcctttttgtcctttatactgtctcactaattcttatgtcatgtctttcctttccttcatctctctccccctttttccccttccttcctcctttcacaacccactgagtttatttagggctgcctgagtgaaatgttatttatgatcaccttactagtggctgtactactgaagaaaatgcctctcctgtctccagccccattacctttgtttacattgtcaggaaaggatggggcctcttggccctatgatctgtacctcttgtcctccccacatgccactcttgatactgttgaccagccttgtgttcagttactgagagtttgagagtgcagtagcctggctggggagatggctcagaggataaagggtttctgtgcaaacatgaagtccagaggttagatctccagcaccaaataaaagctgcttttctctaattctagtgcttcagagtcacagactggtgcaaactggctagctagagaatgaaatcagtgaacccccagttcagcagcagatcctgccttagtaaataaagtggtgagtgatttagatacccactgtcaacctttggcttccaacttcatgtgtgtacatgcaccaacacgtgagaatacatgcatgcacacatacttgaataccacaaacacaggttgagggggggtgtctgtggggggtagaagggtgaggggagaacagccatacaatgtctagaagaaaatgatccacaacactccaactcttcttccagcttatatatgcccctccccctttacattattgcctgtgttttggagttggtggtgcaggtgtttcatgtagggctcagttttcaacagttattcagacttttaccagttatgagtttatgcaataacctctgccccctgcaaaaataagcttcctgaccagcgacaacagcagctctgatctatggggataaacaaaaagatttagaaggtaatttgatagttattccatgctcacttaacaaaagcataacagtagctttccctctttagtatatgacctcccaggccatgggattttctctaggtttacagtaccagataaaaattcccttcagtggaatggtaaattcaatcagaaagttgttactcctttaacagacttagcattattgctctatgagcatgtcttgcctggtcagttggtactatagcgctcatggttcacagctgaataagactgctaatgacagttctccagcatctccagtaccttctggcattgttcagttaaaaattgatttccttatgtgctgtgcccaatgcttggggtgtcataaggaatagcgttttactgtgtatgtagttctagtgggcaaccagtgtagtagcatactgtttggggagccccatgggccctcctgattcatagaaaggtggtactgggcctttttgttttagtgaccaatgaattttagaagcagcttgtgatgagcttaaaaagtaagcaggtttccttgtggatttttaattatatatattcttgggtttgagtgactctgctcctaatacaatgttcagttctttgagataaacagaattttaagaattctgtcctgttctctagcctgtcatgtgttcaatcacccttacccaacgaccttgtccaatatccatcctaggatcaagtcctttatatggtgtcaacaaacaaatcacccatagctagtcacctgttccctatgcagctagtgtaaccacccaggaggcaccctagctttcacacgttctccagtgtattcttgtactttattctgtatgtacacttcttgttcccactttgctttagagcttaaagtgtacacatgcaaaaagacttttttgggcactgtcctatggaagtcggtctgaacctataggagcatatattatatatgtgattgagtggcaaactattgatcataaaaagatagttatggtgctgagaatactaaatatatcacatgaagctgaggctcacagaaataatgacttatccttatagtcataactttagtataggcctggcattcctaatccccaaactcacaatcttaagtgttccaaagtctgggaaacaacaatgacaacaacaacaaaccaccctaaaatctgaaccctgacattttggtgaattttttggtaagggatgcgcccacttgagcacagaataatcagaactcagagctcctacactcagagctctgttactgctttatatcagcacttgttttttcttgaagccattatttgtacttttagcctggttgaatgaaagccttttatataatattttcaatttccttttaataatgttttgtagctgctgaggtcatttgttcctatagtctgagcactgggaaagttgaggtaaaaaagctctctgccagttctgggttatagttttgagttccaggccagcctggaacatatgagactatgttagaaaatcaaaactaggggctgaagtgtttgagagcacttgttgctcttgcagagggcatgggtttgaaatccagcaccctcatagtggctcacaattgtttataactctagttccagagcatctagcaccctcttctgatcttaacagccatcaggcacgcatgtggtacatatacatgcatgcaagaaaaatgcccacacatgcaaaataattaagaaaaacaaaaacaaaaagcaaaaccagaaaggtcaaccaaaaaccttatgtagaaaagtttattttcctagcctgatgtggtaatgtatacctgtaatcccattactcagaaggttgaaggtcacaaatttaaggctagcgtgggttaacacagcaaaaccctgttttagaaccaactagactaaaccaaacccaaaccaaatccatctaattagaaatgttatataaatgttctaaaagtatgaaaatgggaagactctttctacttcttttccttctgagataggctctcaggtgtcacagactggtctctgacttactgcgaggctgaggttaaccttgactttccagtctttctgttctacctcccaagtgctggcttgtaagatgcgtcactttacccagttctgggggtcctgggattgaacctcaggcccttgtgcatactaagttggcactctaccgtctgcgctgcatcttcattcatggtccgtatcccaccctttctagagggatggtcactgttgagtagcactggatcattcttctgtgtacatacaagtgtgcttgatagtaaatgtagacattgcttatgtgtaatttatcttttaaatataacagagcattcacaattcttaccaagttgaggcctggcgtgatgatgtgctcataatctcagtgttgaggagaaacaggaaggaggatcataagtttgaggtcagccttggtttcatttcctgcctcaaaagacaacataaacaacaaaagcagccttccaaaagcaatctagtaaagtaaatccaatgactgtgttggtgattgtagaagagtatgtatgtatactctttagcagtggtgacccttgtagtcctttctccaaggttgtagtttttcatttaataacttgttttaagacccagtactaccagaatagtgatttacatagagataccaggatagcttttgttgtttattttaaagacttttggggtagtaatagaaaaatggtaacagtttaaatatctgaccaggtaatcagtagattatggtagatggaaatgtaatgagtattgaactgttgtccaaatatatgcaccaatataggaaaggtttgatttatttttagaatcaaataaattggagaatagtaaatacccaatattcactcccctttcacttgtggggttatgtgtgtttttatatgtgcatagagaagtttttgaaacaaaagaataaaatagtggtggctgtccttcagtgggtaaaatgaagtccttccatttccaccagcacctaacaactactaatctattttgtactccctactagcagtcttagcagctttcattgttctgaaaccctgtcatgtgtctgttgtgcctggctcttttcacttttcggtgtaatgtgttcaaggttcctcattccttgaaagaccacagctgaggagcgcactgtgcatgcagcatgtgcatcttgttcagccattcatccgtggtggttgtctgcactgtttctcactcattggctactttgaataactgctataaacacataaatataaatttgaatgtatgctttgttttcttggttaggtatatgagaatatgttttctagtttgaggatgaacctggcagttttcaaagaggcagtgaactattgtacattcttgctagcgttgtgaggggataatcgtttactttttacatctgtaatttaacagtttcttaagaagaacatgtagtactattacagctaaaatagaaaggtcctttaaacttcttactaaactaagtgtaatgactcagtgtcttcttccctttgtgctgagagtgtagctgttgatggttctcattgaggtgctgcattccccactgtctcctgagattgctcctgtttggtctccacagctctaaagggaactgtgtaagcacttctttagttcctcctgttacaaactatccatgatcttggtttatgaatttggaattcctatagagactttgttttcttggttgattaaaacagcacatgtgccgggcgtggtggcacatgtctttaatcccaccacttgggaggcagaggcaggcagatttctgagttcagttcaaggccagcctggtctacaaagtgagttccaggacagccagggctacatagagaaaccctgtctcgaaaacccctcaaaaccccaaaaacaacaacaacaacaacaacaacaaaaaaaaccagcacatgttttgggaccctctcctctagtggtagagattgaaactggtacttcatgcctgctaagtgaaagacccccaaaaggataccctcactcaagtctcgggataatagtggaaccccaagaactcatgagagaccaagcttgatgcaaaccacatgaggctttattcggggaaagccagagctctggggacgactcatatcccacgcaggggtagaggagtccacccagaggggaaaggggtcccagtttttataggccctcaggggggaaaggagaaggggaaagagtaggggatttccagatctaaacaatatctattctcaagaaataggtatgggaggggtacaaggaaagagtctggtgcaggtgcagcaactccggattggccccagctgtggttgctggggaaattttccgactcttccccagcaacgaatatcacaaacacctggcagtgaggtgcagcagtgggcacacacctggggatgaaaggcgtgcgccaccatgccgggctcttttctgtctattttattggagtatagtctccctgaatgcaggatctaacacactggcatcctgttagacataggggagagagggggggaagtgggggctgggtgggatcaaggccaggcgtgtgtccaagcatatattactggggattgaacttaactatttatttttaatttttttaatttttttatttttcgtggaaactactccattgaccagtaaacctctctctttaggttcactcagatcttcttcgtccttttttagaaaaaaatattttgaaaaataaacatttacttttaattttattttatgtgtatgggtatatgtctgtatacatgcatatgactgatgtccatggaggccacaagaaggcatcagacctcctggaactggagttaacagatagttgtgagtgatcatgtgggccttgggagttgagctcaggtcctctagaagagcagccagtgctctaaacccctgagtcgtttctcttgcctcttactttattttttattatgtgtatttgtatgtgtcagtgttaatttatgtcacacgagtgctcttggaggctaaggacagcaggctcccctggaggtgaggcaagcctggtaggaatgctgggtatgatatatccttagtcctctggaagagtaacagtgtccttaaccagggagcaactctcaagtcccaaatcagcttttaaaagattaatttattttctcttaatttcatactcatatatgattctccgagtctttttgacatcctgttagaggtttgatagttccctagctttcagatctaataaggcacacaaaatagtaatttgtacagtttttggctttagacctgaaagtggctgttttttcctcaggaggaaatcgtagttagtcttttgagccagtagcctatgtgcttagaattaaggtcatcgctgctcagttcattttgtaattttctttgcagtaaaattatttacacttagggtgcatgtattcatgcctttttatccaccttttaattgaggtataattcggatcacatgaagtccaccttttaaaaaagtacgcagctcagtggtgtttagtatattcacatgtacaaccctcattgtgtaattgtagatttccaccctttccccataaatacaaccttgaacccacaaaagtcactccatatttttctctcagtacttgtactagcaatgttattttctgtttctctgtatttacctcttagtatttgaatttgtagcagtttgtgccccaagtttttcaggtagcctaatgttttttatccatgctttcatgggtcactatttctttcctttttattgttgaaaaggattccattctatatatgttgttcatcttttgtttgctactcatttgagttgtttctattctttgagtattatgaataatgctgcatgaatgtttatttacaagttttaaaataatctttaaatttaagaattaatctttctgcatagccctggatgtcctggagtataaatagattagcttggtctctgacttacagagatctaccttcctctctctcctaaaaagtgttgggattaatggcatatgccaccgtgcctgacctaatttttaaattttttcaatttctgtttttctttttcacttttgaggtgggttcttgctgtattggtctccaactcaagtgatagttgtgtatctgggactatagatgcatactactgagcccagcttctcagtgtacaagtttgtgtagacatatgacatgctttctagtctgttgggcacgtgcccatgagtaatattggtgggaaatgtgaccatatatctcttttgggaacagcaaactgttttcacaaagatgtactcctgaggatttcaggttctttatattccactgacattctacacacagggaataatttaaaatgcatgcctgtatatgtatgtgggcaggtatacatgtgtgagaatcttagcatattcaggaatgccatccgttccttgcttgctgctgtcattagcttgcagctcaccagctaggctagactgccacatcagtgagtgctaaggatgctcctgtttgcctccaaagccttttgattgccggtgtgtgccactctgcccagctgtttatatgggtgctgggcgtcaaactcaggtcctacactttttaagttgagcacttaatgactgagccatctccccagttcctctatcaatatttttggcatttatgtcttggcactggagttatagttttagttatctaatagtatgaaaatatatcacatttatctcttatgttgattaagatagagcagtttgagttgtaagtatataagctcagtcacaggagacttgcctatcatgtaatcagactttgggttcagtttacaactgcataaaacaacaaaaacagtagtttaaatgtgtggacgatgctcttgtcttcagccagacaagtaatagtcatctgcaacaaccttggtttctttgtgttcttttcccctgtggcttatggggtgaggaatccacttttcttctgggtgtccatcggtcagtgagaagcccttgtttgtgtttgctaaggcaaggcttgaggaacttcctctcaccgtcagtaagactggggagtctggcacactgttggtttgtgtccctgctggcttgtaagtctagtgtttgttggatttgtcacttccagtggatctcagtggcttccttgccccttgtcttccagagtattctattaaagcccagcccagcagcggcactagcctggccctccgatattccctctcagtgacctaatgctgctctcacagtgcctaaggttgggactcccaccaatgccatcttttgtttttgtttttttaaatcaaacttcagcaaccaaaaatactgggtgtgtctgatgctaatctacacagagaaaggcttactaaggagaggtgacagcaccttagtagaccatctttgcattgctagttgggtgttcttttgttcttagagacacaggtgaactatttacataattgttcagtaagcacaggatatgaaataatcaggtaattgatttatattctacccaagtcagtttgtttccatagatgggaagatccactttctaagataagctacagagatatcctgaaacactagtagaatactgtgtttgctgattttaattattgcttgttttatctttctgcaaggtttgtaacagttgaaaattattgtcaacacaggaatatcagtgttttcacattacttacagaactagttaaagttaataatgttttcacaaaggtattactcagtttggaaccaatggtgagaatttagctggctgatactcaactttttctgggctgactccagtcaattttcatgtgtgtatatgcagtatagccatttaaggtatggccaattaggggaaaaactattgctaaatttgctttttttttttttccccttcctaaagtaaaaggtctcaagcagaagagaaagagtagccttgtcagagactggagaaggacgcagccgctcctgacctggcctggtcatggtaagtaccagaaataaggaaattagagtcagactcttgataatagtgaacactaaacatctctttctgttttgtaagaaataatttcatttttttcctattccctaatttatctctgtttcctttgttggatcctcagtgccagtcgaatatgactagaagagctgcatatgcagcgcagtttaatggagggagattgaaatatctacttcttggagtccaggattttcgtttcttcctttactaggaaactggtttggggtataattcagtgctgaaccacatgctgtcacttatgtgaggccccaggcttacttcttccctttccctaaagtaaccgtaggaatcaaggcatagtgaaagtgattgtgtgtttatttggtgtgtggagatgattggcagaattgggaaacattcattgtaaaatgtattacaaaataaacacatactatagaatggtacattgagctaattaacatacgtgatcacacataacacacattctatatgaatttattagatggaagcagttcccttcctttcctattgtgttttcaagactcgttgacccgatggcaggtgaggtagctgtgtacatcctgccatacatttcacttaagaaaacaatgggcatttcagtggcatctggacagtaggcagaaaagatggaagagatggagcacagccagctacctctcagtagtcataaggacataagtaaagctttgagggctagggaagttattctctagattgtctagtatctgtgcacgtgcgtgcgtgcgtgcgtgtgtgtgtgtgtgtgtgtgtgtgtgtgtgtgtatgtattgttttgtcttacctaaggtgttttggctggtacacaaagtggtaattgaaaataccatgctatgagttggcgagatggctcagcaagtaagagcactgacagttcttctgaacgtcctgagttcaaatcccagcaaccacacggtggctcagaaccacctgtaatgagatctgatgccctcttctggtgcatctgaggacagctatagtgtacttgtgtataataataaataaatctttgggccagaacgagcagaggtcttaaattcaattcccaacaaccacatctcacaaccatctgtacagctacagtgcgctcatatacataaaataaataagtaaatcttaaaaaaagaaaaaatgccatgctaatttcaggcttcattagggacctgtggagaatgcttttcaaaattaaaattgaaaacaaagtaaaaaagcacccacccccagttgtgtagttacatcatattaaaagaaggaaaaaggtaattccttccttcttaaaggtgggccagtattctcaaaatttgtgggcatcacaattttctgatttaatcttgtacccaaagcatgatgatgtttttaggtttttttttttttttttttttttttgaggggtgggggatggatagtatacgagacaaggtttttctgtatagctctggctgtactacaacttgccctgtagaccaggctggcctgtctctgcctcctgattgctgagattaaaggcatgcccacaaccaaccagcttactattttttttatctaaagtatgtttttatttgcccatagttttcaataagctggaaatgtgctttcctggtattggcatggtatgtacaccagtgctcacgagtggcagtgggacaccaaagctgctctgttctgcactgagggcttacccttcactgtgtgccacatgaccagcagtatagtcctctttctggtactgctgaggtctctgtggtgctcagcacagtcttcttggggttccttctgccccaaagctctggagtaggatgaccacacattataaaggatatgtcttagttactgttctgttgctgggaagaggcaccatgacaaaggcagcttataaaagaaagcatttaagtgaggatttgctgacagttctacagggttagttagttcttcatgaccatggtggaaacatagtggcaggttgcaggtatggtgctggaatggtagttgagaacttttgaaacctcaaagcccatccacccccagtgacacacctgcttcttgtattttttaaaaatgtaccagatatcctaatatcttggtactcagagtctggtaatacctgatacagtttgcatcagtatgtcctcagattagggatatcttttttttttttttttggtttttcaagacagggtttctctgtatagctctggctgtcctggatctcactttgtagtccaggctggcctcgaactcagaaatccgcctgcctctgcctcccgagtgctgggattaaaggcgtgtgccaccacgcccggctagggatatctttatcagtcagacttgtgtccttattacaaatgcctcagagaagttaacagtattggtcagccacccctggatttggggtgtgtcaccggtgaggcagtatgtcaaggtgggaacatgtgatggaaaaagaccactcacctggtggagcccaggagacagagaagagggcctgcctctcagagtttctagctccctgctgacagtcctttgtgctagcaccaaaccctttaacatgtaggcctttggagagcccttctacaaaccattgcagtagtaatagatcagatgaaacacttggggagggaggtattttttcttgagcttttctgcttgtttcaaaatggtcattgggttagttttataattatgtaagtaggcatggcagaagaatcaaatatgggtgactagtagaagttttaaaattattaaacattgtgggatttttccaggatgaagagatgcggcatagccttgagtgcatccaggccaatcagatctttcccaggaagcagctgattcgggaggatgagaatcttcaggtaaatttaaactgtgtaatatgtgtttagccttatagtaatgatggagcaaaactagtgaattgaagtaatgcagaatagacacaatccttagctgtacttggaaaacattgttcctttttgcaagttatttcttaaaagttcattgtttgagatgatcatctgtctcatcattccttagaaagtctataacttgggtacataaagtataagccatcctttagatttttgctttaacttgtggggcagagggttctgtttctttgcttactgacagtttactcaccaggcatatttttcaagacttggcttttttattttttctgctctggaactctgaaaggtttcttcttctgtttttcaggttcctttccttgaacttcatggagagagcacagagtatgtgggccgtgctgaggaggccatcattgctctttctaattacaggcttcacatcaagttcaaggagtctcttgtcaatgtaagtgataccagctgttttccctgtaaggtagacagaaaaattaagaggtgagagtctacatgcttaggtgtatgaaggtgttgcatgctgcgctttcctttcagttactttcatgctcaaggatatcaggttaataagaaactcttatgcttatttaaaataatgtgccttatctgcatgaggccattcatggttaatagtaaatagtctatcccaggtactgctgtattgttaagctttataaaggtgtaaagattgtgcaggcctttccctagcccccatactatttagtagttagcagccgcttcagttgagattatttattgggtcttagtaatagatgagaatattgttctttgagctcactacagattatcatactgaataaacttactccggtggctctttaagcagataagaataaatgttagtatgctgcttatttgcatattggacccttaacctaaggaaagggaagttgaagttgccctgtcttggttatgaggtctgctcagtagagctggctcttcagttcaccaccacccagaaaggcccacaagttcacagatttctgccagtgggaagtgttcttcctcttttacttgccagtcttctggctttctgtatttgagtgtcggtgcagtgttgtgatgctgtcagagctcaggcctacattcagattatgtttatttatgggaattctttgaaatctgtttcttgcattcatgttattcaccttcctagtttacctaactatcaagttgcattctttatgacaaggtcagtggctgtcatttttgagttggcattgagtatttgtttatttatcatagttaacacatttatgtttctgagcattttggcctgactttttctaccttcctactcgatttggattatgtctaaattctgtccattggtatacactaaagtcatcaaggaaaaaggaaatgtactatgttgacagtgttctagagatcaaaagcaccttggggaagaagaggtttatttcatctgggtgtggctgagctcttctttagtcccagcactcataaggcagaggggaatctcttagctggaggacagtctggtctacagagcaagttccaggatagccagagctatacagagaaaccctgtcttgaaaaaccaacaaacgaaaggttatttcatcttagagtttatagtctatcattgagggaagccaaagcaactgaagtagtacccaggggttatactgcccactatagactgtgttttcccacatcaaacattaatcaagaatatgcccactggccaatctaatggagataatttctcaattcagagggcccccttcccagattgctcttgtatgtgtcaagttaacaagaattaaccagcacaacaagacttcatttggatttgagcactcatgaccagtgggtaaaggtagaagggataaaataacagctttgaaaattccctaccatatcctagggaagtgagtgactatactactcaacttaaccttaactctttcttctttaaatggttagaatcagtgcacttgtaactaaattgcctgtgagaataagagttcatcttactgcactttcccctgtcccatttatcagcttactggatttggctaagtatgtaaaggtctattcttgggtttgtttgggaatcaggtcttttggagaataatgtcatccactgccctaagctttcatttttttatttgttctatgacagtcatagtatgcagcatgatgtccttgaccctgtcagctgttctgtccccactttactagtaaaactagcttcctggaccactcaggcagacctcatagttttgcacattttcccttttttctctcctggggaacttctcttcatctctcagaactcagttcaggggtaacttcccctgagaagctttgctcagtcccattcccttcctggcaataattgtgctcagtgggctgcttctatatcttaacatactttcgcagcatttattggacatgtaactctttgttttgtcttgtctttgtgccttcaggatccaacatgttttttgatgccatgcaattcagtaaatgggcaatgggttgaagttagtgtggatctgaaatgaacattagatcacttctccccttttgggtttttaaaaagatttatttattcattatgtatacagcagtttcttacatgtgtgtctgaagaccagaagagggcgacagatctcattacagatggttgtgagccaccatgtggttgctggggagttgaactcaggacctttggaagagcagtcagtgttcttaaccgctgagctatctctccagtcccgccccccccccccttttggaatttaaaacaatgtgcttctgtgaataggcctatgccattcatgatttatctcttacagtagctgactggttgtagtctgaccttttttcccccaaagtgtagtcggtatatacagtgtttcagaaactgacttctgcacttactttaatccatctcctcatatcaagcattcctctagcattataactctcttaagttttagagcctgtgtgttacttccaaaaccccaggtgctatgtttgtgtagaaaaatgattgtgtaaaattatcttgacattgtagggactatgaacatttcctattaagagagcccaagttagtgcaagggttcctgaagcccaaggtcaggaagcaaaaggctggctcctcctgcaacagatactcgatggatggaggccagagtatggagaggggtggcctctctctctgcatccctctactcgatcttcaatagataagtatgaacagcaaaacacaggaaatcaagagaccctattaaaggttattttactgaaatcacgcacatttaagctattagaacccaaatgtgctatctctattgtggcatgacccactttgcattatttagtacttcagtaaatgacttgccattaagttttaaatagctacccaatatcaaatattctcttaatttcacagcacattgagtgtttataggtttgggtactgtaagcactcgtactttactctagacaatctgagtaagcatcaggctcacagtgctagggtgaagtacctctgtgacagagcacatttgtagctttcctgctgtgtgcaatcttctactctttagtttttctaaactatatttctttgaagcttacaactaaatgttcaggtaggatttatgaacgcataaaacatgttttgttgtgtaatttgacagactgattcacagtctactgcttctgaaaccctagtgcatggctgagactcaggtgatggctgcttcactgtttggaacaagttggttgtgagtgttgaatacttaccttgcaattgtgtctccactgcatgagtctcttcttttttaccagtgcattgtgttcttgagggaatattttgtgggggtgaagataaagcccacagtttatacataagcaatggaattatgatcttcaaaaatgtagactgaggtactgcaaggtggtttagctggctgctcttccagagttcctgagttcaatcccctgtacccatatgggggctcacaactgtatgtaatggaatctgattccctcttgtgtctaaatgcagtcttgcatttagacagagcactcatatacataaaatacataattttttaagtgtggacagagggctcagcagctgaaggtatttgctggacaagcctgctgacctgaatccctgaaacccacatagaggtggaaggagagaaccaattccttgtagtcttctgagccttgtatgcctgcggtgcatgagtgtatgtgcacagaataataaataaaacttagaaaaggatgtagactgagttttaagcagaaatgatttataaacctttgtttcttggtcaggttgtgtattaggtatgagaaatgttaaagactgtgaggattttttggttttgtttttggtgcgtgagggaagttggaagagctggagcagtgatgtaagccttaagaaaggagagaaacttggttagatgtatggggagggagtggtggccgattctctctcttaaaggaagtggacggaaagaaacaggaggaagggaggctccattgttacagaaccaggtgtctcttgttttattaacactactcttgcgtgtgacaatctgtgtattacaatttggtggtggtggaggtggctcgggggtaagagcaccccttgttgagtttggttcccataaccaacagtggctcacagacatctgtaactctagatctgatgctctttctggcctctgagggtactgcatgcatatggtatgcagacatacatgcaggtacacatgaaatgaaaaaaaatctgcatttttccacactccaattgattcggatgcaagaaccaacctctcttcctcctcctcttcttcctcctcctttttctcctcttcttttcttctaccttcttccgtcatcatcttcttccatggcttagtggttataagagcacaaacttgcccctccaaatgacctgacttgagccccagtatctaacttttgggtagctcacaaccaactgttatttcagctcatgaggatccaacacctctggcctttaagggcgttgtgttcaaagccgcatgcccacatgtagacacatgtgcatacacataattgcagatgaaagtaaaagctttataggtcttttgtcaaactggcagatgaccccaccatgtattgagagatggggggaaaggtcttgcaggaacacatttaaaaacaaataacaaaagaacagtctatttatagggaacctgtagaactacctgagaactagttaatgttgtattttgtctttttaaaaaatattctatttctttattgtgtgtgaaccttgaactcaggttgccaggcttggcagcaagtacctatccctgccctaatctctttcctcttgatctccatgttctctcttgataattttatcctcactgataattctctccctctctcatctgccctagatttacaggctcttgaaagaagttttagctgtgtcagctgcagtttctcatgcagctccttggggttaagggtttaaacaagcggaaagccaaaggtttttccttggaatataagcagtaatgcatagtattcctcttaccccagttctattacaattatgagagagttttcatagattatatacttagaaacaagtctttcaccccgagacaaaaactcccaggcttatctgaatattatttggtttgctcttttccaatctgtgccccagtttctgtttctgtgtttcagttttctagccctgacttctttttggcccagcattcttgttctgagggacctctgctgattctggtagctgcatggtaggtcagaattgtagtgagtcagctttgaaagtggcaggactgacttggggccaccccgtgcagccagcactttgagttgttcctgtgccttagaggagcttgcctccactgaacaaacctaaacaaactgttggaatgctacttgcagctcctacagcccgttttgactggatttaacgcagcgttatggacaagtaagccattttccttccccgcaaggggttaagagtgcactcaggggtggatgtaagtcacttggagaaatgcttgcctagcatgcatcaaaccctgggttggttgccaagtatcacatgaacaagccatggtggttctggtctgtaatactagcacttgggaaggcaagtgagtcagaagttgaaggttgacttcagtgacatagggagttttaaggccagcctgggnnnnnnnnnnnnnnnnnnnnccttccctcctccccctctcttttaaatgagccaggtggtagtggcagacacctttaatctcaggactcaggaggcagaggcaggaggagctctgaatctgagacaagcctcagactgagttctacagagtgagtttccggacagccatggctacacagagaaaccctgtctcaaaaaacaaaaacaaacaaaaagaatttattcatttatcacatgttgtttggaaattgcttttgtttgagttggaggttgagtcagatattttcaggaggaatgtccttgtgttagccttagggtcatttacacacttcagaagtgtcttttctgtctcactggcatatctgatctctgtccactattgttaagtagagcctgctgacccagttggcagggagtgggactaatccaattcatgcaaacattgagttctgcttgacaaacaaggctcttagcttttggaatatgttggatctagccttttttatattctttgactactgtaagacttcttgatatctgtgatctattctactgatcagagaccctgaccagtgactactggtgtgccatctttgttttgtaacctataggcaattaggcctccagaagatccctttgctaagaactgaggcataaatatactctgcaacctgggacaggggatacattcattcttgtttgtacttagccttgagtacttttgtttagtgccttcaacttttgtgttactacatatcatagcatcttcaatagggccgtgagaaatgagcttgtgggtttgatactcaaggatttatttcctcttctcttctagagtccaagcctcttctctgtggtcatcatgctgtaactttaggtcattggttaggaaaagggaaactctaaccccctctttagtaaatcactattgatccagctaattttgaaagtttgtttgcttcttcccattcatcagttggtctgaatgtatcttcaaagtcagtgcctttttgactaagagaacttcatcctttttaatttttgcaggttccattacagcttattgaaagcgttgaatgccgtgatatatttcagcttcatttgacatgcaaagactgcaaagttatcaggtaggtgatgtgtttgtgaggctgtgaagtattagggaaaatattctttaaagaattgttacatagtttgttaggttaagataatttctgagtaatcagtgcctggaatattttatttataatgcatattggtatacaaacagatatattttacttggaaataattttaaatttataacacatatataaactaaaacactacagtagtataccatttatccctgttaaaactttaccccaatttattattagcaaagcttgtgcgtgtgtatgtgagtgcatctgtgaatgtgtgtgcacatatctgtgtgtgtttgtgtgtatgagagtttgtgtgtgtgtggcctgtcatgtgcatgcacccacccagaagctatctcagatcctcggataaaagacatacatatattagctcatttttaaattggcttattggctctgggctgggctcttccaagccttccacggttagagtgcccttaccttcattccttgctcagcacctctaactctgccctcagcttagtcactcagtccctttactcctagctcagcacttcagcttagttgttcagttgctttttgtgaaacctattggtcttgctgcccaagacgcttttgggccgctttccctttcctccaacattttagaaagtcttccctgtagttcaccaagtctatcatctatcacctatctctcgattctctcctctctcctagaggaggaacctggaagtcctgcctctttctttctccccagccattggccactgacatctttattggtagatcaaaaactaattgggggtggagacctttagcagattctcaatcaaaacatcaaagctccccccatacagctttcctaacactagagtattttctcataaccagtacatcattgtcagtttcacagttttactctgacaatacacttgtcaaatgtactgtcctgctccagtgatgtcctgataatatagttatgttttaatagattgtttctcatcttaagctgtctagagtttcctcaaaattaaattgaagttatgtgtctgcaactgggagacatacacacacacacactctctctctctctctctctctctctctctctctctctctctctctctccctcctttttaaggtattatgttatatccagagacaatcagtccatttgtctcttattgttgagttttgattagttcagttaaagtgttactcaatttctatgggaaacattttgagaaaaatgcaggtgtcttgtttctcatcaaaatttctctagctttagcattcattcatgattttattaaatctaattttaactctgatggttgcaaaatgattcccaaaatatgtttttaatttagtaggtctggtttttgttttggtttgtttgtttgttttttcaagacagggtttctctgtacacagagccctggctgtcctggaactcactttgtagaccaggctggcctcgaactcagaaatccacctgcctctgcctcccgagtgctgggattaaaggcgtgcaccagcatgcccggctctagtttagtagttctgggtctgttcctgacattttaaatttactcctttgatctgttttaggacaccaatgaatactgtctgttcatgttgatgagctgcactcactgggacaaaggaaggctttagtgacctccatgttaacatttaccatgcctttttagctgctctcgtttgtcttcctgaaactctgtgtgcagccctgggtggtatgagacttactgccgtactcctctttcagctttctaagtactaagattacaggaacgaggcacctcacaccacacacactatacttttgatagataactgacagccactcagatttaaaagctcacttagtttcagtttttagcactacatttaaaaatagagataaaaatcctcaaagtaatttgtactaattattttaattttaaccctttagtggtatacactgaaattttctgttggtaatagaattgttttgttctctgtatggttgcagctgaatgtttgtttgtcctctgccttattttggatctgttggtcctgactgctaagtagccaaattttaaaaccatctcccaaatggctatggatagtattgtgatctgttttttaggatggcctattatatcacagcaaaagaaaaagggcttttctgaacatatttcttttttttaaaagatttatttatttattatatgtaaagtacactgtagctgtcttcagacactccagaagagggtgtcagatttcgttacggatggttgtgagccaccatgtggttgctgggatttgaactccggactttcggaagagcagtcgggtactcttaccaactgagccatctcaccagccctgaacatatttcttaagagagataactgtagctgggcagtggtgccgcccacctttaatcccaatacttgggaagcagaggcaggcagatttctgagtttgaggccagcctggtctacaaagtgagttccaggacagccagggctacacagagaaaccctgtcttgaaaaacaaaagagagagagagagagaactataaaacaagctaaagaagtagggtgagacctgatcatcaaagagacaaaacgattactttactttgataatcactattaattacttttagaagagattcattagatcaaaataatagatttttccatatgtccaacttcctttttttttctttttgcacccctggctaaaatgtgttgcatctgtttttattgtaagtgtagtaaatgactatgtctgatgttttcttcactcatcgtcattatggctagacactcttgaaatggtggcttttcttagactgagtcattatcgaatgtcacctgatgacgtttatatctgttttgctttgcaaaggtgtcagttcccaacctttgagcaatgtcaagattggcttaagagattgaacaatgcaatccgaccacctggtaaaatagaagatctcttctcatttgcataccatgcttggtgcatggaggtctacgccagtgaaaaggagcagcatggagacctgtgcagaccaggtaggctagacttctgaagctttgcttggaggcctttatcatgaaatgggaacccacaggagtcatgccttcaatctctgtcatctagctttgtcccattactttcccattagtttagtacaacatatctcttgcttttcaggggaaggggaaaaaaaacaaactgtgtttgatatattagcttcctaggccaaaaatgactataaggaggtttgtggggattatgggaccctagtggaaggaagctgtgcattttcagtaacatttcatgttaaatagtatttagtagtctttgaaccagattagccttggacatttatgcaaaaatacttaatttctcactttattttcttacttttttcctgatctttcattaaaatggcatctgtgtgtgtgagagtgagtgagcgagtgagacagagatatttgtgtgtgtctgtgtgtgtgtgatatgctaggattgaaccctaaattttgtgtatgctaaggcaattatttgtagtgtcaactagtgtgtgtttgcgtgtgtgtgtgtgtgtgtgtgtgtgtgtgtgtgtgtgtgtgaactacaacatgtatggaggtaagagtgatttgtgtattttcctttatggatggctaccttatttttaaagagaggttaaagctcaccaagttaatcagttgtagtgggcaccaagctccagcaatctttctatctttgccttcccaggactaggattgtaggcatgtgccacggtgctctgctttttacatgggtattaaagatccagatttaggtccttttgcttgcccagcaagcactactgaatcaccttcctagcccctatcattatgttttaaactaaattcaacccaacttttgctgggtgtggtgatgcacacctttaatcccagcactcaggagacagagaggcaacagatctctgtgagttcaacactagcctggtctacattgcaagttctaggctagctagccttacatagtgaaatcctatctcaaatctaaacaaacaaaaaatgtggctcttttcaaatttttttttctggtttttcgagacagggtttctctgtgtagctctggctgtcctagaactcactctgtagaccaggctggcctccaactcagaaatccacctgcctctgcctcccaagtgctgggattaaaggtttgtgctaccaacactcagctttcacaacaaacttttaaagataacttttctgttcccttggtaattttagttgtttcttttttagctggcttttaggatattcctaagatgggttgtcctgtggttgggtcttcaggctctgtccttcctgatgatgtataccaaccagtacagctgtccagcgtcctctctctttctgtaggcctgtgaaacatggggtggggggaatgaagtgggtaaagtcttgattttagaattcaaaaggctgaattcaaacccatactctatgtttaactgaaaataatactaggcaagccacgtaaactctctgaccttcagtttcctttgtcaaactggaacatttcatattcttccgctccaaattaatatgggtatcttgaagatcaagtgtgttaatgccagagttcaatttagtaaattctcttctacctctaatacatgaggtttatgaaagccctctggaaaccatgcagctgcaagataatgttatcctaactgatgagttggaaattctctgggattgaagtttgcattctttttcttctcaagatgcacatgtggttcacactgatgctatctgctatcacttatatggacttttactgacattacttggagaagggagagggggagaatatgtttagatttcttctttttacataagtatactacatatacaagcataaaaatgtctgccatttttttattccagctctcatggttctagtgccttcccaacatgttgaatgttggcagccacagcttactcacaacaggaacacaccatgaaacaacatgtgaactatttcagagtatagtgtagcccagagcatgagagctcagcatagatgctgaggtgtagactttggttttgtctttcagccatacatagagcctttgatgtcatctctcctgctcagcacttagtgtgtcaggcaagaacctgggatgactctgtcattcattgtcttggtgttcatgtaaattttagtgttcagctgttgagcctgtcatagtggaaccactcgtattgcatccacaactctaggacatccttggcctaggaagaggtctcagcattgttatggattcatttgtgaaacttgaaagtctttgaaagtttgaaagactcagaacttcagtctttgcccgaatgttacattttcattgctgtgatagaatacctgacaaagtagcttagcaatggagaggttcattctggcccatagttcatgacagtccatcacggtgaggtagttgaggtgtcctagtcactgttctgctgctgtaaagagtcagcatgtccaaggcagttgttagaaaagaaagcatacaattgaggtgctggtctacagtttctgaggttgctccccatcatcgtcatggtggggagcatggccatagccaggtaggcttgctgctagataagtgactgagagctacatttttatccacaggcacacacatgtgtacacacacacacacacacacacacacacacacacacaccagtttctaagattaaaagaattactttatgtgtatgaatgttttgcctgtatttatgtgtatggaccatgcctgtgcagtgcccatggagaccagacagttttcccacataagtttttttccctctgagtctgacttgttttgcttaataatagtgatacttaattctgttttcctatatgttgtcacaataatagtttctctaatcctgatgaaaattccattgtagcaggtgaggtagctcaattggtaaaagcatttgctgtgccagcccaatgacctaagtttaatcaataggcccatgtggtggagggagagagctgactcctgcaaattgtcttctgacctccacatgagcattgaggcaagcaccatgcctctgaaacacattcaaatacatacaaacatttctaataaaaaaaaagttcattgtgtatgcacatcttcttttattgatttcatctgttgttagacatttaggcttgttccagtttcttagctgtaagggtcctttgagtaaatacagtagttgagtattagtcctcaccttctacttgctgtttgctgccgtgctgtgtattccaagctagctggctcataagactctgggtgatttctcttgtctccagctctcctgtgcactctgggattcctgagatgtgcagctgtttggcttttacgtgggctcctggaatctcaactcaggttatcaggcaaacacttttacaaccatcgaaccattgcttcagcctttaaaaatgtctcagttatttttaagaaatgtgtattggaccagtgaggtggctcagtaggtaaaggtgcatgttgccaagcttggtgacttgggttccatccccaggaccagagggcaaactcctgaaagccgtcctttgacttctacatacatattatagtatgtacccccagcaccaccaataaatgtaatgtttacaaaatgaaaaccgtttgtttttatgtatgtttatattgtctgcagtatgtatgtcaatatgtgtgtgtgagagtgtgtatgtgtgtgtgcatgactgtgttttttaatattttgagacagggtttctctgtagttgtggctgtccttgaactcatgctatgacctgcctgcctctgcctccagaatgttgggattaaaggtgtgtgctgccactgcccagagagcgttctgtttttttatgtaaatacagctataaatgtatcccaaatgttctgataaattgcatttttatttttatttgactctagaaattttacaatttcttccctggtttctttagtgacttacttagggttactcagttctttttatacagtttctatattgactcttgttattgacttctagttttattccatgtgacctgagaagatactagaatttatttgttgttaggttgttgttaagatgtgctttatatataaaatgtggtctgtttcagaggtggttccaggaattactggaagaatgtatattttgtagaagtcttgttacattcatttggtctatgatgtaatttaactctgaagtttctttgtggatttttatttagatggtatgtctaaaagtgagagttgggtattgaagttactcagttattgtgtcaggaactatatgaccttttataaaattggaagccccaacatttggcgcatatgtacttaaaactcatatctttttggtaaattgttctctttattaatatatcgactttctttatctgttctggctattttgatttggagtctgctctatcagagtgagaatagcagtaactattctcccctgtttagcccttctggtttttgttttgtttttttcatatatagacttccatcctctgactttctttctcttctttctcttctttcatcctttgactcttaatccgtgggcttgccagtgaaatctgttttttgctcaccacagatagttgaatcttgtcagctagtccagtcagctggtcttgcctcttttcattagtaaattgaaggcatttacacgtaaagttattactaagaggtgcttactaagtgcttactaagtgcttgtgtggttgttatgctcctctcctgttaattttaagtgtttgctgttttactgtgttgggcatgataaatacctctctagttctccagtgttcatctattctcatgaactttattctttctgtgcacttgggactgaaactgtccttttttccgtctcagtgaattgtgttcttttaattatcttttgcagttttggctgggtagtcttcaagtgctttagttcatgcttgtttggaaatgacttctatgtcttcagttttaaaagatagctttgctggctgtagcagtcttagttggcagttatctgctgtaagagcttgagataaggcatagagtgcctacctgcgcttagggttactggtgaggagtctcagcatattatatccaatgtgtttgtcactgtcgggtgagtgggtggttttctcttaacagtttataatattatttcttggtttatatttttgattcttgactctttatatattagaggagttctctgatgatgtctgtttgagattttgaatatctctcgtatttgaatgtcctttctctggattttggaatttttgttactatttcattgaacatactctatagctttagtgttgattgatcgactgtgtgtgtttatgagtgtgtatagtgtattcgggtgcctttttgaggcagggtcttcctgtgaacatggagctaggctgacagccagtgagcgatagcactctgtctctgcaccccttggtgacgagatcacagaggcactgcgtatgctgggctctgactctgtcctcatgcttgagcagcaggtgcctttaactgctgggcagtctttccagtcaacctttagcttttagtctctgcttctgtcctgtagatcgtaggtttgtttatgtctcagtattgatcagtgattgatatatatatatatatatatatgttttttgagatagggtgtcactatatagtcctagctgtcttgaaactagctgttttgaaactccctatgtagactaggctgactgaacttagagatccatctgtttctgccttttgagtactgggattaatgtgtgtaccaccatacctggttctttaattttatttatgctttaatctggtcttttcttgaccttggcctcagtccctgatattcttctagatggttggtctgtggtaatgccttccactgtttttgtttttttgagtcttgactcactaagctcttcatttccaacatttttttttctaaaataacattcttcttgctgaatttttcttccctgttttttttttaatcatccatgttgctgatttttttgtccactttgctgactttgtgctccctgctgatttcgtcttttgctcttgaatttagttcatctgctggttgcatgttctttgatgctaccagatcatttttaccagtaaactttgatttttcatctgtcagtatctttgaattcagtagttgaggagttagaatattctatcttttcatgtttcttctattcctagtttgtgatttgtgaatcaggtggtttgcttgtcccttctggttgtatttgtgtattgaattcttagcgagaaacttactcttggagccttactcactctaaaagaggagaaaagtcagtgtcaagccacacaaggtaaatcacttgaacgtgattaagttcactcctacattagtagtgactgctggacagaatatggcaaaactaatgtagactgtgctgtgaggttgtaactactcagggcaaccagccacactaaatggatgagatgacaaggcagggaaaggttgaatataaagaaaaagaccaggctggtgagatggctcagcgattaagagcgccaactgctcttccaaaggtcctgagttcaaatcccagcaaccagatggtggctcacaaccacccgtaatgaaatctgatgctctcttctggagtatatgaagacagctacagtgtacttacatataattaataaaaataaataaataaataaatactaaaaaaaaaagaaaaagacaagtggctaagctatggatgggaaaagaaaataggagatttagaaaaaaaataaaagtaacaataaaacaaaaaagatatcctgcttgtgagaatgttttttagaaattagatgagggggatggagagatggttcacgggtttaaagcacttgttgctcttgcagaagactcaggttcagttcccagcatttacatggtggctcacaatcctctgtaactataatcccagcgatctgattccttttattgtcttctgagggcaccaggcaaaatagtgttgtgtacgcttagattttttagatttttttaaaaacctactttagtaagtgtacttaaatgctttaacctcccttctagcccgccacccaccagaggtaatggaaaagaaaggttagtaggctaaagaaggatgtggacctatgtagaaatagttctttagagagaatccaatctgcgatgtcaggatgttagcagtttagttcacaagaatcagcagctttggctcagtccacttgcaaatactattcatcaatcagcacagcagcttgacccagaagacactcaaaactttgtcaatccgcccaagtccaccagcattccaccagaagttctttggtgtgtttctctctatgaagtcacaacaaacaatgaccagcaaagaccagcaaggtgaactaatgccacacagcatagccagagaagaccagcatcagcaaagcccaacgaagatcagcagagtggcaaggagagccaataccacatagcagcgcctgctgtctgttgggttatagttataccctttccaaacaccacccatttcttcaaccatcctctctagcaacacatcacatgccctttttccagaaaacaccatttgtctgttctcaacaaaacatcctcccatatgcctgcttcagcaaaaacatcttataagacagtttccagaaaaatatcacatgatacaactgagtctccaaagaaatcagaagtttccacctttgtggtgaacatgcataccatacatacaaaataacacatataaatcctaaaacatacaaataaaaatttttaattaaatagatgtaaagtagaataaaatttaaaatatgggccagtgaaatgtttcagcaggtaaaaatgcttgctgcttataatgtgagtttgatctctagaactcaagacaggagaagagctgatccccacaagtttgactgtcacacgtgcaccatggacctgcatttacacataaaatagtaatgagaataaataaataaaaaatcaaagcaagaggttgtttgttttttaaattaaaagctagtaggacacggggaagtacgcttgtaattctaggaatgggggggcagaggcaagaggatcagcctgcaaaccaacctaggctgtgtttgacaccctgtctccaaaagtcattaaaataaagtcagaatactattaaaaatattatagggagaaacataatgagaaatataagagggaacataaagacaggaaaggaaacactatgctagattagcttacgaagaaataaagacatagaagttggagcttcagtggtaactaagcagttaagagactggcttctctttctgaagaccagggttctattcccagcacctacatggcagctcacaactatctatgtcccctgttttgggggattctatgccttcttctggactatgggcaccaaaaaaataaataaataaaataaaaataaaaaagtatgtattttatgtatatgggtactttgtttccatattcctctgcacaccagaagagggcattggatgccattatagtcagctataagtcaccatgtggatgctgggaattgaactcaagacaagaaagaacaactagtgctcttaactgctaagccatctctccccgtcctcaggataccttcttgtaacaaactcgaaatcaccacagtttcacagcattgtctttatgttaaagcctccctccctgttgattgtttctgagggccaatactccttatagtttgtagacagatggcacctctgtttagagagctttttatctggtttgggagcctgctatgttgcttctaaaacttttcaaatggaccagatttaactgttatttcttcttgcctgtctgaacatcatcttttctgagctcttcctctagaagcgtgtgatacatagcctaaactcaagagaagatgtttaaatgggacatagctttataggcttggccttcatctaagcagtcagcattttctgttctgaagctcatctcccagggagaacagaggtttatccttctctccagagcagtctgctgtgtgcttttgtttgttgtgctttcttgtagccctgcccgcatttgttttatagccttcaaccctggttgcacaaatgaggagcctgctcagtgggtttgtttagtaagttcgtgcgctagaaccatgcccttcctaaggaggaaagcactttagattttggtctggctctttgttgtggtatctgaagggataaagagccacatttaagagagatgtgaccaggttatagctaggtatgagggtgtgttgttatagacccctagggtgtcttttaataatgggtgttccctgggatttctgatcactggcaatggccacttgcctgattgcttgcagtctctgaaaacctgaaggcatttcctagtctctttgcagtttgacctgagctaagctgacacagttatctcacttggtgtgaagtatccactgaggtactagggacgcctaagtacccctgttgaaattggaactgcagtgttataatatatgcattgtcttagctttctaaaagtcagaagccccccaggttctgaaaggtgacccagagggtttcaaatatagaattgtacatctacgttaccaattgtggtgatttaagatttttttttcctttttacttatactgtcattctgagtgtggaagtaaactagcagtttgtgtatttacaagaaagaacgtgtgtttctgggccagagacataagttatactaatctcctgactgttcaccctctaaagaaatgagtgcagcggatgagcacaactatactcacagagagtataagtaatacaccccacccctcgaaatggggtcttgctatagccctgggaggcctagaatttattttgtagaccaagctggtctcaaactcacagagatacacctgcctctgtctcctgagtgctgggattaaaggtatcagtggctaagatgacataattcttgatctgttattcttcttcctttctgtagtcttaacctgcccatttttttttggctaaaggtaaatatgtgttatctatttatatattcctgcctttaaaacaattgaaagagaatagagcaaaggtaatggtggttttgttttcattttgcaaagtggtatttatttctttgtttttgctgtctgtctctgtctccaggggaacatgtgacgtcaaggtttaagaatgaagtggagcggatgggttttgatatgaacaatgcctggaggatttccaacatcaatgagaaatacaagtgagttacatggatacttgtacactgtgtttcacagctaagctagtacctttaacaaaaggcccaattctcaggtggcaagacattaaattcaggtactatgaaatagaattttgttttttaactctaaatacatgttcttcagagttccttttgaaccttttgtccaatatttctggagtggaaaatgatccttgcataataagttcttgaagcctttcttttaacctctgcaggcctcctttcttcctgccccatgcatgtctggatggtcctatgcttactgtgggcagtagtgtgtatttgtcactactttggcattatggaatcagtgtgcttaaaagcaagaataaacatgtgcttgcgtgtatgtgtgtgtgtgtgtgtgtgtgttcacacacctgtgcaggtgtaagcagtttgtgaattttgaatgtcttacattttatttgtctccttagttttgagccagggtctctcactgaacttggagcttgctagttcagtaagactagttgaccagcaagctctaggaatctcctgtctctaccccccagtgctgggattctaggcatatactagcacacccagctttttacatgggcactggggctctgaacatggatgctcatgatagcgcagcacaagcacttttcctactgacttcatatccccaattcctcattgctaatcttaatgacaaatgtcctcaactatgatcactaaatgctaaaactattattaaattcattcattacctgtttccttaaaacttaacacatgtaagtactttggtgagagagggtggctaaatactgggattttgtcagtttctgtgaggagaatgagatgaatatattctactcgtatgttccatcctttgatctttttctgtcacctcagattataatacccattttcttggtctttttgtggttggccatttttcactggaaagtcttactcactgcaactcttcacatggggccttaccaagaagttaagaacctggaggttacaaagactcgagagcttcccatggagctgttgtcagaggcaggttggaggacagagtagccatagaaatctgagcttagggctggtgagatggctcagtgggtaagagcacccgactgctcttctgaaggtccagagttcaaatcccagcaaccacatggtggctcacaaccatccgtaacgaaatctgactccctcttctggagtgtctgaagacagcgacagtgtgcttacatataataaataaataaataaataaataaataaataaataaaatctttaaaaaaaaaaaaaaaaagaaagaaatctgagcttacataggctttgctgactggaaccttcttttcttccactggaactgtttaccaacagtgagaagagctaacttctgactagaacaggtgtagtgtctgctggacagtgagcataggaatcgccagctcacaggaacaagtcagcctccgggactgtgaaacatttattctactgctaacaaatgagagccatatctagtcttgaacataaaacaaaataaaaagaacaagacaagctattagagtagttgctgtggtcactgtcgcaggtcattttaaagagtttgagcaggacagtgttggtgcacgcttttaatcccagcacttgggaggcagaggcaggcagagttctgagttcgaggccagcctggtcgacagtgagttccaggacagccagggctatacagagaaccctgtctcgaaaaacaaaacaaaacaaaacaaaaaaagagtttgaatgggtgttaggaagtttgcgtagcttattctcaatcgcaaccatccttctggctcagtggcttttaaatttctggttctttatcttctggaaatggggaggaaagaacgaggtgtagtgttgagtaatcagaacccttatgtctcaagtctccttgtgatgcatagaggagggcagggtgatggaggtgatggcatcttagttaaggtttctattgctgaaataaaacccattaccaataagcaacttcaagaagaaaaggtttattttgcttatatttccacatcatagtcatcaaaggaagtcagcacatgaactccgggtaggaacctcagggcaaggacagaagctatcgataagtactgcgtactggtttactctccatggcttgctcaactgatttctataccatccaggatcacctgtccagtgggctggaccctcccacaccattcatcagtcaagaaaatgcctataagccagtccaatgaaagaattttcttagcttttcttctcacatgtcccctagctcttgtcaaggtgacataaaaactagccagcacagatagtttttgagttttaggactaaatttcatactgctttcagtgttcaaaaggaagattacctagtgatagtgtcctgtgaataaaataaatctgactagaatgcaaaaacaccttttgttttaaaatgagcaagcaagggagtgaaagtgcgaggaagagagaacaggaaatagtttcttctgacgtgtattttatagaaatcatggttaatagcttgctcacattactaatttggctcattgggattattggtgtgtatggcatctgtataactcctggctgtacttgttactgaaaattaggacatccctggacctggagagatggctgagtggttaagagcaccatctgctcttccagaggtcctgagttcaattcccagcaaccacatggtggctcataaccatcaataatgagttctgatgccctcttctggtgtgtctgaagacagctacagtgtactcacatatataaaataaatacatcttttttaaaaaaaaagaattaggacactggttcaagttaggtgagaagttaatctgaagaggcgatctgacttcgtccttttcgtgcttcattttgacaaagagcctggaagactgaagctaagagaggggacatagatatttctttctgtacttatacacacgcacacaatttacaacagagaatttttatggagaaggagactgtccctcaactctnnnnnnnnnnnnnnnnnnnnttgagccagggtctctcactgaacttggagcttgctagttcagtaagactagttgaccagcaagctctaggaatctcctgtctctaccccccagtgctgggattctaggcatatactagcacacccagctttttacatgggcactggggctctgaacatggatgctcatgatagcgcagcacaagcacttttcctactgacttcatatccccaattcctcattgctaatcttaatgacaaatgtcctcaactatgatcactaaatgctaaaactattattaaattcattcattacctgtttccttaaaacttaacacatgtaagtactttggtgagagagggtggctaaatactgggattttgtcagtttctgtgaggagaatgagatgaatatattctactcgtatgttccatcctttgatctttttctgtcacctcagattataatacccattttcttggtctttttgtggttggccatttttcactggaaagtcttactcactgcaactcttcacatggggccttaccaagaagttaagaacctggaggttacaaagactcgagagcttcccatggagctgttgtcagaggcaggttggaggacagagtagccatagaaatctgagcttacataggctttgctgactggaaccttcttttcttccactggaactgtttaccaacagtgagaagagctaacttctgactagaacaggtgtagtgtctgctggacagtgagcataggaatcgccagctcacaggaacaagtcagcctccgggactgtgaaacatttattctactgctaacaaatgagagccatatctagtcttgaacataaaacaaaataaaaagaacaagacaagctattagagtagttgctgtggtcactgtcgcaggtcattttaaagagtttgagcaggacagtgttggcgcacgcttttaatcccagcacttgggaggcagaggcaggcagagttctgagttcgaggccagcctggtcgacagtgagttccaggacagccagggctatacagagaaccctgtctcgaaaaacaaaacaaaacaaaacaaaaaaagagtttgaatgggtgttaggaagtttgcgtagcttattctcaatcgcaaccatccttctggctcagtggcttttaaatttctggttctttatcttctggaaatggggaggaaagaacgaggtgtagtgttgagtaatcagaacccttatgttctcaagttcttccttgtgatgcatagaggagggcagggtgatggaggtgatggnnnnnnnnnnnnnnnnnnnntttaaaatgagcaagcaagggagtgaaagtgcgaggaagagagaacaggaaaatagtttcttctgacgtgtattttatagaaatcatggttaatagcttgctcacattactaatttggctcattgggattattggtgtgtatggcatctgtataactcctggctgtacttgttactgaaaattaggacatccctggacctggagagatggctgagtggttaagagcaccatctgctcttccagaggtcctgagttcaattcccagcaaccacatggtggctcataaccatcaataatgagatctgatgccctcttctggtgtgtctgaagacagctacagtgtactcacatatataaaataaatacatcttttttaaaaaaaaagaattaggacactggttcaagttaggtgagaagttaatctgaagaggcgatctgacttcgtccttttcgtgcttcattttgacaaagagcctggaagactgaagctaagagaggggacatagatatttctttctgtacttatacacacacacacaatttacaacagagaatttttatggagaaggagactgtccctcaactctcgtttttttcattgttagattatcagattccaaaaggcagcaccagattgaaccatcaaagataatttgtataatataagcaaacattatggctgcctattctggtaaggagaccaaaacaacctcaaataatgcccccttgatttctcgtctgccatttttttttctcctgtgctagcgaatgaatattggaccttgaacatgctaggcaagcacctcactgcctttttaactggctttgtaatggcatgaatagtgttcctgtgccagctcatgtcctatccctctgcccctctctcactcctccatcttctccccttttctttccttcttaccaccgttctcttgtttccaacagattatgtggtagttatccacaagagctcatagtgcctgcttggatcactgacaaagagctggaaagcgtggcaggcttcagatcctggaagcgcatccctgctgtcatctacaggtatgtaagcagaccagctccaggtacttctccctactgctcactgtcctgacagctgctgacctggcagcgacagtccctggcaagtgcatgcttccttgttgctaaagctgtgtctacagaaagaaaaacaccagcactcactgtgtccagagcagaagcagctggcaatgcaggggaaccctgatgagaatatttcaatagagcagtgctgggccacctgttgcaatgcacagctttaatcctagcactcaggagatagagacgggtggataactgcgactttaagattagcctggtctatgtaagaacttctaggataggcagggctactatacagggagaccctatctttaaaaaaaataaaaataacatttttttcttatattcattgtatttagcttcagatgattaacaggacttttgtgttgaaagattggtgagatttagaatagagctcaatgaactctaatggtgtttgtgattgtcactttaacatgtgacatgtggaaggaaggactcttgttttgagatgaattagaatcacttgtggctagacagaaagtttcagagacacaagacatgagagctatagagtaatatcttgtggggagacatgaacagccctctataaatcccagataggacactgactacagacctaagaaatggttccacctgaggctgtcttgctgacctcggggagcttctaaggtcacttctaggagtgtgtgtgggtaaaggatgagctggagggctatagaagattcagaagtagctgtatcactggaagactccccagagtggtaactcgtgacagccacattattggctttagctagacactacagacatgtctaccaaagttttcttccccagcaagtgtttgctgctgttacaacccttggagagctgcatatgtcatgagcttcttacaagccttcctctgcctgcataggggtttttactatgagggaatggtatctatataagggctaagggtgcacattttaaaaaggggttggtgatacacagatgtgctatagtatgtaaacgaggtcctcttaacactttaatgcctttaagtgacatttgaaatagagtacatacttaagcactagctttataagttagtgaccaatttgctgttacacagtcatgttaaatttttaggaagtcgtattatgtcttgtaatgttaacattctccattttactttgtggtttgtagaccttttagactgaccaaagtgagccaaacaatggcttagttaaaaagtaccacaccaggacctattgcactccaatattgaggctttaggaaggtatatttcttgtgacagtcttgggaaggtaaccagcttgttcatttagcctatcgaaggcaagttctgatgccaccctgaatactgaacgtgaaggacactgcctgtggctcagtaggacccattaagccttcagtgtccattttcatcagttttgttttcagacaccaaagtaggtcaccaaatttacctgtcactcaggcactgagaatgacatggaattagagaacaggaagctaaagggattgggaggctgggaaagcagctggctgctggatggaccaacagctgtggtagatcgactgcctggcatttatgagacttgtgacttggagcagaagggggaagtactctttctgagtaaaaggctttcagtaaaagccatttttcttcctttaggcagaaagcttaagtatgctagctaagaagagctccttagaatacgtttttgttttttaattagcttttttttctttcttttctgtaattcaattctggaaggtgtgagttctagggttgctcattctagatacctagactatgtggataagtagaaattgtcaccatcaatccttgagagaaaacctgccaagattgtggttgaaagttcttggtatagttctgtaaatcaagcaggcttcctggagctgctctctattgaagggcatgtgtcttatgtctcttatctcagaattggatccctgtgttgtttagttttgttgggggtgtcttgaagaatgttcaggacactccaccacttttcagtgccagcagagatgatgtcttattcagtatgatcaaggcaactcttacaagaaagcatttaacggggctacagtttcagaagtttagttccttagcagcatgacagtaagcatggctgcactcagggctctagaacagtccccgtgagctactttttgatttgcaggccaagagacaagagagagggacaaggtttggcatgggtttttttttttttaaactttaaagccaatccccaatgatgcacttcctccaacaagtcacacctgttccaacaaggccacagcttctaatccttctcagatagtggcactccttatggctaagcatttaagtatatgtacctgtgggggccattctcattcaaaccaccacaaatagcaaaatgcccctaaatccagcatttcccagatttagttatgtgtggactgcagcaaagtcattcgcagcagttactttgcaatactggcctgaaccagtacctgattagagctacagagttgctctaacacagcaagatcttgagagacttccatctgttgtgcagcttacagcatctctgtgtgcatggtgatccttatcagatagagagcttgcctgaccattggattagaggcagttaaaaccattgcatcttcatgtacaatggaagcattccatgtttagtaagtttttttttttttactagaccttttacctttttgtattttagcaagttctgtttgttaagatggtaaaatgtctgttttatctaattttcttttttcttttaaattttaaagtgattgtaacttttgtcattgagtgggctttcatgcaatacaaagctttttaggagatcaattactgctacttgtagtgacccagttggccctgaaaacccaagaccagagtgccatctgctgttctgcctctgtgctaggaagccttgcagagacagaggcctctcaggaaaggtcccttcacccttttctgggaagtttgcagtcatttcagatctgtggttttcagcctgatagggagacgcagcaaaaaccatggaatttcacatcatttgtttgatttgagtgtgagcccatgcggtgttggtaatgatgtgttctgcgagctgttcgcaactcaaggtgaggtgggattgaaaacctctaagcagactactctagtgggatttgctaccaccacatttaatctagtgcttgtgaatttaaggattatattttctcacattatttcctaaaaaaggaaaaaggaatggaatactgtgttctgtgtaaacccatctctactatctgtgtgcaggtttgcatgtgcaaattcaagagcattttaaagaatatgagcattttcttcagtatatagaattggtagaatattgcttaccagattttgtaaagtatttcttggggctgaagagttggctaagtggtgaggagcacatgctggtcttccagggcaatggagtttggtcaccggcacccctcccccactggacttcacagctgccttcagttgtagccacacacacacacacacacacacacacacacacacacagagcaaaaatattttttaattaaaagatttataaaattttatttgtttagtgtgtgtgtgtgtgtgtgtgtgtgtacaagcacacatgccacagcacatgtgatccagctttgttgagtcagtgcctccttctccgtttacatgagttcaggcatggagtgggtccagtgctttaaccactgagctctccatttttatagcacttcaaccttaaggaagctttaggtatgctaatacaatctagcaatctttactacattacatttagagttgtgctaacccacctctacaaacagtgttactgtattttcattgaacagaatgaaacctcacactcattggcagtcattccttacttccccaactgctctatcccaagctagagccaggaatgcactgtttctctagatttgcctattctgactaggtaatacatcttaacaactcatgtcctttgtgatgggctcacttcactctatgtgacactttccaatttatctatggcatagcatgggtctaaactttgtttttttacaactaaatattacatttttccaactttttaattgacatgctggaaaacatgaaaatttagtagcatctcagagtggactctgagaatcatttctggctttggaaaagaatctgtcagagtatagtttgctgggttgtgatttcttccctctgagatgcttgagcaagcatgactgggcatcgagcactgtgtccatagtaagactaacttgtgacacgtgacatctctggagagctgtaaaaggatttcactgtaggccaagagaatgttgtatttgcagagatgggatgtgtttggaaagaatcatcaagccagcagtagtgaatatatggatactgcagtaaaccttcagaagtgaggcagaacagtttgttttgtaccttagcagctttatgtgttggattcagtatcagaaatgggtgtttgtgcttaattattacatagtagaactggtataatatttatagatttttttttttaaaatcttatttcccaaaaataaagattcagaatatctaaactgtgagtgctagttcattttctctaagaatattctcttaccgtttgttggtaactttacagagagcactatcatgagatgatgattgagaaagcatcaggctatttacaatcaatttccatccttttatgagtgcagagcatcagatggggccttgaaacagtacactcaggaggggaggggatgaggggcttccagatgggaaactggggaaggacactcactgttgtctccccacaggcaccagagcaatggagctgtcattgcccgctgcggacaaccggaggttagctggtggggctggcgaaatgctgatgatgaacatctggtgcagtcagtggccagagcctgtgcttctgactctcagtcaagtatcagcaaggtttccactcggaacagttgtcgggactttcccaacgcaggggatctttcagatgtggagttcggtaaggtgctcactaggcccatgcagcagttttttaaagcatccgaaaagcttatcttaaagtgccttttccttaaatgatacaatgttaaatcagagtttttgaatctctgtcctggaactcactatttagaccaggctagccttgacatcacagagaaccgcctgcctctacttcctgattgttggggcatacatcatcacacctggctgtataaagttacttttcttttttgaatatgtatgtatgtatgtatgtatgtatgtatttgtttgtttaatgtatgtgagtacactgtagctgacttcagacacatcaggggagtgcagtcagtgcttttaactactgaaccatctctccagccctaaagttacttttataagagagaattcagtgagtttgtttgaggagggacaggtcttgacaaagcactggaaaatcttttgtttcaaggcaaatgttgtcttccttgccattgtgacaagaatgaagtaattggatgaggatgtgggttgtctccagtctgtggagaaaaatacctgcttttatgaaaggactacaggggtagaaatgagggtaagacattaggtgaagtgggaatttcatctaatgtgctttgggaattggttttggaaaataaatccttatcaatttcaagaggcagagggtacactgaaggcaagaaccaggtctggctaggcggctccattgattggagttcattttgttctgtttttactgtaatatgtgcctctggtactagatagtcacagttctaggagagctgggtctgcttagtttttatccccttcttgatgcctgcagattcctctctgtcaaatacttcaggagcagaaagtttagctctccagccccagaagcttttgatcttggatgcacgctcctatgcagcagctgtggcaaatcgagccaaaggaggaggctgtgagtgcccaggtgggtgtatagtctgtccccgcatcatctgtccttgtcagtgcccctcactcacagcctaggcttcagttaaagtaaatggcaaagcgcgttctttgccctgcatccagaaagccaggccgtctctctggatccttgacctctgtgagctttggctgaggtgcagaccatcttcctcctgtgtaccaacctcaaggataggaaagctggtctctgcccacaggtctgtagaggctctgtttctcaatctgttgtctctcacagtacataagtgaatcactagcttcctgccactcccacggacttcttagaaaagcggggtcagttggaggtagtaaatacagagctctagtgttccgccctttctgactctgccacggccctgctgtttgagtgctgctactttgctgcttttacatttgctggtgagatccttaacttgaatgtattgtgggtttttttaaattgtttttctctacagagtattatcctaactgtgaagttgtgtttatgggaatggcaaacatacattctatccggaggagtttccagtctctgcggctgctgtgcacacagatgccagatcctggaaagtaaggcttggctttaatgcgtatgcttcttttgttgttgccgctgtattgctgggtttggtttggtttgattttaaatgagtttagaggtatcttttgtttgttagtgacccttagttatacttttgatccctgttgatagtcttcttggcctagaagctgtttttttctacagcatagaacatcaactgtggaaaaaatagtccagctcctttgcagagtttgtgttgttgttgttgtttttaatttatttttgaaattaaaatataattacatcattttccccctcccctttctctccacccctattataatgtgtgtggctattcaggctttctatgtctgccccagttcccgaataacaactcggaggcttatcatttactaataaatgcctactttgtttcccagctagcccgtaagtaattatcctgttattctattctatctctgccacatggctggttacttctcctcagtttcatatgtccgacttcctccaagcccggacggagaaaactcctgtgcctgaactctttgccagagttcttctctctgctaatgtcccactttctaacctcctcaccttcttggccatcagattttttttaattttgaccaatcagaaggtgccttaagcaggcaaagaaggaaagagacacatcttcacatagtacatatgcctacaatgtgtgtgcatatttctaagtatataaatattatctgttcagtccatatagtgttactttttttttttcaggactgatcacttggtattggataatcaatttggaggctctttccaatctagttatttcttagttgacctttagtttttgtttggggtacccagcctcactggtacatgggtaacacagttctgtcacagggtttggatgtgcagcacataatagatctcaggcctcagaacagaagcagcaaacccttttctgttggttgttgccacaatatgagtgccactcatgtacatggtagcagtcagccctgaggatgaagcagtgtctgactcttagtcactattctgttgctgtaaaaagacatcaagactggacttaatggttaagagcactgactgctcttccagaggtcctgagttcaaatcccaccaaccacatggtggctcatagtcacctgtgacaagatctaatgccttcttctgttgtgtttgaagacagctacagtgtactcatatacgtaaaataaataaaatctaaggaaaaaaaaaaggcatcgagaccaaggcagttttctcctctccctctccctctccctctccctctccttctctctcttaattacattaagttacccacagtgcattcagaagatgtaaataactttgtgacaataaactcagagcgagtcagtctcccctctcttctattctgagtagaccaaggtcaacaaatgcgaagacttcatttagagagagtgagcacaggacatgactgaacttgggggaggaagctgaggaatttcacttgtacaacgatcaaagggagaggctgctgttggttcatctgggttcaatctaacaactttcctattgtcacgagagccctggggagcctcctcgtacaagtcatctctccctccactctattccccttgcacttgattaggaatatgcttcttgcatttaatagaagatagctggatcgggtgagttctgaaagcttgttggcagaattgtccaagctggaacagcattaggaaataccgtttttttaacagatgccagcatgaacaacttactgagaatctcaactctggcctttgagtattaaggaatattcttcttaaggacagtccaactgcattcagcccatccagctccctcttactgttaggagagttgacctctctgactggtgagttctgtgcctcactgggttagacacagccactgttcccattgnnnnnnnnnnnnnnnnnnnnnnnnnnnnnnnnnnnnnnnnnnnnnnnnnnnnnnnnnnnnnnnnnnnnnnnnnnnnnnnnnnnnnnnnnnnnnnnnnnnnnnnnnnnnnnnnnnnnnnnnnnnnnnnnnnnnnnnnnnnnnnnnnnnnnnnnnnnnnnnnnnnnnnnnnnnnnnnnnnnnnnnnnnnnnnnnnnnnnnnnnnnnnnnnnnnnnnnnnnnnnnnnnnnnnnnnnnnnnnnnnnnnnnnnnnnnnnnnnnnnnnnnnnnnnnnnnnnnnnnnnnnnnnnnnnnnnnnnnnnnnnnnnnnnnnnnnnnnnnnnnnnnnnnnnnnnnnnnnnnnnnnnnnnnnnnnnnnnnnnnnnnnnnnnnnnnnnnnnnnnnnnnnnnnnnnnnnnnnnnnnnnnnnnnnnnnnnnnnnnnnnnnnnnnnnnnnnnnnnnnnnnnnnnnnnnnnnnnnnnnnnnnnnnnnnnnnnnnnnnnnnnnnnnnnnnnnnnnnnnnnnnnnnnnnnnnnnnnnnnnnnnnnnnnnnnnnnnnnnnnnnnnnnnnnnnnnnnnnnnnnnnnnnnnnnnnnnnnnnnnnnnnnnnnnnnnnnnnnnnnnnnnnnnnnnnnnnnnnnnnnnnnnnnnnnnnnnnnnnnnnnnnnnnnnnnnnnnnnnnnnnnnnnnnnnnnnnncccacccccccacccccagactgacagcaccggctgctacttcatggtcagtggggtcaaaggaacctccctctactgggttttgtttactgcttcagcagcaggggaatgttcataattacttatcagccctctgattgaaaacaaaagagaacacatctgatccatcaagaaagggttttaagtgtgtctaactagaagatagggaatcttgaagttgaatttatctatgacaaatttataattcattaaatagaaggactcttcctatatttgggggcaaagcttggggtataatgatgatggcaacatagtatcagcctctgagtcacagaatagttaggaaaacagggcttgtataccctgttctgctgtttgcttgcctggcaggaaagatctccctttcttagactcctaataacattcatgttcattcttcctttttcctatagaccttatctagagcttgtcttggcaaagccttctcaaagatcctggacaattattattccttatctttcagtgtttaaagggctagacttgtggccttaaactacaaatttagccacatttgggaaaaaaataaacagaagttgtttgggggaatgagggatggaggaagaagtacatggaacaaaatgtcaacacatttgtggggatggtaagctatgtaacctcaaaccaaagaggcagttctttttatcagataccctaaaggattttgaaaaaggtggagtcctctttctggatccagtctaactcagcaatattatatagtcattgtaccagttctcatgagtctaatgatcataatggactgtgtgattgtgattttagtcagtaagtagtcaaggcttaacagtgggtgatgggtaatgtttgaacaattcctgtgtttgccaaaagacaatttcttacactgtgtgtactagtctaggactactcgccaccccccccccacacacacacacacacacttcccttttgacaaattatctttgaagagtagatgtggtacattccagcacttggaggctaatccaagagaactgagttccagatcagcctgggctgcataacaagacccctgtctcaaactcattaaatgtggggtgggaggagcatgtacttgtgtgtgtatcagaaccaggggtgggggcatagctcagtggtagaacttaactagcaagtgtgagagagaccctggattttattcccagcatattcggggaggaaaaaaaagaagaggggaggggtgaggttagggtactggggagatggctcagtgattaggagcacgtacagcttttgcagtttggttcctagcacccacattgtgctgctcacagccacctgtaactctagccctaggggctctgacaccctcttctggcctcctcacaatacactacttccttacacaaagttaaaaattaaaaataagtgccgggtacagtatagcattgttaattacaggagtttttggttgctgttgatttttagtttgtttttccctaaaactgacttttcttgattgtggagcttgaatctcacctggacattctttatgaactttttaataaaaatcactttggaaacaaaggtctcgtggaattgcttcttaatttggcaggcattggacatgatgacataaaatcataaaaatcactatttccttatcttccctttttttatttagttggctttctgcccttgaaagtacaaagtggctccatcacctatctgtgcttctgaagtcggcacttctcgtggtgcatgctgtggaccgtgatcagcgaccagtgctagtgcactgctccgatggctgggatcggactccccagattgtggccctagctaagctcctacttgacccttattaccgaaccatagaggtaagtgtgtctgagggagggaagagtatttcagggtaggttggggaaacctttaggaaggttgtatgtcaatttggggatggaagcgaagtcttcagaaagtgtactctgtcataatcatgcatccatcacttagagctatatggctagtcttatggttagtgacaggcattgaggatacagacatgtttccttggcagcatctccacttggaaagattttgtctacttcaggaaaaatgggcttaaaagaacacccacatgcttaggatagtaggtttagacagaactgcttggcgttctggagaaacatctgccctgaaataatcattgttgggttaaatatagaagaacaaaagcataaagtgacataaagtacaaatatttataaaaattgctgctggggaagaatttttacaaatacggctttataaatataacatcaaaggtgaaaattagtaaaagagaaatttgggtaggcaggcagcatttgtgtagtaaatgagagtgactgcacaaatagctagctagatagtcagtgtcctttagctggatcctgaatagagttggtaaattgaggcgtttgtataaaaatgtgtgaaccattagggagagagcctttggctctgagcctatgccagagattgactgttggtgacatggagcttaggatgtcacaggtgagacagtattgcacaagtgatctctcctcggtgcctccctgcagggtttccaagtcctggtggagatggaatggctcgattttggccataagtttgctgaccggtgtggtcatggggaggactcagatgatctgaatgagcgctgcccagtgtttctacaatggcttgactgtgttcatcaacttcagaggcagtttccttgctcttttgagttcaacgaagcattccttgtgagtttggacttcatgattctacattttgggacccatatacacctagagggatgctgatacaagtgttagggggtcatttttacctaaaactatgcatttttcaaacttatcaaggagtgactgctttatttaaaagcaacagcatttaactttcactcagtgaatctagccgcaccaggttttcctctgtaaacatagagttggcttctaaagtatatggtctaaaaagtagttagagatagaaattatctgaatctgccgtgctcccctccagtctctactggtgctgtctgccatgttttctgctcccgctagctcctttgatgaaagatgtcctcttcctgtttgagccctccgttactgtgtcctccagcttctatccccttatttctgactggcttagcatttctccactatgcttcttgcattagtatgtctttgacatgggagtgctggtagttggggtcaggccctgcaattggtaactgtgaagaggaggtgccatatattagctgcctatgcatatacagcctacatccctgagtgagctgaagtgttctcagggatgtcacggtgaactgtctagagttgggttgacctcctttctgagaccatgtaccccactgtatcattttgtctgattggaattttgcaggtgaaactggtacagcatacctattcctgtctctttggaacattcctgtgcaacaacgccaaagagagaggggaaaagcagactcaggaacggacatgctctgtgtggtcacttcttcgagcaggcaacaaggctttcaaaaacctactgtattcatctcagtcagaagccgtatgtaccctttagcctgtctctgtgatcagcagaaagagtttgagggtgggggcgcatatgggagctggtttgagtagtacttgttttttgtgaaaaacgtgtcagctgtctcaaggtactggttccacttttccattttccaccattctgtctatgtaagcctattttttgataatgcctgtccatgaccaactcaggttcaaggtggtttgggtgtaaaacacatccctcctttgtcatgaatcattgcctgtacttccgctactgctcagcgtagtcctaacacgtttccactctctggaggaaaaggcattaaggttccttctctcagatggtttgcgtagataagaagtattagccagcaggctccggctactctcccatgagccaggcaatgggacccactcagctctgtctcaacataaaattctttctgctgttggcatgtatctatctgtctgtgattctcttcacacatgagagctgccaggccttttaacactttgttccctcaaaagaatgccttctgctaaccagagagagagaggcagtatgtctgtgtatcaaaatgtattggttttccctttgtcgaatgcagtttaagcccttagaggtccatgcaggctaatcagaggttatattacattgctgggcaattaatacacttcgaatcacagttaagtagttagaagaaaagatttacagtgtctctccttcccttcgttgtgcctgctgggaaagtggcagtaaggggtaggaaaatacccttattttcacatgattaatttaagggattctataaaataggtttacagctttcactgaagccaagctttagtgaaacagacacattcaccatgtaacagaacaattcttactcggtaaatcaggctgatgaaagcctgtcgttcagtaaagaccaactgagatagttaatacgaagtctgcctttaaaggacccattagattttcatgctcacgagaggcttttaagtaaagagtattggccgacagaaaccctgggtctatatctattctcttgggagatagaccttcatttactggtgccacctcattgttgatctgtgacccagctgtgttgagtggcccacctaggtgtgttcattcttgctttgtcattccaggcatgtctaagggatttactggaacatgcataaacctgtgtcctccccacccttctcctcaggtgctctaccccgtgtgccatgtgcggaatctgatgctgtggagcgcagtgtaccttccctgcccatccccatctacccccacagatgacagctgtgcaccatacccagtcccaggcactagccctgatgagcccccactgagccggtgagcccaaagctgatgccacaagtcctaagtcctgaatggtgctcttctttcttaagtggtggtatcccctctcccctgccttctgcccttcttctccctcccttccctgcctccaaggctgaccttagacttgcagtgatgtgtgtgttcgagttactggcctgaaccacgacatctggctgaagtttagtttcttaagaaagatagtaagccttatttctgaaaatgaattggacctgtccctacattattctgccacctgcactgagcggtttttcggtagtggagcacatctgtggagtctttgtggactttggtttgttcataccctgctccctgctctggttagtcttctgaagcttgaaagtcagatgctataagatgagagaaactggttttgcaacttgtgaatatgctttattaagaacagagtgagagataataaatgaatttaaaatgtctagtacaaaggaccagcaagttcctttgccactacctgagaggtgtagaccatttcgagggatgccttgtgaaggctacagatgcatgaagctatgggttgagccccagttttgcataacctgacctggtgacacattcctgtactgccagcacattggtggtagagacagaaggatcaggagttcacggtcattgctaggccaaatagagagtgtgaggccaacctggaatacatgtgttcttgtctgaaaaaaatcaaaaaaaataaagagaggaaaatgtaaaaggatgccttctagaaataatgtatgctggtagcttatgtgggggtggggattggcagtgaggaagtgcaggcagtacctgtggagagccgtgacgctctaggagtctgagcctcattttagagatgtggctgcgatggcccagttgtgaaacagtagcttatgaaaaacctgttgtcctctggggccctctagatcgcctctcagattctcattttccctaaacccttttctttttaggctacccaagactagatcatttgacaatctgaccacaacctgcgaaaacatggtgccgctggccagccggcgcagcagtgaccccagcctgaatgagaagtggcaggagcacgggcgctcgctggagctgagcagctttgccagcgctggggaagaggtgcctgctatggacagcctgcgcaagcccagcaggctgctcggaggtgctgagctttctgtggcagccggagtggctgaagggcagatggagaacattttgcaagaggccaccaaagaggagagtggggtagaagagcctacccacagggggcacactgaggtgccagaggtcaaagaggaggcacccctagcaaaagaaagtagcatggcggccgagggccccgttgtactttaccaagaaccacagctggatgacgctactttaagaagccatcaaggccccagcctctctttgttctcccagggtattcctgaacatcaggatgggcacaatgtcctctctagttcactccaagctcctctcaggggagaggactcccaggaggtccctgtagaacagcctcaagtagagaatattgcagaggacagggagaatgtagctcctgctgtcccagtagatgcaaaagttggccttggtatctcacagtctagttctctgctgccttcccaagtcccattcgagacaagaggaccacacatcaacaactccgtgcacatgttactcgaagataaggtaaagtcagaaagtgggccccagctccatcacagaccttgcccagcaagcagtggtagattcagtggcaaggacatgcttcctgtagcaccagagcccaggtctgctgagaggccccagtgggactctgtgctacacaggacttcatcccctggcaacacccttagcctgctgcaggctccttgtgccttgccgttagataaatgtagacagggaattgtgtgcaacggtgccctagagactgaaaacaaggcctcagaacagcctgcagggtttgacacccttcagaagtaccccacacccaatgggcattgtgccaattgggaggctgggaggagcaaggactcactgagccaccagctgtctgccacaagctgtagctctgctcacttgtactcgaggaacttgcaccacaagtggctgaatagccactcagggaggccatccactaccagcagccctgaccagccttcccgcagccacctggatgacgatggcatgcctgtgtacacggacacaatccaacagcgcctgcgacagatagagtctggtcaccagcaggaagtggagaccttgaagaaacaagtccaggagttgaagagtcgcctggagagccagtacctgaccagctctctgcgcttcaatggagactttggagatgaagtggtaagttaggtcaggattcctttgaagccttccaaggagacggcacgcagaggccagcaaaataaccctttgcacccagtgcatggttattgaaacagacttctgaaaggattagaaaggtctcaatgtcgagagagattgtttgggagttggccttggccatggagacagcagtcctcctcttttctgctgagctggcttcttattcccttgtaggaagttaagaaaaagaggtgagttaatatgcatgacaggggaatcaaatctctgcagagggtccctgtgtcagccaggctttgtggctcatgcctgtaatcaagggaggctgaggcagagcatttctacaggtttgaggttagcctgagctacatagtgagttctggtctaacctggacaacaaagtgagcacctatctcagttcactctaccccaaaataaaacacatgtgttaggtatgtttagaagggcttgcacacctgttcagaatggcattgatagagcagtgctgattctgttatgttggagtgtttgtcccgcctgagccactagtgagctgcctgctttcccagactttgggagtattgagagccttgctctctttgaacaagtgtttgtacccactctgtggcaggtgctggcaagagaaatggagagaaggggttgatttttgtttgtttttaaagcattgttgagggcttagtactgatgaggcttggtggctagaaatgagggtaccagggttcctgggcccccagaggggctttcttctttgatgggtctgacagtgtaaggcaggttctggagtaatcatcccagattcagtgactttgcaaccaaaggaagttttggctttttcttcatactaaatactggtttctcattgtcccaaagagcccctcagaagaaaggagggcacactcaagtcactgttttcattcagtgctggactgaatccccaggcccacaagaacagctgacacagggagctcctcccttcagctcagtagtggcttcctggaccctataaccaacccatctttccacgccatgtcacttcacaaaatccatgtgtccttctgagtgcagcccctcttgcatctgaccagcctaagtctggatggctggtatgactgcacatttggcaccttagcactcaggcctgcgcagagacccaccccagttctctgctcctcctctgggaggagacaggttcactccgttgagctgtgtttgtttgccaacagacttcaatccccgactcggaaagcaatctggatcagaactgtgtgtctcgctgcagcacagagattttctctgaagccagctgggagcaggtggataaacaggacacagaggtacaggctcagcccctgctctgcgtgccaaccacacaggtgtcctacagctttccattccagcccctccccatgccactgaccaaggaagaactcacagtcagcctgcctctgcacctcggctttagagaacccacatccatcagttgtaagacagggacatcagtgagctggcccttttctctccattgcctctgccagctctcataacaacccagggtgccactgggccaatttgtcttagaagattggcgcctcctccaggcaaacaatttggacacctctcttatactgttagcaggcctgctgggctggtaccactggagcacatgtagtccttgtggctctcgctccccctggtgtggctctgttgacttcagctgactggtccacctcttgttactaacttggtccatgtgttttacagatgactcgttggctacctgaccacctggctgcccactgctatgcctgtgacagtgccttctggctcgccagtaggaagcaccactgcaggtgccattgggtggcttttagggtgggacgggttacagaatctgaaccttggcgtcttataagcagtgccctgtgtgagctgccctggggattgtgtttctatgcctctgaaattggtccttctggaactgtatttggggactcttttccaattcagtgatcaccattgcattttgaaatgtagacatactttgttttgtttcccagattggtagttaaaagctaccattcagatcttcatttcttatttccagcataaaactggttatggctactttgagtgaaaacagttttagcataggtgaggagcctggttttcctactcctttctacttcctgctccctgtgctgctggagagtcgtatacacagctgaggacagtttccagtccttgttgctcccaatttctttttcctaggttggggagtgagtcactaaggctgctttgccctgactggggtggtgactctctgggagatgttcggtgttcctagaataggagtttatcagaattgaacaatagcccacaggtggaagtgagactgtattgaaagtaatggaaaaatctctctgtagacagatgatactcttagaaccatgggtctcccccaacctgcacccctagaccaagtggcttctctgagctctttctcccctccttgcagggacactgactgtgtcgatcaaacgtggtgagcatttacaacaacttgtctgtgatgcctgcacagccacagtaacttctccacactaatgctgccgttccttttctgcacgcactgggccttggcaggcaggtgggcatgggagatccatagcaactgatggaagaagctgccaggggtgtgtccgctgcagccgtgtgctcccctctggactgtccaggccagctgggctctgagactcctgatgagaagggatgctcctgcagggctcgtctttggggaaagccagtgggcttcagagctttttttgtcagggagaggtgacagttattcattgatgccaggatgatgctagtaactttcaggtcatatggcatcactcccttgtttagattttatagagacagaagtgaatcacttagtgtggaagattccactcaggtctttcagggtctcccaagggaagtcagatagaaaagcttaattgatcaaactcatatcaggcttttaagctaaacttcagcaggtctgtttaacaagtacaaacattcagaagatttcccgtgtaaccacaagttcttgctgactcgtgcttcttagaaaggtataaagtgtttcctacattctaggaacaaaaggctttgtgttctcgttccctgtcctgttgtcctgtgtcctatcttcccttctccagtgttgctttgtctcaggtggtctttagtatctgctcctcctgtgcctgagtgctccttccccagtgtggtctgtattctgcagagagtggctgagaggttagtgcagaggaagcctttctgctatgttaactccctcgtctcagctctggagagctgtgccttggggttccctgtgctgagctggccagtggttgctttgtacttccgggctcagcaaatgtaggatacttaatactgtgttgattaccttccgtgtgtgtgtgtgtgtgtgtgtgtgtgtgtgtgtgtgtttgtatgtggtggagtgagggctggagggtatgggcagacctgtgctgcaaagatgcaaaggactagggatttgggcagaaaggagaaggaagccttgagatgcatggggcagggcagtgagccctagctgactgaccactgtctaatagggatgcatgtgtttctccacggcctcatccttccatccccttttcacgctgagcatgtgtcatgtgctgctttggtttttggctttgcatgctgctgtcagcagtctgcatccaacttgcctctgaggcagtgaccgttaagccagagtttctcatccccagctgggcagcatagttgtttctcgtctttgaggggcccacaggctgactccacttgactttggtctccctttgacctcaggctacccagatggccagtgccaaggttagtgcatccactgggtacatccccgggccagtactcagcactgagctggcagttgctgtagtgcggggctcatttgcctacagagagctcttctgagcatcttcctatgcatccctgacagccttgtgccagagtggtaaggcagccacatgtcatccttggtggaggtgaaaatgactgcactgggtagacttatcttcctattgagcttcttcctagcctggcctggggaaatgaacgtgtttctagcacatccagacggtacacaccaaatgctgctctctgaagttatttttttctctcacaaaaaccaacagctgaaactaatgttgtttttttttcttcttgtctcaaggaattgtgggaatgtattctgctccagttgttgtaaccagaaggttccggttcctagccagcagctctttgaacccagtcgagtgtgcaagtcttgctatagcagcctccatcctacaagctccagcattgaccttgaactggataagcctattgctgccacttcaaactgaagctcagtgacccggggtggcagaggccatgctgctgttcctttaacaggctcacacacagcctgggcagtccaagaggcccatacattttggaatgggggcatggaacaacctgtacagagattgggatgtaccactggattgtaaattgatttttgtttcatctccccttcccttccatcctcttctttgccttctaaaaagaaaaatatcccagttgtcttaattttttttttaatggaagcccagaggttgccaggctcttataactgctgagccgcttgctgtcagtcattctgtgagatcactcagtgcttccctgtgggaggagccagaatgaaggcctgagacagcaggacagaaagtcagcctcccattggtaaccattcttcacatcacagctatgtcagagttgactggtaaaccttgctgctggggaggctggaagcccttttgagagtacgttcctgagagggatagggccatcccacctcacagacaaaaagcagggtggcgttgggaggaaagcacacagtgagctactccccaggcctcactttgaaacgagaggtatgtgctgcttttgagttaactgaggggctagatgttggcccatgtggatcccaactttaacatgaccaagattgggtagggctctctctgcctccttgggcttctagacagaaaggtacagactggccagaaagcagtatcctcctgcagtggtcaaggcctgcactgagcgaggcacctgggagccccctctgggttccacaagcaatctcttcctcagccaacacagggaaatccagactcagggttccacaagtctcctattccaaagcaaaccaatcatgcatctccccttgagggacagagtccccacagttccaaagctctgcacacaatcagccttcctcttctacttctggggcagcaggaaggacccaggagccccttgtcctgcttctggctgcctgagtgggcacatgtctgactcctgttatctatcagtgaagagcccttgatgattgtagggctctaagaaaatgacatggcctggaggagattcggggtacctttcctcagtgagctttgatgtgctccaaaaagagccttcaaccagtagttatctgtggtggaggtgggtatgggaagggtggagagcagttttggtttgtgctttgaattgttggcatctatgtttgtgaccaccccaccccctaagggtgatgcttagctctgctaagagctgcaaaatggtaagagagcagattatagtgtgggggctgggagaagttgggagacagctcagttctagcctggcctatatccttgccccgcccctctggacgctgttacctggccatgggccttctgtgtctcaggaaggtggcttctgcatgctcctcagtatgaatgcaagaaagcagaagccttccctagtctgctgaagggaaggctgcagtatcagagtattgctcatccctccagaagcaagtcaggcagggccaagcttggtgaaacagggtgacgtgctccatgctctctgtggtctggagttagggtggggaaaggttggtataattgaagattgtgcagttcctagtgacaggtgccaagaggttatgatacgggtttcttgggtctgttgtacagtgtgaataaatgcttgcagctcttagccctttttgatcaatgaagcacttttttattaatattttctttgtatgtaaaggaggaagcgtaactccatagctgtacatagaaccttttctcctaaagaggagtcagcgctcctatagttttcattttttgtcaaagcaagaagtaaatactttagaattgttaaatatatagataaagtgaataaagttgagtgtccgcacggtggcatctgcgaacgagttctaattctttgccctgtagtttaaactctctttgtcccttttccccttacataggagcagtggtttgaggaactgctgggaatttgacctttagcaaaggaaaactgcacatttcaactctagaccttggcaaagggacttcccaagatgtccaagcactctagtccattttctcaaggatttgcctgtgaggtctgctaagctgagagagagcagagcaccagtcatcgtaaggaccaactgcatatccatggtagtcaatgtacctctagcctgtagagtctcctttcagatgggaacttgtcatttaacacaggctggcacactgtaaagccactgagcctagcagcagctgactgccctggggctctctaagaacctcttcagtgcttacaaccttgggtgtttatacctagctcacagctaagaactggaaagcagccattggaattttttttttaagcatttacttatttttcaacaaccaacgggcagtgagctcctaatcatagtaatgtgtccagtccctaggatgtgattgcaggtattacacgtagtggttgatttagtcattcattatgtgcctaggtgcatgtgttgtttgtgacatggcacatgtgtggcaatcagaggacaatctagcattcagtttgctctttccatatgtgatttggggatcaaaattgtcatgcctggtgacaagcacttttgtcatctgcaccattctgtcagcccagtcttggtaaatacagtgccacaaagcctcactgctggcttttctgtcaggagcctcaccacttcaaggatcggatgcagagataagtgacagacagcatcaaccagatggcgtggggtcctacttccagttgcacttggctccttcccctggtcctaaggcctgaaaagcaagttcttaaagcctcttcctccagaagagcttcttgtcttcctgcccttcgttttcctagaaggccaactcccatgccattccttcactggttcttaaggccccaggggccaacccccacccgtctggctttcttgtccttacagcgcacctgcactgatgctcccagacctgacgctgcccctgtactggacccttgctgctccctggtgcacgagtcctcaagtcccggctctctgaccaggaacacttgcttcctagaagactgagcaatcaggctaggggtagctcagtgttgggacatttcttaacatcagtaacctgagtcaacaagttcacacacatatacacacgtacttacgagaccaccaaaatgcctccgctggtaagaacttgttaataagcatgacaagctaagcttgatccccccagaacctacatggtagattgagagaactaaccattgtgcctccacatgggagcaaggcaggagtacccacatataggaacaacatgaaaaagatagactgggaatcctgtcttgacactgtatcacttcaagccttattgagagcctttgacgtggatgggggcagtagagcagaggggcagccagctttgttcagggctgtgctcctttggagtctgatcatgctccaatgcgtggcaacacaccagtgcttatatgagcaacacaaattgaactctgagttatatgagagaatggagaggggagggaaagcgcgagagctgggctatgaaactgggaagggagagtatgaattgggagagttgaggtggatctgggtggatttaggagaaaaaaagggtaatattaaaatacatacacatatatgaagtatcaaaggataaaaattatatttacaagcaagaatcagagggcttgagagatggctcagtgattaagagcactggctgctctttcagaggatctgagttcagtttttagcacccaaatggtggctcgccattgtcggtaactcggttccagaggatagagctctgccttctggcatcattgagcacttcaaaactacagtgcatatatatacatatacactcaggcatattttaatatagtgtatatatgtattttacctgcatgtatgactgtaccacatgtatgcctggtgcctgcagaagtctgaagagggcttcagatcccctgggactggagttaaggaatcatttgtggaccaccatataggttcttggagtcaaacccaggtctcctagaagaacactcagtgctctaaaccaccaagtcgtctctctagttccctaaacttatgttactgtctaagcataaatgcttgcatgtgtattcctggtgcctacagaagccagaaaaggggattagacccccaaaacagagttacagacaactgtgagataccttcaagtactgaaacttgaacttgtgtcctctggcagagcagcctgtactcttcagttgaatcatttcttcaacacccaccgcaaacaaagtcttaactgaccaaaaaaaaaaaaaattctcttttaaaattagtcttgttttgcagtgctggagagggaaccaggtcataagctaggctggtgctctgctgctgaactgggtcctcagcccttagcttaatgaagaaaattgcattgtttattatgtgcatggtttggggaatgtatgtacattgtagtgtggctaaactgagttaattatcactttttgtaatgagaaaatttaaaatctgagtgatactcactcagtaacacagttcattacattactagcagctcgggagctcttctaacggaaacctatatcctttggccccattacccggggctttgttaaagcaagtattctttaacaagatggacgtgcaactccaagctgagtgttagcacaaaacatatattttaggtgtttagctctcaaaattatgcattgcacagtaacatagctcttcatgattagttttgtgatattcagtcttgctttcctctatacccctttaactttgatattctgatcacccttcatgaagcacctagctggttatccctatgtagagctaaagggctccttcgcatccccgttgcccagtggctgtcctatgagagcactttcctatgaactgctacatgctttggggactgttagctctggtgtacatcacccacaccaggagtttctgccaccgctttatgataggggtcagagacaggtggcagcgagtggtgagcactgggccaggaaggtattcaagaggagagttgcttggacagtgttccgtgctctacagcctactgactgtgggagcatagctcagagaaagaagaaaacccatggaaatgtctagtcaaattaggctagtgtgagtctgggcaggagtgccagagcacaggtctctcgagtgaggaatggcagcgaaggtgttaaaaatgtatgccaaaacgcatctccagtcaggccctcacaggtcctccttccacccacgctcacagagggtgaattgagatggagacaggctcaggttaactacagctcctgctgcagtagtacatcccacgaatttcttgtccagccagtgagggtgtgggatggggcggagaagaagacaggacacaggcggcaagctgaagtaagcagtacagctgtaagatgtccttggcatggtaaagagcctaaaacaggggagggtcttaagagcaattctggtatgaacacgctgggcctgcttggtggtataggtgtaataccagcttctattcatcaaggcaggaggatagccagttcatggcctgcctatcgtggacaacttagagcctagcttggttttgtttgttttgttttgtttagggatggagttataacgctgttgtaacagtgttacatgttgaggtgtttggctagcacactcaaggtcctagatacaatccccactaacacacacacacatacaactgactgcaatgcactgaatttgcagaagcaagttgcattaagttgcctgtgaaacagtccacatttcaataaataattaagtaatcactaactgtttggttccttgtggggcgctgtgctcacttctgtaacttctaggactaatggggccagtctatatttaaaaatcagtttccaagctaggtttttttctctaaggaactcaaattcactaaatatatatagttcctgcttttaaacaaacaaaactcattagtttgcaactgattctgctagtgactataaagagctgtctggaagccagggactgggacccagtatgtgggacctactgcttagactcctacattgcttagttcaagtagctttgaccactgccctctgctttcattgctcatctgtgaggatttgtgcagtctcttgttcaatcaggctgctgagagccagtaaggaagtaggttatgtttagcaaagtctgcttggttggcagcgtgaggccagcaccatgccagtctctgtgcccgtctctttagcctgccagctccagacactagcaactcctcttactatacctgcaaacccagagagcaagggaatgctaaagggtggagggggtgggaggaggtgttgcctaagacaggctttctgccagtggcagtgagctcttccctggctttgggaagtccccaagagatggactctataagaggcttcacttgccagcccaggtgagattacctgggacagccaggactctggcaacctcacctccaaactgccagcgaccagtgaccatcgtgctcctggtgggagagcagaagcatggctcatagccagtttgtgtttcctttctcctgttgcctggcctttggcacacagagctgaaccgaaccccaaaagggatagagaagtagggtctggcctctggtaacatcaccgtgatacttaatgcttgtccaacttgaactgtggcttgaactgtgagggagcgtattgctccaatcttaaaagcagctgtccccctgcctcccgaagcctcactgcatgtctgtgacaaagcccctcccaccacgctgtgcctcaagctactttagcttctttcctttcccctctcctctccaaattcttcctgcctctgtaaaaaatccagaatgccagcttcacaccaaggcatagagaatacatgagccagacacagcaaagacatccattggcaagtccttgactgcacgagtgggttttggaaaatcttgagagtttgaaagcatgcattgtacaatcccatccttaagaaacttaaaatgaggaaggaaaagtattctgtaatggatacagaatatggcaacagacatcactaagaccaaggttgtctagtaggaatgggcagatctcgggggccggatggggtttctggagagcagaggatgctccatggccagggaggtagacggcatcaatacacctagaaccatccatcggcctctggagatgtgcctctgtttcacaaagatgacagtaacaacccctctccacagccctgctctggacacttctcagaacactggccttagtgtagaaaacgggttggagggtgtcttagctagtgttactgtactgtgatgaaaccccatgaccaaagaaactcagagagaaaagatttactcagcctatgcttccatttcgctgttcatcatcaaagaaagtcagggcaggaactcaagcagggcaggaacctggaggcaggagctggtgcagaggccaaggagggtgctgcttactggcttgctccccatggcttgctcagcctgctttctcgtagaacccaggaccaccagtccagtgctgtcaccacccacaatgaactatacctttcatcaaccactaatttaaaaaatgcccttcaggcctgcctaccttgaaatcttagggaggcatttccttaattaaggctccacctcactgatgactctaacttgtggcaagttgacataaaactagccagcatagggagctatcagtttgaagttagcctaagtaccagatgactctggatcagtgaaccagggactcatacctcctccattccttccatggggagtctaattctgagtggagcagagacaagtctgaagtagtgaccttatctgacctaggtgtgggatttcagggggagtttgtggtttgtttgagacaaggtatcactctgtagcccagtatggcctggaacttattatatacggactatgctggccttaaactcacttctgagtactggtattacaggcatgagccaccagtccccagtctcctaagtgggggatctcgatccacacttcaggaccagcacctttagaaagaaggtctaggcatggctgcttatctatacgatgtggtcatctagcagttacctttgattgcattgaagttgccaatcacacagcaatagcagtctctgcttccgtcagatccgcattaggctggcaagcttggatctttgccctcttgagggaccgcggagaaagaaggatactgagagccagtcaggaaagtggcctctcgggaagtgagtgccgctcaggcctggagctgaagagagaaagaggaatgtgggaagacaattgctgtcaaacagcagcccactaagacagacaccattcccatgttacagacgaagaacggagtctcgggagatcatctgcatcacatagggcagactgagggttttaccgccagtccgcctgatccaaaggctgtacctgggatcgccatcagtaggagacaggcagacgagcacatgggagctcgtctacaccaatgctggaaggcagaagatgaagggagaggtcaatcaaagatggcagccagctgtgacagtctgctgtgatcagtccgttggacagttactgaaaatatgcccaggtcggggctgaagagaaggttcaactgttaagagcactgactgatcttccagaggactcaggttcaattcccatcacccacacggcggctcacaactgtaactccaaagtctaacacctcacagacaaacatgcagagaaacatcgatgcacgtaagataaaattttttttttttttttttttttttggttttttcgagacagggtttctctgtgcagccctggctgtcctggaactcactctgtagaccaggctggccttgaactcagaaatccgcctgcctctgcctcccaagtgctgggattaaaggcgtgtgccaccatgcccggctgataaataaatttaaaaggaaagaaaaatatgcccaggtagagaaaagggaagggtgtgtttgaggggatgggggaaaaaaggcattcatttaaacttgatacattctacttcaataaataaaactggttggttaaataaaaatgaacatggaattaattctctgcctagaacctctgctctgaggcccgagccgcaatccttacattcccggataccctcccccacgtctctcctgtgtgctggtaggtgtttttactcgcctatggtggtttgtattgcctgttaccctggcaggatatgaaatcacatggagacagagctctgggagcatctgtaaggaagtttgttgcctgggctacctgaggtgtgagcagggttccccaactgaataaaataggctgagcatcagtgttctctctctgcctcctgactgcaggtgcagcaggacagccgcctccaccacaggaggctggaccctagcacagagagtggaagcaaactttcttagttgctgttctcaagtattttgtcccagacattcggaaaataactagttcaccgttccaccctctttccttagaagtggcccttgccagctcattctcctcatcttcccagaccctttcccccttgtgtttgcagcagccctaccaatagtgaagcccactgtaagaggagcagcacttcacagaggcagtctctgcagtgcctgggcccttacactgagcagtggcccaccctgtgtctgcgctgcaaatcctgatacctttagagagaggcctcatgtattttggtggttgtccctataggtatgtccacagtgcagtactatgggccagtgagtgacagtccctcccttctgtgagatgctgtgtcatttccagctgggaagagcttttaatcacagggagacgtggggagcgcgaaaatatgcttcctttgtttctgtgaaatacactgttttatgtgcagttttatgtttcttcctgggtaataacttaggagggaacccttgggaacacaacataggagtaacaaattatgggccattaactgtgcctaattgtttctttatggcttacagtggaggcttgtctcagctgctctgccattcagttaccagtagtgaaggaaggctgcttaaatacagtctggagtgcctcgagggaccgagggacagaggaaggagccacaggaaatcctggtaccacctggtaccatcaagacctcacccagtaacaagacctctcaccaacttgggaaaactgagccctttccccgaggtctcagctccttctggagaggattcacagaacttggtctcactggccttccagggcgccaaacctctgccaattcctgctcggttcaccaaaccttgtttaaaacataacctaggctaggggtgtgtctcagtgccagtgtacaaatttagtattcatggggccctgggttcaatccccaaccctaatcctaacttaaaaaaacatttcctgctaagaaaaacgcagaattatagtaaaatgcttattgtcagaccccttcaccttctcagcaggcagcgtgatgccatgagtatagtcctccagaggcactttaatatcaagtgggcatggaatactgaaaacagagccaattatcagcacagactggctgttgaagacctaacagtccattcagtttcttcacactgagtttagtgggttggcatgcctacaaccacaaaatctaaccctaacttttggattgcttcagctggccatcccggcaccactcccgccccacccgctccccattgttcctcaccagctgtctttctcccctgtatgtcctcctggctcctccacacaacttgcttgtctatgcatctagagacacccttcctaggcctggaggatccaaaggaggaacagacagccattctcagggacacagaacttccactcggaggcaaaccttccacagggaaagcctctggctgtgagaccagaacaccgtctcagggccccatcagggctttggttcattttcttgatgtgggttccaggcccttgggatcaaactcgggtataagtgcctttacctgctgagacatgggccctagggagctcatttttaagaaggctctctctctctctctctctctctctctctctctctctctctctctctctctctctctcagctggctctctgaggaagctctggaatcaaggggggcaggatcaaggcagagtgtgaaggagagggaacctgccaagcataaagctgagtaaaagctgggggcaaaagggaggacaggaaggagggcagatgactgtcagctggaaagtgtatgtggcctcagaaacaaagttcccctctgacctgtgcccctcccaccctcctcccaggcaagccatggaaacagaagtcactctcctcagagccagagaggaatcagaagctctttgctgtaaagtctacctgaaaactaaaactatctttggtccttcccagcctttctatggactggctgcagagctgttccctgtggtgactggctataggtggtccagagtgctgcctcataccctggagcagacatgctaaagctgggtgaccaagaagaaccagaacaggagactgggtccccctgtccacagcctgctcctaccagctcacagatagcccgggcacaggcctccatggctgccttctggaacctaagcataaaaaaggatccttcaccctgggtcttcatgatctgaagccttcttgtcatgtgaaactggtcaagtaaacatctttctcctttaacctgtccgttgcaggctttactttgtcagattcaaatatcaaaccttcagtagaaagttt

SEQ ID NO: 1360 - DNA, 5753 bp, Mus musculus
gccgctgccgccatgttgttgtggttgtgagaaggcggcggcggcagcggcggcggcggcggcggagcagccggcggagacgctccagcggcccaggcgctggcccccgccgaccctggctggcagcctcctggggtggcggaggaggccctgcggtggcgggcctcgccatgtcctgccgcctgtaaaaggtctcaagcagaagagaaagagtagccttgtcagagactggagaaggacgcagccgctcctgacctggcctggtcatggatgaagagatgcggcatagccttgagtgcatccaggccaatcagatctttcccaggaagcagctgattcgggaggatgagaatcttcaggttcctttccttgaacttcatggagagagcacagagtatgtgggccgtgctgaggaggccatcattgctctttctaattacaggcttcacatcaagttcaaggagtctcttgtcaatgttccattacagcttattgaaagcgttgaatgccgtgatatatttcagcttcatttgacatgcaaagactgcaaagttatcaggtgtcagttcccaacctttgagcaatgtcaagattggcttaagagattgaacaatgcaatccgaccacctggtaaaatagaagatctcttctcatttgcataccatgcttggtgcatggaggtctacgccagtgaaaaggagcagcatggagacctgtgcagaccaggggaacatgtgacgtcaaggtttaagaatgaagtggagcggatgggttttgatatgaacaatgcctggaggatttccaacatcaatgagaaatacaaattatgtggtagttatccacaagagctcatagtgcctgcttggatcactgacaaagagctggaaagcgtggcaggcttcagatcctggaagcgcatccctgctgtcatctacaggcaccagagcaatggagctgtcattgcccgctgcggacaaccggaggttagctggtggggctggcgaaatgctgatgatgaacatctggtgcagtcagtggccagagcctgtgcttctgactctcagtcaagtatcagcaaggtttccactcggaacagttgtcgggactttcccaacgcaggggatctttcagatgtggagttcgattcctctctgtcaaatacttcaggagcagaaagtttagctctccagccccagaagcttttgatcttggatgcacgctcctatgcagcagctgtggcaaatcgagccaaaggaggaggctgtgagtgcccagagtattatcctaactgtgaagttgtgtttatgggaatggcaaacatacattctatccggaggagtttccagtctctgcggctgctgtgcacacagatgccagatcctggaaattggctttctgcccttgaaagtacaaagtggctccatcacctatctgtgcttctgaagtcggcacttctcgtggtgcatgctgtggaccgtgatcagcgaccagtgctagtgcactgctccgatggctgggatcggactccccagattgtggccctagctaagctcctacttgacccttattaccgaaccatagagggtttccaagtcctggtggagatggaatggctcgattttggccataagtttgctgaccggtgtggtcatggggaggactcagatgatctgaatgagcgctgcccagtgtttctacaatggcttgactgtgttcatcaacttcagaggcagtttccttgctcttttgagttcaacgaagcattccttgtgaaactggtacagcatacctattcctgtctctttggaacattcctgtgcaacaacgccaaagagagaggggaaaagcagactcaggaacggacatgctctgtgtggtcacttcttcgagcaggcaacaaggctttcaaaaacctactgtattcatctcagtcagaagccgtgctctaccccgtgtgccatgtgcggaatctgatgctgtggagcgcagtgtaccttccctgcccatccccatctacccccacagatgacagctgtgcaccatacccagtcccaggcactagccctgatgagcccccactgagccggctacccaagactagatcatttgacaatctgaccacaacctgcgaaaacatggtgccgctggccagccggcgcagcagtgaccccagcctgaatgagaagtggcaggagcacgggcgctcgctggagctgagcagctttgccagcgctggggaagaggtgcctgctatggacagcctgcgcaagcccagcaggctgctcggaggtgctgagctttctgtggcagccggagtggctgaagggcagatggagaacattttgcaagaggccaccaaagaggagagtggggtagaagagcctacccacagggggcacactgaggtgccagaggtcaaagaggaggcacccctagcaaaagaaagtagcatggcggccgagggccccgttgtactttaccaagaaccacagctggatgacgctactttaagaagccatcaaggccccagcctctctttgttctcccagggtattcctgaacatcaggatgggcacaatgtcctctctagttcactccaagctcctctcaggggagaggactcccaggaggtccctgtagaacagcctcaagtagagaatattgcagaggacagggagaatgtagctcctgctgtcccagtagatgcaaaagttggccttggtatctcacagtctagttctctgctgccttcccaagtcccattcgagacaagaggaccacacatcaacaactccgtgcacatgttactcgaagataaggtaaagtcagaaagtgggccccagctccatcacagaccttgcccagcaagcagtggtagattcagtggcaaggacatgcttcctgtagcaccagagcccaggtctgctgagaggccccagtgggactctgtgctacacaggacttcatcccctggcaacacccttagcctgctgcaggctccttgtgccttgccgttagataaatgtagacagggaattgtgtgcaacggtgccctagagactgaaaacaaggcctcagaacagcctgcagggtttgacacccttcagaagtaccccacacccaatgggcattgtgccaattgggaggctgggaggagcaaggactcactgagccaccagctgtctgccacaagctgtagctctgctcacttgtactcgaggaacttgcaccacaagtggctgaatagccactcagggaggccatccactaccagcagccctgaccagccttcccgcagccacctggatgacgatggcatgcctgtgtacacggacacaatccaacagcgcctgcgacagatagagtctggtcaccagcaggaagtggagaccttgaagaaacaagtccaggagttgaagagtcgcctggagagccagtacctgaccagctctctgcgcttcaatggagactttggagatgaagtgacttcaatccccgactcggaaagcaatctggatcagaactgtgtgtctcgctgcagcacagagattttctctgaagccagctgggagcaggtggataaacaggacacagagatgactcgttggctacctgaccacctggctgcccactgctatgcctgtgacagtgccttctggctcgccagtaggaagcaccactgcaggaattgtgggaatgtattctgctccagttgttgtaaccagaaggttccggttcctagccagcagctctttgaacccagtcgagtgtgcaagtcttgctatagcagcctccatcctacaagctccagcattgaccttgaactggataagcctattgctgccacttcaaactgaagctcagtgacccggggtggcagaggccatgctgctgttcctttaacaggctcacacacagcctgggcagtccaagaggcccatacattttggaatgggggcatggaacaacctgtacagagattgggatgtaccactggattgtaaattgatttttgtttcatctccccttcccttccatcctcttctttgccttctaaaaagaaaaatatcccagttgtcttaattttttttttaatggaagcccagaggttgccaggctcttataactgctgagccgcttgctgtcagtcattctgtgagatcactcagtgcttccctgtgggaggagccagaatgaaggcctgagacagcaggacagaaagtcagcctcccattggtaaccattcttcacatcacagctatgtcagagttgactggtaaaccttgctgctggggaggctggaagcccttttgagagtacgttcctgagagggatagggccatcccacctcacagacaaaaagcagggtggcgttgggaggaaagcacacagtgagctactccccaggcctcactttgaaacgagaggtatgtgctgcttttgagttaactgaggggctagatgttggcccatgtggatcccaactttaacatgaccaagattgggtagggctctctctgcctccttgggcttctagacagaaaggtacagactggccagaaagcagtatcctcctgcagtggtcaaggcctgcactgagcgaggcacctgggagccccctctgggttccacaagcaatctcttcctcagccaacacagggaaatccagactcagggttccacaagtctcctattccaaagcaaaccaatcatgcatctccccttgagggacagagtccccacagttccaaagctctgcacacaatcagccttcctcttctacttctggggcagcaggaaggacccaggagccccttgtcctgcttctggctgcctgagtgggcacatgtctgactcctgttatctatcagtgaagagcccttgatgattgtagggctctaagaaaatgacatggcctggaggagattcggggtacctttcctcagtgagctttgatgtgctccaaaaagagccttcaaccagtagttatctgtggtggaggtgggtatgggaagggtggagagcagttttggtttgtgctttgaattgttggcatctatgtttgtgaccaccccaccccctaagggtgatgcttagctctgctaagagctgcaaaatggtaagagagcagattatagtgtgggggctgggagaagttgggagacagctcagttctagcctggcctatatccttgccccgcccctctggacgctgttacctggccatgggccttctgtgtctcaggaaggtggcttctgcatgctcctcagtatgaatgcaagaaagcagaagccttccctagtctgctgaagggaaggctgcagtatcagagtattgctcatccctccagaagcaagtcaggcagggccaagcttggtgaaacagggtgacgtgctccatgctctctgtggtctggagttagggtggggaaaggttggtataattgaagattgtgcagttcctagtgacaggtgccaagaggttatgatacgggtttcttgggtctgttgtacagtgtgaataaatgcttgcagctcttagccctttttgatcaatgaagcacttttttattaatattttctttgtatgtaaaggaggaagcgtaactccatagctgtacatagaaccttttctcctaaagaggagtcagcgctcctatagttttcattttttgtcaaagcaagaagtaaatactttagaattgttaaatatatagataaagtgaataaagttgagtgtccgcacggtggca

SEQ ID NO: 1361 - protein, 1186 aa, Mus musculus
MDEEMRHSLECIQANQIFPRKQLIREDENLQVPFLELHGESTEYVGRAEEAIIALSNYRLHIKFKESLVNVPLQLIESVECRDIFQLHLTCKDCKVIRCQFPTFEQCQDWLKRLNNAIRPPGKIEDLFSFAYHAWCMEVYASEKEQHGDLCRPGEHVTSRFKNEVERMGFDMNNAWRISNINEKYKLCGSYPQELIVPAWITDKELESVAGFRSWKRIPAVIYRHQSNGAVIARCGQPEVSWWGWRNADDEHLVQSVARACASDSQSSISKVSTRNSCRDFPNAGDLSDVEFDSSLSNTSGAESLALQPQKLLILDARSYAAAVANRAKGGGCECPEYYPNCEVVFMGMANIHSIRRSFQSLRLLCTQMPDPGNWLSALESTKWLHHLSVLLKSALLVVHAVDRDQRPVLVHCSDGWDRTPQIVAKLLLDPYYRTIEGFQVLVEMEWLDFGHKFADRCGHGEDSDDLNERCPVFLQWLDCVHQLQRQFPCSFEFNEAFLVKLVQHTYSCLFGTFLCNNAKERGEKQTQERTCSVWSLLRAGNKAFKNLKSQSEAVLYPVCHVRNLMLWSAVYLPCPSPSTPTDDSCAPYPVPGTSPDEPPLSRLPKTRSFDNLTTTCENMVPLASRRSSDPSLNEKWQEHGRSLELSSFASAGEEVPAMDSLRKPSRLLGGAELSVAAGVAEGQMENILQEATKEESGVEEPTGHTEVPEVKEEAPLAKESSMAAEGPVVLYQEPQLDDATLRSHQGPSLSLFSQGIPEHQDGHNVLSSSLQAPLRGEDSQEVPVEQPQVENIAEDRENVAPAVPVDAKVGLGISQSSSLLPSQVPFETRGPHINNSVHMLLEDKVKSESGPQLHHRPCPASSGRFSGKDMLPVAPEPRSAERPQWDSVLHRTSSPGNTLSLLQAPCALPLDKCRQGIVCNGALETENKASEQPAGFDTLQKYPTPNGHCANWEAGRSKDSLSHQLSATSCSSAHKRNLHHKWLNSHSGRPSTTSSPDQPSRSHLDDDGMPVYTDTIQQRLRQIESGHQQEVETLKKQVQELKSRLESQYLTSSLRFNGDFGDEVTSIPDSESNLDQNCVSRCSTEIFSEASWEQVDKQDTEMTRWLPDHLAAHCYACDSAFWLASRKHHCRNCGNVFCSSCCNQKVPVPSQQLFEPSRVCKSCSLHPTSSSIDLELDKPIAATSN

SEQ ID NO: 1362 - DNA, 164902 bp, Homo sapiens
tcttccagaaccatcccctacatggctaagcgagttgcttaccctctctggccctcagttcttcattcatgaaatgaggcagcggtgccagggagacacgtttggagctcttgagttgtttccagttgtaattctgtggctccctgatgcagtaatcaaaccaggtgaggctgatcctttaatcaaaggatggttggtagaactaggaggctccaaggagaggatgacattctaccctgtcattatctggatgataaaactgaggtcctaaaggtggggtcagatcaggcagtgagtcagtggctcagctgggtcagtaacccaagcctcttacctcccattgtagcaaagcctccctgacactggactgcagggtacctcttcctagagggatgatggcactcacatctactgagtgccattgtactattgtagttgtgttaactgatttaactcccacactaatccattttccagatgaagatcacccatatagaaagaaatggtaacatcaaaagctcaatcaaacactatttgagtatttcccaatgtccagttatctgggtatcatcctcatgaatttttgacataatttgcttcatacgtttatactaatatttacttcctacttttatttctctctttttaaaatttttttgtattttttggagagaaggtctcactctaacccaggctggagtgctgtggcacactcatagctcatggcagccttgacctcctgggctcaagtggtcctctcactcagccttccaagcagctgggactgcaggcatgtgccaccacatcagctaacttttgtatttttttgtagagacaggggctcaccatgttgtccaggctggtctcaaactcctggcctcaagcaatcctcctgcctcaccctcccaagtagctaggactacaggcatgccacagtgtatggtttcgtctctttgataatagccatttttacaagtgttatgtgatatctcattgtggtttcaatttgcatttccccgatgattagtaatcttcaacagtttttcatatagctgttggctatttgtgtcttcttttgagaaatgcctattcagaacttttgcccattttttcagtaggattatttatttgcttaccattgagttctttatacattttgtatattaacccctagtcagatgtatggtttgctaatatattctcccattcaataggttatcttattactctgttgttttctttgctgggcagaaggtttttagtttgatgtagtcccatttgtctatttttgtttttgttgcctgtgcttttagagtcatatccaaaaaatcatttcccagaccagtgttatgaagcttttatgttttcttctggtagttttaatttcaggtcatatatttaaatctttaatccattttgagttgatttttgtgtatggtgtaagatgaagttctaatttcattcttctgcatgtgaatatagtttttcctagcaccatttattgaagagactgtcttttctccattgtgtagttgtcatctttgttgaaaatcaattgactgtaaatgtctggatttacttgtggcctctctgttctgtttcattggtctgtatgtctgtttttatgccagcaccatgatattttgattaatatagctttgttattttgaaatcaggtagtgtgatacctctggctttgttcttttcattcaagacagatttggctattcagtcttttgtggttcatatgaattttagaactttaaaaaaatttctgtgaaaactgtcattggaattttgataggctagtattgaacctgtagattgctttggataatacagatattttaacaatgtcaattctttcagtccaaaaacaagggatatctttctgttaatttgccttcttcagtttgtttcatcgttgttttatagtttttagtgtacagatcttttacctccttggttaaatttatttctaagtatttttcttttggtagctattgtgaatgggattgttttcttgattccttttttggataattagttgttatgttgttagtatacagaagtgctactaatctttgtgtgctgattttgcatcctggaacttaactgaatttgtttattagttctaatggtttcctggtggagtctttagggttttccatacatatgatcatgttgtccgtaaacagagactatttaacgtcttcccttctgatttggatgccttttatttctttctcttgcctaattgctctggctaggatttcctgtactatgttgaatagaagtggtgagagtaggggtccttatcttattcctgatcttagagaaaaagttttcagctttgtaccattgagtatgatattagctatgggcttgtcatatatggcctttcttatgttgggatacatttctcctatacctaatttgttgggagttttatcatgaaaggatactgaattttgtcaagtgccctttctgtgtctattgagatgatgggatggttttgcccttcactctgttaatgtggtgtatcacatttattgatttgtatattgattgatatttattgatttgaaccatccttgcatcccagggataaatcccacttgatcatggtgaatgatcttgttaatgtgctgttgaatttggtttgctaatagttaaaaaatgacgttatttaaaaaatatcatggtaaatccatgatgtgttaacataaatgacatatttttatgtaaaaaatctatattttctcacacaaaaaatttcatgagaagaatggcattgtttttaacatgtttgcaattttcattaaagtctgacaatggaagaattctgcattctcatatctgcttctgcatttagtctggggcaatttgttttggttaaagtacatgaagaaaatgcagccttatatatttcagttcattgtggatattctttcttgatactacaccaaaggttggcaggtaatagtttcttaaagtttatttgcataaattcatatcaatgaatttttcatactcacactaaaatccattggtctaccttatacttttttttttttttttgagacagtctcactctgtcatccaggttgcagtgcagtggcacgatcttggctcactgcaacctctgcctcctgagttcaagtgattctcctgcctcagcctcccgagtagctgggattacaggcatgcatggccacgcccaataatatcatgcattggtcatatggaaaatattggtttactatgtagtgctttaaaatgttggcacatttcattatatgatataaaatattcattttgctaatatcaccaaccgtctcagcagatgtattgggaaggtatattgggaggctgtcaagctcatggtgggacatttaagttttccaaaattgtaagtaagcttgaattttatcattgacaacaaatactattagctgtcttactagatgtgacaaacctacttcatatatttttgagaaaatgtctgccaaacacccaaatctgagtaactgtagtttgcatgttaaccattctttcaagtaaaaatgatatttccttaaacaagaggctagctcatcttgcaactcaaacaattgcaaaagtgtttttctttgagaccactgtcctacttctgaatagtaaacgtgctttttgtgtgtgggaaataagtgcctaataggtagagggctttattttacagtgatgaaaacgttttggaatgggacagaagtagtggttgcataacattgtgaatgcacaaaatgccactgaattgtccacttaaaatgattaatttcatgttatgtgaatttcacctcaattgaaaaagtgaaaaaagggctttatgtgtaatttccaatccatcacacagaatagtaaaaaggcttgtattcaaatatatagagataataaaatacatattttttgttactgcttcatcaatgattttcttaagtgaaactggcattttgtttactactagggtacgttggtgaagagtacaatggctactagtacatatcatatcactgccttgatttgtgataaagtgccaccagttttactaccactgcttttgcactattagtgcaaatgtcaacacagtaaaaaggcaaacaatttcttagtattattaaaatagtttttatttattttatatttatttatttattttgagatggagtctcactctgtcgcccaggctggagtgtagtagcgcaatttcggctcactgcaacctctgcctcctgggttcaagcgattctcctgcctcagcttcatgagtagctgggattacacacgcccgccaccatgcccagctaatttttgtatttttagtagagatggggcttcactatattggctaggctggtctcaaactcctgacctcaagtgatctgcctgcctcggcctcccaaagtgctgggattacaggtgtgagccaccactcctggcctatgaaaatagttttgacccaactagaaccctgaaaaagtctcaggaccctccagggacctgtggactatgctttgagaatcactgctctaggctcaatcagagttgaaattaccctctcctacagtagggttgcagtgtggtgtttggaaaatcccaggagacattgaatcacagcaacatgattcaactctaatttctgtctgacccgtggcaaattgttcctcaaagtctgaaaaccacagttactcctgtctgctagctggattgggagaccaaggagatgctgaagagattatgggctaattcacgcaaagtgcccactgaaatgagtgacatttagagttaagcagtattacccagtgttgggaagtctgcattttgggaggctgagggacccctgccttccaggggccctgcatgactttaggaagcctccaaccctcaatcagcattttcatctgtcttaggctatttcagagtccctgtgtagctggaataacattttcagctttgaagataggatggggagcaaggctgaaaggacagcaggaggaggaggagacggtcaggcgggtagaggacctcacatgagaaatagggcagcgagatgaagcgaggattggttccctctttccttgagtcagtgcacaaagctggggctttgtcttcagccaaagcacacaaggaacctgtgcactgctttggctttaaatggaatataaaacgttctcaaacccattaccttaaagaaccctaacatgcttcttttttctttttcttttctttctttcttttttttttttgagacagagtctcgctctgttgccaggctggagtgcagtggcgtgatctcggctcactgcaatctccacctcccaggctcaagcgattctcctgcctcagcctccagagtaactgggactacaggcgcgtgccaccacacccgactaatttttgtatttttagtagagacagggtttcatcatgttggccaggatggtctcgatctcctgacctcatgatccacccgcctctgcctcccaaagtgctgggattacaggcgtgagccacggagaccggccaacatgagttaagtaggttagtgattaccaccctagaaggcgatgaggaaactgacgcatagaaaagggaaaagagaagcagatatgaggaggcgacaagattcaaatttaagtctttagacacagaccagctttctattgagtctccttaggcccttcttcttgaggtgagttttcaaggccatgctgcagttttctctttcttatttataaataatttactaaagtctgtcttaaaggtaagcaagtgggcagcagtggtgatgaggtgtagtaatgaagttgacaagcatgaacttggagtcaaatcttctgggttcaaatcctgacctttacactttcttatgtgtaaaatggaggacagtaacaataccttcctatagtgttgttgtaaagattacattacctttaaattttattttattttatttatttctgagacagagtctcgctctgtcacccaggctggagtgcagaggcaccatcttggcttactgcaacctctgcctcccgggttcaagcaattttcctgagtaagcaattttcctccggagtagctgggattacaggcacctgccaccatgcctggctaatttttgtatttttagtagagatggggtttcaccatgttggccaggctggtctcgaactcctgacctcaggtgatctgcccgcctcggcctccccaagtgctgggattacaggtgtgagccaccgtgcccggcctaagattacattagatatacatgtaaagtgctcgtatagcgcccgccacaattgaaaggttcaatccagccagttgcagtggtgaatacctctagacccagtagggaagccgaggcaggagggttgctggagccggggagttggaagctgtagtgtgctgatatctggtcggtgaatagccactcactccaattcatgttagctattatgaaaatgagaaggtgcaaatagtgtgatttcatgggcatagagaaattcctcctatgtcccaaatactggttgaagattcaattgaagattatttagcccagattaaaaggcaaacacgatgacattccgtctaaaaagaggtcaaaattacaagccatctccttcgctctcccatggtgaattggggagctgtgggattggttgagtgtatgctgactgcctattggcagaactctttgccctgtgccttctcattggaagctaggtggcctatgggtgggctgtcctggagtcaggtgctagcttcagtccaatcagaggccaccaacctgtggcagttcgtcctatggcctttccctgagcagatgactggttaagggaatttccctgcgggggggcttaatggctgatgagaaccttggtttatcagacaatgggaaaaacaggttggaaagtcctttttttttttttcttaatttttaaagtttaaggctgggcgttgtggcttacccctgtaatcccagcactttgggaggcggaggcagatggatcgtttgaactcaggggtttgagaccagcctggggaacacggtgagacaccacccccaccccccgtctctatgagaaatacaaaagttagccaggtgtggtggagcacgcctgtagtcccagcttctcaagaggctgaggtgggaggatggctcgagccctgggaggtagaggttgcagtgagcagagatccagccactgcactccagcctggacaacagagtgagaccttgtctgaaaataaaataaaatataaaaataaaaagaggccgggcacggtggctcatgcctgtaatcccagcactttgggaggccgagactggtggatcacctgaggtcgggagttcgagaccagcctgaccaacatggagaaaccccgtccctactaaaaatacaaaaaattagccgggtgtggtggcgtatgcctgtaatcccagctactcgggaggctgaggcaggagagtcggttgaacccgggaggcagaggttgcagtgagccaagttcccgccattaccctccagcctgggcaacaagagtgaaactctgtctcaaaaataaaataaaataaaataaaataaaaaaactttaaatcattcatcaattttagtatttactgtttcttctcccattccattaagcctatagtcagtcatagaacagaaagggaaaatcagggcagccacatataaatacaggtgcaaagttgaggcaggagtggaccctcaagggccaagaagaggtcattgctgagcttcacatttagccctgggctttctggaagccagagtgaaaagagagacacaatcagatgcgtaacagttatcaaaaagcaggaagcacaccggtttttctggtagtaaagcaagggctttccaagcttttaactctaaagtaatttatttcgttctttcttttttctctctctgacacccagattggagtgcagtggcacaatcagggctcactgcaacctctgcctcccaggctcaagccattctcccacctcagcctctcaaatagctgggactacaggcgtgcaccaccacgcctggccagttttttggtattttttgtagagatgggatttcgccatgttgcctaggctggtctcgaactcctgagctcaagcaatccacctgcctcggcctcctaaagtgctgggatttcaggcatgagccactgcgcccggcctaaagtaatttcttacttgagattttatttcaggctactgtgtccatgcactgggcagtacagcctggtgggtaagacagcacagtattttttttttttttttgtctgctgggtttgaattttgttttaatacacgcaatttattctgtgcttcactttcttcatctgtaatatggagataatggcatctacctattaaagttgtgaagattcaattagatgagttgtatgaataaatgttagctgttagtttagtttcgtttttttgagacggagtcttgctctgtcgcccaggctggagtgcggtggcgcagtctcagctcactgcaacctccgcctcccgggttcaagttattctcctgcctcagcctcccaagtagctgggattacaggcgcccgccaccatgcccagctaacttttgtatttttagtagatccggggtttcaccaagttggccaggctggtatcgaacacctgagttcaggtgatccactcaccttggcctcccaaagtgctgggattacaggcgtgagcccccgcgcccagccagctgttagttaatcaagaaattcgactgcctactacttaacctgcacagttctaggtgctggggaaacagtgatgaacaagacaagatccttatcttcaagtagcttttacattttagtggagtaaaatgacagtaaacattgaaaataaatttcagaaagtgctgtggaaaaactttacaacagacgcaggaatagatttcatttgactagttctcccagtttccagaaaagtcaagggtagaatgttaaaaggcaactcagaggaggtgaatctgttagggcctacggtaatgcaatcctggtttgtggaattctgcaggctagtgtgggtaggttacaattttttgggggagttgttttttactttgtttgaaaactcacttcttcccgctgagcttttgattaggagctgaagttgaatcagtttgaaattgtattctggaccggatgcggtggttcatgcctgtaatcccagcgctttgggaggccgaggtgggtggattgcttcagcccaggagtttgagatcagcctggacaaaatggcagaaacctcatctctacaaaaaatacaaaatttagccgggcatgatgttgtgagtctgtagtctcagctactcaggaggctgaggtgtgaggatcgcttgagcccgggaggcagaggttgcagtgagccgagatgccactgcactccagcctgggcgacagagccagactctgtctcaaaaaaaaaaaaaaaaaaaaaaaaagaaaagaaaagaaaagaaattgtattctgaatacaacttctaaaacactatatttacttgcattatattaaactggttttatcctgaccacaattgcaggtggaagataccactattgttctatttttctggtaagtagagtgagccatgtcttgcccagggttacagagcttggaaaagacgcctcctaaaaatctgtaggaccacctttggttttcttccagatttttttttgtcatctcttttcctccacccatttcccatctgtctagccattcttgctccgctgggctttttcgcgagcctctccccagctgcagccccgcccatctcctggggcgtgaccacctgtccaggccccgcccccgtccaaccggcggagacccgccccctttcccggacaccgggctcagcgcccgagcgtgcgcgcgcgtcctcgctcgtcgcccggctcggcgtcgggagcgcgctctgtgtggccgctgccgccatgttgttgtggttgtgagaaggcggcggcggcggcggagtagcagccggacgagacgtcccagcggctcaggcgctgcccagcgccggccctggcagggagcctggtggggtggcggagggggagactgtgccgtggagggcctcgccatgtcctgctgcccggtaagaaccccatccccgtcctccgtctcctcggcgggtgaggaagagctggaggaggggccggcctcggccccggccctggccaggcggctgtcaccctctgaggaggcagcgccctgggagggctggggactgcgtgcggggcccggggaggggcgtccccggcggctgtcgccgccagggggaggcgctgggtgtgggagtgggaatgggagctcggcggccgagctcggcccggaccctagatgcgggggaggcggggtcccgggctcgggctgccttcccagacctggcggggatgggcccgtgcggctctgggtgtgggacgtaccctcggagcgcccggagttattcccacgaactcccgggaggtgggtgtgcgcccttcgccccctgccgggtctgtggcggtccatcgttgccggatactggaggtcaggggccatgggagccccggggcgaacggtgcgggcctgggccttgtggaaaggaggagtgaccgcccgatcgtgcagcagggcatccccctgacctggtagtacttaggtgggtaggatgattgggggcggttggcgtaactgagggaaccctggtcagactgctccgcaaatgattacagtgttatttctccggtagtaattttgcttgatgtatggcatttccggacccataagatgatactgtaggttgtattttggactggaaaacttatgtcaaaattatggggtagattttttggccacattaatagactcccctggaatttgataatctcacttgtgagttttggacatggactgctattacatattgatgttcaaatgtcctttccagacccaggcctaaattcttactgttgtagtatcttgattctgacatctatttttccacaacccaaacaaacaaaacaaaacaaaacaaaacaaaaccccaaaaccatatacttttctagttaaggttcaactttctcatatgtgaatggtaatgccataagaggcctgggttgaattacaggagattattattatttttttcaatgtgaaatgtttgtgatttgtccatggagaggtggtggggaccttcccctttcagattcagggctgttcagtaggacaggagacattgatggcatgcagaaagtcttccctttatagggcctatgacttgggtaggctagaagagcttacagaatgacactttttttttttttttttttttttttttttaagacagaatctctctctcccgcccaggccggagtgcagtagtgcgatctctgctcactgcaacctccgcctgccaggttctagcaatcctcccacctcagcctcccaagtagctgggattacaagtgtgcgccaccacggctggctaatttttgtatttttagtagagacggggatttcaccatgttggccaggctggcctggaactcttgacctcaagtgatccgcttgcgttggccttcgaaagtgttgggattataggcgtgagccactgccgccagccagaatgacactgttttgagtaaacccagtatagtatgtgatattaaattaaatttggaggattctagaattttagattggctgcctatgaatacctcttttggctccaattactccctcattttcaggtgactcagagaacttcaagtgaccagcacagtggtacagccccgcttgtcgttaatgaccagccataaaaaaccctgagtttctcagctcataggccaggttcttcagtggttgtctagtttaaggctggtcattagaaatattatggactacctaaattcctcgaactcatgcaggacctggtgaattaaaatctctgaggatagagcctggggatctgtccttacaaagctccgtgaatgattctggtcagcaaggcatgtgaacttttgctttaggttgggtattccaaagaagtcccattaattatgacttctcagggtgcttttgtttatagatctttaagaatttaagaggtggagaaggggaagcatgagaaacttaaagagatgcaaattgagcatctcttaaaatataatggatttatgtaggggaaacagatttgttgccaaaagttaatttgcaaacaagttattaggaacacacttgataaaattagatgctgattaattggagatatactgtatccagagatatattgaaggatccagaggaaataaacagagaaggagagggagtaagtcggcttctggctcataaaggggtccactgaagatgcttcccaccattatggttgctcctaaaccatctgactcagatttctagtggagggtaggatgggtgtgttagcaatcatttgagacccgggttgtgaaccaggaagggttactatgtattgtgaaaagttcttgagatttgccgcaggccatgaggagtggtaaagtcagtttaaaaatctgctgtagttctagttaacacgttcacaccttcttcagtaaagtggaatgctgttaccaaaggaagtattcgtgttttagaggggggtgtggtgaaggttcttacaagtttggaagaggtggaagaaaatgttgttacaattgtgtagagtagtgaagggctttggtaaatatcctgtcaaatcatagagtagtatttttagagttgcacccagctgtccattagaagagccagaggccttgtctgttttgttccctggtgtccccagtatccagcgcagttatccgcatattctgtgccctcagatattttttaattaagtgaatactattgatatgggaaaaagaacagttatggtggtttatagcagtgttagttattaaaagctacctgatattttgcaatggattaaagagccaatttttgatcaaatagggctctgggtaggaaagaaaatgaaaatgaagagccagctttcagtgcttattgtttggaatttttgagattcctttaagaaattgttttctaaagactgtcatgaacattatcgagtcccctagtttttgagtcttaatgaatcttaagtgtttcagatgttagttacttttttaagagcacagtaagtgcaaaggtagtatagaatagtgggaagttctggattgacagacatatattctgattccatctgtgtcatttattgctgttgggaatgtcacttaacttctctgggcgtcagttttctcatatatacaattaagggcctatagtctttgacctcaagtagtttctctagcctgattctgcaaatttttaatcatttctaattatgttatttggtattcatctcatataggtagatgaacttttattatttaaaagaaacaagattctgtgttgggttctgcttttagcttatggattttagacattgtccaaaagtgcttccgatgttgaatgtatgttgcaagtgttatgtagaaagaacatgcttatgctgttgtaattggcttagtgttgaaatcaaattgggttttacattgggaacttcataatttagtgtgaagtcatgagacttgagaatggtttggggggagtttgtgcaatttatatagctagctgtttcttaccacctaattctgtaattttctatgatgaatatatagataaatttataatcagtgtaacattgatttaagttataagatgatatcagattcatactggattgaactagaactcccagtaactttagaggctaccaaattattaacatgtcattgctatttttaatcttaattttgtgatatcaatactgatatgctttcatctttgcttttgtatctagaaacaatataccttttaagttcatatttgtatcagatattaaaaatgaaaattgtagcatgaaagtgggtagatagtaaatcttgggttcaagcctgggttgttattcttcattacccatgttgtttctggcaagctacataacccccctgagctccagttccctcattagtgaaaggaagaagagcaacttttctacttttctaacagactgtggatcaaacaatagtgtatatgaaaagcattctaaaaatgtaaggggctggtattagaatcgtattgtattagaatcctattttatgtctttgaagaattggcttgtggagcagtggtaaacctagtctgtattgtcaagtgcagaatttaccaatatcactgatatggcaacagagaaggtttctgcttctgtactctggctggagaaacctttcagcacatgtatcctgtctgccagtcggaatagtcacaatgttgcagggacttcagaggaacctgggatgtctcacatttatgccaaggtctctacttggaatagacttggctagatttcacccattttcttatgttggagcagtggtagaaggtggtaggagcaaggagttcagcacattctgtgtaaagttctaaggctgtgtttttaagtagcaggtggcagtgtcatagggtaatgaaatcaatgtacttatttaaaaaagcattttcagaaagagaatatatcagtacattgcataaagtaaaagtaaatatagacacagaggtattgtcttgatgctgatagctgcagatattcagaatgattctgttacaacagatggtagcaagcttttctgatttcacttatctggggtctaaatctaatttctttagtagttaatactgttttgttttgtttttttttttggacacagaatcttgctctgtttgcccaggctagagtgcagtggcacgatctcggctcactgtaacctctgcctcccgggttcaagatttgggaaacttttgtttctttttaaaagatatttttatgtatgtatacttggttgccgtgtaaaatgtattttttctttttaaaaattataattttcattttttgtagagacagggttttgctacgttgcccaggctggtcttgaactcctgggctcaaaggtagtcctcctgctttggcctcccaaagtgctgggattgtagacatgagccactgtgcctggcctaaaaggttgtttttttcttttgggttgtgataaaactttgtcgtcgttgtttggggacatagtacttgggcaatgtggatagaatgactgtctataaaatagtaaggcatgaaactaacgaaaacaaaaagaaaattgtgaaggtgggttaccttaaagctattctgttagtggtgaaatacctcatagctatgttctgaactgttgatttaatgaacaaagcacatgaacttatgctgtaataatattcttaagtactcttttcccttaacatggagtatggagtactttaaccacagaggtattgtcttgatgctgataactacggatattcagaatgattctgttatgacagatgatagcaagcttttctgatttcacttacctggggtcgaaatctaatttctttattagttaatacttttttttttttttttttttttttgagacagagtctcgctctgttgcccaggctggagtgcagtggcgcgatctcggctcactgtaacctccgcctcctgggttcaagtgattctccctgcctcagcctccccaagtcgttaatacttttataacttagttgcagaagagaaatataaatttatttagttttcagaattattcatagatttataatctggcaaaatataaggaaattataagtatattgataaatcatgacataactggcaagaattggtataaagacaagatggttataacttgaaatagggttgttatttattctatgcctatcatttttccatgagataaaccaaatatttaattgtttagactgattccacaaatgacatgggaaggcagagtgtttataaagagttttggaagtgatataggacactataatttggagttttaacttaatcttattttaaatttcaaaatgaaattatttctggttatgaaagctacggaacttttttttttttttttttttttagatggcgtctcgctctgtcactcaggctggaatgcagtggtgtgatctcagctcactgcaacctcagcctcctggttctagcaattctgctgccttagcctcctgagtagttgggattacaggtacctgccaccacgcctggctaatttttgtatttttagtagagacagggtttcaccatgttggccaggctggttttgaactcctgacctcaggtgatccgcctgccttcgcctcccaaagtggtgggattacaggcgtgagccactgcacctggcccagaacagttttagtgttttttaaaaaaaaaagtagagatgacctgtaatcccatctggatgtaatgtttggtatttttgttttttttcttatacatatctattgaaataattttaaaaagaacaactttccctgtaaaattgatattcccttaatgagcatttagtgtttataatatggatgcatcatagtttatagcagttctgtgttattaatggatattgtcaatttttctcttaaagcagtactgtgatgaactcgtttggacattgaattgcattgaattgttctattattttattatttccttaggataaattcttttttttttttttttttgagacagagtctcactttgtcgcccaggctggagtgcggtggtgcgatctaggctcactgcagcctctgcctcccgggttcaagcgattctcctgcctcagcctcctgagtagctgggcgtacaggcgcatgccaccacgcccggctaattttttgtatttttagtagagacagggtttcaccatgttgaccaggatggcctcgatctcctgacctcatgatccacctgcctccgcctcccaaagtgctgggattacaggcctgagccactgcacctggcccaggataaattcttaaaagtgggtttattacctgggcgtggtggctcatgcatgtaatcccagcactttgggaggccaaggcgggtggatcacctgaggtcagcagttcaagaccaggctggccaacatggtaaaaccccgtctctactaaaaatacaaaaatcagtcgggtgtggtggcgggcctctgtaattccagctacttggaaggctgaggcacagagaatcacttgaacccaggaggcagaggttgcagtgagccgagattaagctgctgcactctagcctgggccacagagtgagactcagtctcaaaagaaaaaaaaaagtgggattattaggtcaaacggtacgtgtgttttaaatttagatatactcaagatgccctttagataggatgtctatttcaaattcccatcaacagtgtattagtattcaattccatatattcttgctagtgatttgtcatctttagcttgttgggagtttaaagtagtttgaaacagttttctgtttctttttcagcatcaggacttacttccatagcttaactcttcggagggagctgataaaaatgaaagatcagtgacaagggagtggtgtagaccagtggtcttcaaactttttggttgcttaccccatcactaaaaaattttgagcattaagcaggtgcggtacatggttctgtggtcccatctacttagttggctgaggcaggagaatgtttgaggccaggagttcaaggctaaagttcactgtgattgtgcttatgaatatagccgctgtactctagcctggacaacatagcgagaccatctctttagaaaaaaaaaaaagatgagatgggaagaatgaagtcagaaaaaaaaaattgataggacttcgtgttgttgctttgagaaaagagaaaaagaaaaaaattgagcatcaattcttaatccttagatatttgatttacaaataatatatgtatagtaactgattattgtggactttataaaatacgaacaaaaaatcaacaaggatgataattaaaaataaagttcagatattttccttttttaccctggggtgtcttggttactcctggaggtatgcgtgtgcgtgtgtgtatgtatgtatgtgtgtgtgtgtatatatttaatatatatgtgtatacattgtatatgtgtatacataatatataatatatatgtgtatatataacatatatatatgtgtatgtataatatgtatatattttttagacaagagtctttttctgttaccgaggctggtgtgcagtggtgcgatcttggctcactgcaacctctgcctcctgggttgaagtgattcttgcgcctcagccacttgagtagttgggattacaggtgtgtgccaccatgcctggctaatttttgtattttttactagagacgggattttgccatgttggccaggctgatctggaactcctggcttcaagtgaattgcctgccttggcctcccaaagtgctggtattacaggtgtgagccaccgtgcatatgttatacttgctttggatactactgctttagactcttaaggtttaatattgagcatttatagatgcttgtttttgggcatttcactagttttgctggtccagtttagttggatcatgaatacctttaaaatgtcccatgctaggctgggcgcggtggctcaggcctgtaatcctagcactttgggaggccaaggcagacggatcatgaggtcaggagatcgagaccatcctggctaacaccgtgaaacccgcctctactaaaaatacaaaaaattagcccagcgtggtggcacgcgcctgtagttccagctacttgggaggctgaggaaggataatctcttgaacccaggaggcggaggttgcagtgagctgagattgtgccactgcactgcagcctgggtgacagagcgagactccatctcaaaaaaaaaaaaatgtcccatgctcttgagagtcgtatctgcaataagggtaaaaataaatttaaaacatcagttcaatactttttgcattgttgaggtggctgaatttgaaaaggacaaatagtaggataagaagcaatgtaagtactctatttcttctagatatgaagaattaatattttgtagaacatattttaaaaaattatgttttttggaaagccgtttggctgtaatatgtatctccctgttttttaagagttaggtcctagagactgagtgaaggtatgaataattgctacttgctctcctttgctttcaaagtaccacaattaacctgtcactaactctgtttggattagcctgagcctataacaaactttccatgatgattcttagattaaaagataatttttttcttgagttagaataagttgcttttgatctgtggctgcctgccccccaacccctataaattatgacatcaggaaacaaggctttttgtattagaaaaaaatggggaaattaatttcagttatttcatgtgggtcattggcagagaaagataatactaaaatcttagagactgtgaaaagagattatattaagcaacttgagtgattacttttttgccagttaaaagaaatgagataatttatattgaagatgattgctatatacagtgctttgcacaaaaggccacatatctctttttaccttaggtaacatgatgtataagctactttcacatatatcttcttaggtcatcacaaggatttgagatcatcatttaatcaggactgttgtgacttgcttgagaccacatgcctagtgtttgacatcatatttcaagaggtagactgaaagttctgcagaaatagggactggtggctgttctctcccttactccctagcagttaatacattgcctggtacagagtaagctgtcaatatttgtggactatttaaactcctgcatatttatttacacatgtaaataagttatagcattgtaaaaccaacaggtatattttccgtagtgagattgttccttcatcttatgtgcacagaaaatattttcgtggaagaggtcttgaattttagatcaacctttcacatatccctttactttctcttaagatactttcatggtgacaaaaaaaatactcttaatgtcattcctttcactgtgtgtgtaactcctgtggcaagactgtatatttgtatgtatgtatttgtttatttagtaggctgctatttataaaggaaacatactcattagttggtctttgcgtacataatggttcccaaaacatggactccatggtttgctgtgagtgaatgaaaaagagcaggtatgattcccctcacctttgtcattctctccagtttcttgtacatatggttgacttactcagcagtaagtgtaactttacaatgaagaaaattagtcttccaaagaactagtatgctacttcccgcttgttctgcagtatttaaaatcctgtttggtaaatgaactaagacacttatatatagaagagaccctggatggccatgaatggaaatattagtagtgattaatttctgtcttggtgggataatgtggcttttttgcttcttattcttttagagtttcccatttttctacaacgagcatgtattacttttatacgtaggaaaaactgctattttattttattttttattttttaagacggagtctcactctgtcacccaggctggagtgcagtggcgtgatctcagctcactgcaacctccacctcttgggttcaagccattctcgtgtctcagcctcccaagtagctgagactacaggcagaagccaccacagccagctgattttttgtattttttagagatgggatttcgccatgttggccaggctggtcttgaactcctgaccgcaggtgacccgcccatcttgaccttccaaagtgctgggattacaggtgtgagccaccacgctcagccaaaaactgctattttaaagtctttatttttcactggatgtcttctgaaggtttatgtcgcactcaccattgagaaagtgggtggttaactggctccagttcctaagaggagtggcagcggtaggaagtagtatgggaggagtggggcaggtaagctgatttgaactttatcattgtgaactccactatgactaaagacattctgggatttgatcacaattaaacccaagaggactgagccatctagtttttttcttcttaataagctgattgagaattataaaagacaccttaagaaaaatcagtttctatgcactctgtaaacacagaactcagcccgaactcccaagttctgtatccgtgtgtgtgtgtgtgtgtgtgtgtgtgtgtgtgttgtggtatgttttaaatatcaaatggagttgtggcaactcagatgggatatggtttatattaatacatctaatatgaattggaagatgcttaggcaaacgatttttattatgacagtataggcttattggagttttggtgttaatatacagctgggagttgagccgttctaagtttatatagccatctggtgatattttaggaagagctgtgtcacatatcctctagagtttaagtgattagagcttgttggcttttgctgttagtttactgcacacttgtagtgttttaaatgcttctgtgaatggataacataattcaaaaaggttagatttctgggttaagacatttgttattatcggcccttactttattcttttaaagagtaagattaggctggatgcagtggctcgtgcctataataccagcactttgggaggccaaggtgggcaggtgaggtcaggagtttgagaccagcctggccaacatggcaaaaccccatctctactaaaaatacaaaaattaacggggcgcggtggtgggcatctgtaatcccagctactcaggaggctgaggcaggagaatcacttgaacctgggaggtggaggttgcagtgagctgagatcgtgccactgcactccagcctggttgacagagggagactccatctcaaaaaaaaaagttgaagagcagttgaaataataaatgtaggtactgttaggtgggtgcaaaattaattgtggttttggattgtgaattttaaatcattgtaactaggcccaaacagatcttcatttatcaaaataggaactgttacaatcaacacatttttaccgatgagaaataagtttgtttatacctgtagtataaaaatccatgctttgagattcgatgaactcttggaaagcattttctgcatactgctggttgtggaagcattttccctgcaaaaaattttctagatgtttggaaaagtggtagtcggttggcgagtggttagttgaatatggtggatgaggcaaaacttcgtagcccaattcaacttttgaaatgttggttgtgcaacgtgttgtcgggtggttgtggagaagaattggaccctttctgtggaccagtgctggctgcaggcattgcagttttcagtgcatctcatcgatttgctgagcatacttctcagatgtattggttttactgggattcagaaagctgtagtggatcagaccaggagcagaccgccaaacagtgaccatgaccactttttggtgcaagttcggctttgggaagtgctttggagtgtcttctcggtccagccacttagctggtcatcactgttgttgtataaaatccactttttgtcgcacatcacaatccaaccaagaaatggttcgtcgtcgttacgtagaataagagaagacaacatttcaaatcgacaatttttaaaattttcggtcagctcatgaggcacccacttatcaagctttttcaccttttggctgggcgtggtagcccacgcctgtattcccagcactttgggaggcggaggtgggcagatcacttgaggccaggagttcaagaccagcctggccaacgtggtgaaaccccatgtctactaaaaatacaaaaattagttgggcatggtggcgggcatgtgtaatcccagcaactagggaggctgaggcacgagaatcgcttgaacacaggaagtagaggttgcagtgagcccagatcacaccactgcactccagcctaggtgatagagtgagactccatctcaaaaacaaacaaacaaaaaaaactttttcacctttccagttggcttcaattgcctgccaaacaagggtagaatggtcgacattgagttcttcggcaatttctcgtgtagttgtaagaggatcagcttcgatgattgctctcagttggtcattgccaacttctggccggccactacactcctcatcttcaaggctctcgtctcctttgcaacacttcttgaaccaccactgcacagtttctgggccagatgtgtagttgatgttgtgagttgtctccactgcttcacgacccattttgaactcaagaaaatcacttgaatttgctttttgtctaacataatttccatagtctaaaaaaaaagcaaaaaatacgttattagcaagaaaaggcaagaaatgtgcattaaaatgatgtataacataaccgtttatttaagagtgtattccagtattaaatggcaaatttcaacagtgcaaaaactgcaattacatttgcaccaaactaataatataatttttttttagttaaaaattttatagtacagaataacaggcttgtctcacacacacacacacacacacacacacacacacacacacacacacacatacacacacacaaatcccatatagaatctacaaagcctgtctgtctctgaattccacaaccttggcttatttttttaaagtaaaatttaaatatttaaaaaatttagaaaaatatggagaataagttaacaaacaccatgtactaattcagtagattttttttctttttctttttcttttttttcttttttttttgagttggagtctcgctctgtcgccaggctggagtgcagtggtggaattggctcactgtaacctctgcctcctgggttcaagcgattctctacctcagcttcccgagtagctgggactacaggtgcacgccaccatgcccagctaatttttgtatttttagtagagacagggtttcaccatgttggccaggatggtcttgatctcttgaccttgtgattggcctgccttggcctcccaaagtgctgggattacaggcgtaagccaccatgtccagcccattcagtagatttaatagatgctgacatcttgtcagatttgcttcaaaggtgtatttaagtatgtttttatttatttatttatttatttatttttgagacgggctctcactctgttgcccatactgatgtgcagtggcgcaatctctgctcactgcaccctccatctcccaggttcaagtgattcttgtgcctcggccttttgagtagctgggattacaggagctcgtcaccatgcccggctaattttcttatttttagtagagacagggtttcactatgttggccaggctggttttgaactggcctcaagtgatctgcccatcttggccccccaaagggctgggattacaggggtgagccactgtgcctggcctgtatttgcttttaaaaattaaaatatgcatacggttggagtcccttttgtcatcctcttagatcgtattttcgtatgcagaagttatttatctttttagctcatgcacttatattcttcctacaaatatctatatatattttatgtagtattgggtttcaaatttatgtgatattttagtacatactttctataatttgaaaaatgacatgttgatatatgtgtattattattattattttttgaaacacaatcttgctctgtcacccaggctgtagtacagaggcacaatcttggctcactgcaacttccgtctcccaggttcaagtgattctcgagcctcagcctctcgagtagctgggattacaagtgtgagccactgcacttgccttacttcattaattttaatagctgtatagtattcagtcatatgagtgaatagtacacaattttagtcctttattgatagttgttttcaacaaatatacaaaggtaaactttttcctcaaattgggtcaagctatatatattgttctaaattagctctttttctcccaataataatagtgtgcaggtttgttacatgggtatattgcatgaggtttggggtacaattgatcacatcacccaggtggtaagcatagcacccactagatagttataagttttttgagacagggtaggtctctgtccctcaggctggagtgcaatgttgcgatcactggtcacggcagttttgaccgctcgggctcagtccatcctcccagcttagcctcctgggtagccgagactacagtgttgggccaccattccctgctaatttttgtattttttgtagagactgggttttgtcctgttacccaggctgcctcgaactcctggactcaagcagtccacccacctcagcctcccaaagtgctggtattataggcgtgagccaccgtacccagctcctagtaggtagttttgaaccttcacgccttcccatcctctcctctctgttagttccctgaatcccatgtttacttccatgtttacccaatgtttagtttagaatgatgatctccagctgcatcatgttgctgcaaaggacatgattttattcttttttatggctgcagcgaacctttgggtaaagaaaatttacaaaaatttctcacatctttttttttttttttaatgaaagtaagtagtagtaatccatagttcagatctactttataagtgagtcactgataaagacagtagttacacattttataacattaccttgatgggacaaatttttcttgttttgtttttgttttacttgagttaatttggatgagactttcttgaattacttacatttatagcatttacctccagtggggttgagatgaggagccttcaatccaacaaagttgtatacatgcattcatggagatgacacttaggctatttaatcaggaaacactcatacttgtccacatgtagatagtcctattctttggaaattttgctatgttgcccctgctggtcttgaactcctgagctccagtgatcctcccaccttggcctcccagagtgctgggattatagacgtgagccattgtgcccagccagaaatatgattttaattccatagtatatagtatatgttattgtgagtagaatatgtttattctgtaagtagcaaattgactccttcaacagttttaatagttttctagttgttttgtctttagtttcccaggcaaataatgctgttgtcttcaatcacagtattgattagttcatcccattcttcatattgatcattgtttttggatattaaataatagtactgtaataattaagaaagatggaaagcctcaccaatttgcatgtcattcttgtgcagggaccacgctaatcttctctgtattgttccaattttagtatatgtgctgctgaagcgagcactccatttctgtaaagcttaaaaaatggacaaaactaacagatgggaatggaaatcagaataatggttatctttggtggtgaggacaggggagattgtaggtatgctgctaatgttctgtgtcttgatctggatcttgatttcatggttgtgttcagtttatgagaatcatcgagtagtagacttaggaaaggtgcacttctttgtatgtatattatacctcagttaaaaacttttgcctcgcaaaattttaaagaacgtaatctgctgagttcgtcgtcttttagcttttgatgtaacttttccactacttctcttcatatgtgaatacacttaatgataagccatttaacctttttattatgatataaaacaaacatacagaagagtgcacaaatcaaatgtatagcttaatgaaattttaaaattattaaattggaggttttttggggtacattatacctgtgtctttgttaggagggaaggagttgatggagggctaaaaattctggagaggacaaagttttaaggaatctcagaacaccaaaacctcatcttggctctgccttcacattattgtttctttgggtaagtcatttaacttatttagacttcacttttttttgtataagtggtataatacttaacgtttcttttgcaaactgaattaggtaggtgaaattcacgtaaaataataggaatatagagtactgttgctaaataggtctttatttaggccattgaatttaggccacttaccttacagagcagaattgtgggatacaaagactacacagctggtgattattgatatcattcatttatattaggttagtattgaggcttagttaactatgccaggcactaccctgtgatttattataatacatgtattaactcatttaatagtctaggattattcccagaggtaggtaaaattatcccaattttactgatgagacaattgaggcaaaattaagttaaataatttgcctaggtgggttgagttcttgagcctgtgctttaaaaaaaattttttttgagaaagggtctcactctgtcacccagggtggagtgagtggcgtgatcttggctcactgcagcctctgccttcaaggctcaagtcatactcctgcctcatccccctaagtagctgggactacaggtgtgtgccaccacacctggctaatttttttgtgtattttatagagatggggttttgccactggactcaagtggtttgccttggcctcccaaaatgctgggattacaggtgtgagccactgcgtccggcctaagcctgtgctctttttttgttatactgcctagttatgtgaaaatacgtaaagacttttaggcaaatgttaagattttataataatctgttagagagtttttgaagtaaaaattttggtattttgaaccaaaattaggagaagagtctcatttgttttgaccatgatgattctggaaaagattgatgttaatatttattacttgggctttattcccttaattttctcctaaaatgactaggatgtaagcactaggtagttttctttaagaatatatatatatattttaatattaaaggattttgtgactaatttacaaatattgtttaatttttaggcgaaatgttaatggaagggagttttcaaacttggaggcagatgagaccaaagtttagtgttcttgcttcggtggtttaagcagcatctatttggtcttggtattagagcaataattaagactctatcatatgtatggttgaaaattatttttattaaggtatgtttgagtatggttctgtgaggttgggaaacacatgtagttttgcaagcaccatgatcaagatacagagtagttcctcaaaaaatttcctcatgaccctttctatagtcagcccatttcctcacctctagtctctggcaaccactgatctgttttttctctgttgtattgtctttttttcagaatttccatgtaaacaaaatcatgcagtatttagcctttttgttttaatttttgtttgtttgatagaaatgggaggtcttgttatattgcctatgctggccgcaagctcctggtctcaagggatcctcctgcttgactcagtatgtgacttcttgagactgacatcttttatttaacctaatgtattttgagattcatccatgtttttatgtatcagtaattactttctgttgtttaggagcattccattgtatggatgtacaacaacttgtgtgttcattccccagttcatttgggttgtttccagtttttggtaattacaaataaaagtgccataaaagcattgatgcatgcatacatacacatgtgcccatgtattttttttatggtttaaaaaaatatggtgcctagaacttttataactttattagagaacctgaaaaagctggtgattttcacagaacattataaattgcttggtaaactaccctaaaaaagcccactctggaatgagaagaatctgtttgtataaataatcttataatataaactgtaagtcattagaatttttttaaattaaagaagtacacacacatacttgttaaatgggtaaatttatatataaaactccttagtgcataatttcatattttatgtttttagtagcttttaaattgtcaatcattgacttttttgttcctctaagtagtagaatggttatataattggttatgaaagtttttttttttttttttttgagacggagtctcgctctgtcgcccaggctggagtgcagtggcgcgatctcctgtctcagcctcctgagtacctgggactacaggcgcccaccaccacgcctggctaatttttttgtatttttagtagagatggggtttcacgatattggccaggctggtcttgaactcctgaccttgtgatccgcctgtcttggcctcccaaagtgctgggattacaggcgtgagtcaccgtgcctggctggttatgaaagtttataagtaaaaaataactgggaaaaattttagcactacagaattcctttttcttctcctctcctcccctctcctcccccaagatggctggaggtattaatattgataagcagagtttcatgtgaataagacataaaacttaggttgattacctatgttaataaattatcttctttgttcctatgtagtgagctttctttttgcagcaatctgaggccaagagaaatagatgagacctttttaccttagaaaagagattgcaggctggatgtggtggctcacgcctggaatcctagcactttgggaggccgaggagggcagatcacttgaggtcaggagttcgaggccaccgcctaggcaacatggtgaaatcttgtctctactaaaaacacaaaaattatctgggcgtaatggcatgtgccttgtaatcccagctacttggagggtgaggcatgagaatcacttgaacccaggaggcggaggctgtagtgagccaagattgtgccagtccactccagcttgggtgacagaatgagactccatctcaaaaaaataaaataaaaataaaaaagaaaagagtttgcaggccatttttgcaagttaattttttgaggttccagttccaaccctgagtcagactacagaggccataggtggtttgacgtttcagagaatagcagtgtttttgattttctttttttctttttctttctttttttttttttttttttgagacagggtcttactgtcatccaggctggagtgcagtggtgcagtcatggctcactgcagcctcaacctcctgggctcaggtgatcctcccaacttagcctcccgggtgctgggactgtaggaacatgccaacatgcctggctaatttttgtggttttttttgcatgtacgtagagatggggttgcgtcatgttgcccatcttgaattcctgggctcgagagatccgcctgcctcagcctcccaatgtgctgggatcacaggtgtgagccaccttgcccagccatttcttttgtgtagtatggaatcttagtttaagccctcagtttaaatgtattatataattgaggtgctaggtgtacagaggtactagaactacagagcttttctcattaatgtatgttccttctgatgttgaatatttagaaaactgaatattgtgtttggagccaagggatattacacttgaaatatggtcatttggtgaacaggtatctcatttgtaggctatcattatttttggtgaacaggtatctcatatgtaggctatcattaattttggcagtttcacattaaaatacctgcctggaaatacctgcccagttttgccagtaatgggaattgcaggttaaccgttggtcttctatatgtggctctatgatgtggacaagacttatagctctttactttaactgagacaacaatgttggtgatccaagtctagaattccaggatagggttgccaaaattaacaccgtgggagtatggaggtagcaactgtgggattagtaatacaaatacaattttaattagctttatcagttgcacacttaatcttcattgctaccttgtgaagtaggcacggcaggctgtatattgttacttctactttacaagtaagtaaattgtgtttcatagctgtcaggacttacctgaggttgcactgctagtgagtagctgaaatagtacttgagtccagacatcaggttggatgctgtttccacttttgcagttcactgtcgtgaataagagctcaggcttgggtttgaattgtggttctaccacttacctgtctgtgatcttggggaagttctttaacttctctgagtctcaggtttaaaatggggctaacaataatacctcttagggctcttgtgagatttcagcaagtgcttataatattagataaccaatagtaagcactcagtatttgctaattgtggttgtttctactgttattaaagtgataacaacactacagttacacatcctctttcccctaaggatctgtgttaagagttgaaagacaataaatgtaagaagcaaaaatattcaaagatgatagaataagtagcaaggggagttgattttagcaggaagatggacaatgttcagaggggtatgtgtgtgtgttgtgtgtgtgtgtcttggttttaaacatggtagcagttagacaatgaagttacaagtgtgttagacagttggagctttaggacagggttgagtaggaggaccagtgttggaggaaaactttttaatcaccatcacagatggcatatggaaatttacatttctaccaagatttaaacataccaatttgctatcctctgttatggttcttagagctattgttacatcagaatggagtaagaagcttatcatacatttttcatttttagtggttatacagagaacaatacagaaagtcagcatatatcctactacagtttatccttggtatacttgggggatgggttccaggacccccacatacaccaacatctgggcatacttaagtcccccagatgcccctgtggaacctgcctatatgaaaagctagcccttggcctgctgtatatataggtttcacatcccgagaatactttttccatccacatttggttaaaagaaatccgcacatgagtggacctgtgcagttcaaacccctgttgttcgaaggacaactgtgtaaataaaagggtggtccctctccttaaaatttcatagttgatacttgtatcatagttgatatatagtagttgatactatgaaaatttcatagttgataaagtttcatagttgagcccttttaccatgtgtgtaagtcttaagggctagggaattcagaagtataagttacagggttgtatcttttggtgcttgagtcctttcctttggataaggtacttccttgatgtaaggtaatgttctttcaagcattttaaattaaatgaagttgtttgaatttacttgttggggaatatcttgcctttaatataatagctgctatgtggaattatgtattttatgtattcggtgtttttgaacttgcatcttttattactgtatttttacagctttccccatttttgatattaaaacaattttatggggttttggtgcatattttaaatttgtgcactaaacacttgcaaaagcatattttaaattatggcaagtttcctaaacctgttaaccttttatatattagctgttacatattaacttttttcaaagtcattatatatccttctactgacaaatgtcaaacaagttctgagcatctgaaagtctagattcatccagagtttgctcaggatggcattttttttgtttttcttttgaggtggggttctcattgtgttttctacgctggcctttaactccttggatcaagcagtcctcctgtgtcagcctgccaggtaaccgggactaggtgtgtaccactgtgccaggcttgttttcaaagttcataggaaaaactttggtgtcttctaaagagaccagtactgtacacaaatatatttgtctcacatttatccatccatccgtctgtctgtctgtctgtctgtctgtctgtctgtctgtctgtctatctatctatctatctatctatctatctatctatctatctatctgtctatctatctatctatgacggagtcttgctttgttgcccaggctggagtgcagtggtgcgatcttggctcactgcaatctcctcccgggttcaagcaattctcctgcctcagcctccctagtagctgggattacaggcgtgtgccaccatacctggctaattttttttttttgtatttttaatagagacggagtttcaccatgttggccaggctggtctccaactcctgacctcaagtgttccatctccctcggcctcccgaagtgctgggattatagggatgaaccaccgtgcctggcctgtctcactttttataccccgaaagcattattactatccattactttattcagagctaggagctttttcattcctgtactgtggaactacttgagttgccctatatctactccccctttccccattctgaacattgtttcaccttataaaaattaaaaatttggctggtgtggtggctcatgcctgtatcccagcactttgggagacagaggcagatggatcacttgaggccaggagttcgagaccagcctggccaacatggtgaaaccccgtctctactaaaaacacaaaaattagccgggcatggtggcgtgcatctgtaatcccagctactcgggaggccgaggcaggagaattgcttaaaccaggagacggaggttgcagtgagctgagattgcgccactgcactccagcccaggtgacagagtgagactcggtctcaaacaaacaaaatccaaaaacatcctaaaaattacaaaatttggccaggcgtgatgggtcacacctgtaatcccagcactttgggaggccaaggcgggtggatcacgaggtcaggagatcgagaccatcctggctaacagaatgaaaccccgtccctactaaaaaaatacaaaaaattagccgggcgtcgtcgtgggcgcctgtagtcccagctacttgggaggctgaggcaggagaatggtgtgaacccgggaggcagagcttgcagtgagccgagatagcaccactgcactccagctgggtgacagagcaagactctgtcttaaaaaaaaaaattacaaacttttttattgatgggttcctctaaaacccattactaaagctacttactaaagagtagatgttttcccccttcaccgatagttgatggaccgtcagagaatccttgagtatctcaagcttttacttaacttcagagttcttacctgagacagaaaagttgagttttctttcctcaagggcataaaaaattttaaatgtacccatttgcataaaatctactcaaagaaaattatcaagtgattttacaggatatttttggatgcttgcacataagagaatcttttaacaaaactgcttaacctcctttgtattattcattccctctcttactaaaacaagtgaatggcttgcttggatgtgtatctgtatctttttttttgatacacactttgaaggagtcttctgaaatgcagtgttttggccaccattccagctctacaggaatatggtttcatgataaagccaacaaagagcacactggcagcagtccagcagctgactcaccaaggagtaatgatagacactttgaaaggagtgacctgtctcaggatctcacatttcaaagcttcgtgctatgattacattggtagaaggcagccaagaaatctagatgagatcttgcttgtacctcctaagagtaatggtatataggtaggaaggacttccacagtcggatgcaagtaagattttttttcctaacaaccttgtaaaacctgggggtgggaaacaagttgaggattcagaatgggagtaaccgtggtggaagctttccttctacggacctggatgagaacagccttatagtgactgagggtaactcaagaagctcaatgccatattagttttctagagctaagggaatatacatagtttagtagtaagcacaagtatcgtgttcatgtcagacactgtagctactgcttcctactagaacagaccagaagaaaccaaagcaagaccagaatcatttcagttttgaggaacagaccctttccttactagcattgcacactttaggagtaaaaatagaatgaaagtggatttgcttcagtactctgaaatagttaactgttgattgttttggtggattagagtgattgcagctctgtttctaaattgaatttcatggctatacgttgttctaggtggcaaattaatcttttatcagtaccacaaattgattgttggccctttgcggaaatagcaggaatatgtctttttcattttgttgaagggtagctcagagataaaacatttacataatctgaaaatatttttcagagataagactaagtgactgtgtataccacagtgatagattgatccactttgattattgtagaactttctatttctcagtaaaaagtgctaaacatggtaaaattatgaaggattgcttttagctatttgctgtattctttaaagcatatttaggaataaaaagttaatttccaaagtgctgtcatttatttaatacatgttttctccagaatgtgcttcccaaaagttaagagtgcttttatttatttaagaaatatgttaatttttcttttcttttcttttctttttttttttttttgagacaaattctcactctgttgcccaggctggagtgcagtggcacagtctactgcagcctcgaccttccaggctcccacgaccttcccaggcccaagccatcctcccaatttagcctccaccatgctcagctgagtttttatttcttgtagagactgagtattgccgtattgcccagactagtctcaaactcctgggcttactgtgcctggcccacaagaaatatgttactttttttgagatttttgtataatttgagaacacagattatttgccctactcccccaacccccagtgatacagacctggtttcattgcactgagagaaaaaaattagtttcttaatttacgttgcgtttctgcctttttgagattgagtgctttgacttttctcttgtttttgtatttgctgtatatgtgttgttcctacttaatttcttatatggtttaaacttgcatctgtaaattatttattagctagctttatgacttgggcaagttaccttatctctctgctccttagtttccctctttataaaatgaggataataatattacctactttgtagagttgagtaagattaatgactaataaatggtgaagcacttaaaagagggctctatacatgttggctgttaaaattataagcgaggacctggacttctcccctccattaattgtaactcttcatttttataattttttcataaatagtatgtctctcagcatataacagaactttgtattaaggaataataaatatcaccatgtatgtaattctttattataaacataaatttgcttcttgttaaaaacagagtatcattttcttgcctcagatcgagcttgaaagaaattagtagaaagtgggcccttttggccgggtgcggtggctcacgcctgtaatcccagcactttgggaggccgaggcgggcggatcatgagatgaggagaccgagaccatcctggctaacacggtgaaaccccgtctctactaaaaaatacaaaaaaattagccgggcatggtggtgggtgcctgtagtccccactactcgctactcgggaggctgaggcaggagaatggcgtgaacccaggaggcggagcttgcagtgagccgagattgtgccactgcactccagcctgggtgacagaacgagactccatctcaaaaaaaaaaaagaaagtgggcccttttctgtgttttataggtacccacacaccactgaatgtaggtcatcgtttaaaatctgagtgtacatccaaatccagtgcagttatgtagaacaaaacagtttgtatggaactagaagtgttactggaaaggtaaatactgtagttggtagtaaactgatcagttaaagtgatggatcagcaaagatttgggggttgctggtttttatttaacactcagttgtttcagagtgattactcctgaaacaaagttatttcgaacatagatgtgttaagaaatttcatattcctttccacttaaacctcttgagaaaggaagcatttcttcagggagagttagctatgtgagtgctacatgaattttagtcattactgtggcgactatatgataaccaaaagtaggagtctcacactttagtttcaaatttgtgctgttattgagtaaatttttaaaatgagattgccctctttcttgctaaactgtcatatatataagcccattaaattgacttttatgcctcttttccttttttttttttttaacctgttaagactttttttttctttctcatatttacccctgcctaagcaaggcctcaactctccacggaaatctttagtaaaaggcaaaaagatttattcattatgaagagaaaccagagcatgtgtgacaggactttctgtaattataagttagtggttcagtgccaggggttagattttcttaacttttatgtttagtaggattattgataattcctaagttgtatccttaaatcatattttttgaacattagggatctgcgtccaacacttaattatactagtaaaaggaatagaacatgcactggatttcttgtttttgagattctttcattcctgccctaccccaggcaggaggtctgtctgcagtggaagagaatgaaaccagaatgaggccaaacaagtaaagaggagcatgagatagagatggatcccatggcactgtgcctttgaggccctggtcctgaagtttttttccttgtttctacgcagcatctcattatcctgtgagccatcaaattctgatttttgggctgggtgtggtggctcgcacctgtaatcacagcactttgggaggctgaggcaagacgattgcttgagcccaggagttggagaccagcctgggcaacgtagggagacttgtctctacaaaaaataaaaaaattagccaggtgtggtagcacacgcctgtggtcccagctacttgggatgctgacatgggagggtcccttgagtctggaaggtcaaggttgcagtgagccatgatcacgatactgcagtccagcctgggtgacagagtgagactgtgtctcaaaaaatttttttttaattttgtgtaaattagcttgatttgggtttttttttttttacttacaactgagaattttgaccagtatatttaatgttagtctgaccatttctccagtgggctttctacgtatttaaaaaatagtttggactttaatctcagggtaaacaatatatataggtacactcagtttatatatgagataatattcaggatcagtggagtgaaaatagtaaagtatcttccatttttcaatggcttagagggaaaagtgttcataatgggtatagaattaatcagtattcctttcccattatttatgcctatacagtgtagaagtttcccttaaagagcttatcaccataataagtacaatagcaaagatataaagtcagtacttttcactgattaggcataaatatcctctttattgttttcttacaaagtagctatgataaacatataaaagggtcagaaagagaggggagaaaaactcggtgaaaagtcagacaagaggaaatgaagaggtgaggtatgtatagtaagcattagtgaacttgtagtaattgctttaggttccatggattgcccacttgtggattaaatgttagacttctgcaaaatgagttgatggtagagatgaagaaaagtcttaatttgttttctttatgctaaggttaaagttgatgtggctaattaggtattaagatcagttttcctgtctttttattatttatttatgtttatgaatgaatgaatgaagaaatgaatgacaaagtctcgctttgtcacccaggctggagtgcagtggcatgatcatagcacactgctgcctcaaactcctgggctcaaaggatcctcctgcctcccaagtagctgggattacaggtgtgcgctaccatgcctggctaattttaaaatttttagtagagatgggttctcgctatgttgcccaggcttatctagaactcaagcgatcctcctgtgtcagcctcccaaagtgctaggaggattgcaggcatgggccaccaaacctggccttgtcttgctttttaataagctgttgtcattatgttgcctttcaaagtccagttcttctttaccaccccatttgcctggaggtaatgcattaggtgagaatgaaaggtgagtacctaaaagattcagaattggaaggccttaataggatcaatgtgtaggagctgcagagaatatgaaggacttttaaatattccagtcccaaaataaacttgaccattggccaagattgtggtaagctaagtatttgagatgtctgtgctacatcatccaactcttggcctgaactgttttagctggcttgcctatgtaaattgaaacttcctttaatacttaactgtgagttaaacatagttctggagctccatcgaaagggtcttagtcagccaggcacagtggcttacacctgtaatcccagcattctgggaagccgaggcgagagaatcacttgtgaggcctggagtttgagaccagcctgggcaacattgcaagaccccctctacaaaataataataataattattatccagctgtggtggtgctcacctatagtcccagctactcaggaagctgaggtaggagagttgcttgagcccaggacatcaagacagcagtgagccatgattgcaccactgcactctagcctgggtaacagcgagactcccgtctcaaaacaaaaacagaaacaaagggtcttagttatacagatcttcttaatcattcctaaagcgtacattccaagtttatatttacagtaaagtgatctatatcccaaaacatgtttccactggttactaatttggggcaagtcattaacttctcagagccttctgtaactaagatttagggaaaatactggtcttaaccagagcacatatgtatacctttgactctttttgctgccacatggttaaaaaatcagccttagagaggtataatttgcacaaattttgccttttttctaggatgtaatataaatgaaatcatacaggatatactattttgtgcctgtcctctttcattttagtataatgctttgagaatcattcatattgttaaaagcagtagttgttccatttaattgctaagtagtagtccattgtatggatattccacaattcctttatttactagttaatggatattggggttttttttttttccaggttttgggtttatttatttatttatttgagacggagtctcgctctgtcgcccaggctggagtgcggtggcgagatctcggctaactgcaacctccgcctcctgggttaaagctattctcctgcctcagcctgctgaggagctgggactacaggcgcatgccaccgcactcggctaattttttgtatttttagtagagacggagtttcaccttgttagccgggttggtctgatctcttgagctcgtgatccgcccacctcaacctcccaaagtgctgggattacaggcatgagccaccacgcccggcccagtttttggctattacgaataaatctcctctgaatatttgcaacatagatctttgtgtggacatatattttcatttctcttggttaaaaatccaggagtagaaattgcaggattgtagggtaagtgtgtttatagtttttaaagtaacggcctattttgcattcccactggcaatgcatgagaattccagggctccaaatccttgttgatgcttggtattgtcattcttactaacttaagtcattctagtgggtctgtagcaatacatcatcatggttttagtttgtaatttccagatgactaatgatgattatcttttcatgtgcttatttgccatttatatgtctttggtgaagtgtctgttcaaatcttttgctcattaaaataggttgttttttgtttattgtgagttcataatgtattctgaatatgagtccttcataacaggttttgtaaattacatgttttgcaaatatgttcttgtaatttgtggcttgccttttcattcttaacagtgtctttcagagagcaaaaacttaatctttatgtagtcagttattttttttttctttttgagttaatgatctttttaaaagcctatctaaggaattgtctctaaacctaaggtcactaatattttcttaaattttattctggaagtttatagctttgtttgacatttgggtctgtgaaacacttcaaattaatactgagagaagtaagtgtagggttgcctttttgtatatactgtgaatatctgagttttcctctgagcagtgcttcagttgcagctcacaaaatgacatattgtgtactactattcagtttgaatattttctaatttctcttttaatgtcttttttggcctatgaattataaaagtttgatgtttaacttcctgtagatattttactgttactaatttaattccattgtggtcagagaacatactctataggatttcagtctttttcaggatttcagaatttgagatttgttttgtggtaaggcatatggtctattgtggtgaatgttttgtgtctttgaaaagacaaatatttggttctaccagttctgtctcatatattttgaagttctgtttttaggtacatacatatttaggattgttatgtcttctcagtaaattcattcttttataatgacttgtcccactttattttgataatatttgccatcccccaggctactttaacatgaatataactcttgtagctttattaccacagtatttgcataattttttcccatccttttacttttagtctgtgtatatatttgcaatgcatttcttgtgattagcacatagttaggtctcgcttttttatttaggctgacggtctccttcattcattcatttgttcattcattgagatggagtctcgctctgccacccaggctggagtgcagtgatgccatcttggctcactgcaacctcagcctcccgggttcaagtgattctcctgcctcagcctcctgaggagctgggattacaggcgcctgccaccatgcccggctaatttttgtatattttatgttttgtatatttacccctgtgttggcaaagctggtctcaaactcctgactttaggtgatccacccgccttggcctcctaaagtgctgggattacaggtgtgagccactgcgcccggctgacagtctccttttaattgttgttattaaatgatgggtttactctgagtttgagtatccatatggttaggtttcagtctaccattttgccatttgttttctattcatcccgtctattcttttctgtcattttttgaatgaaagattttgtaatatttcatcttatcccctcttttagtggagatatacttatttgttctatttttctctgtggctgctctatagtagatacctttaacttacgacattctgccttcaaattatataccacttaatgtataagaatcctatggcgttatgtctccattttcctatcttctgttctttttgctattgtcatacattttacttttggatatgttagaaaatccataattcaacgttaggcttgtttttatttaaagctttgttcatctgggcctgtagaggagcctttgccctcgggctagttgagctgtgtttataaaggtttcagctgaatggcctgagtttagtaaggtctctttaatcagtcagaaggagaatgcctgtgtaaactctggtagttgtgtttatagttcccaagtagttgcttgttacccagtggttgttctttgcctaccctcgtgaaatctcacctaatacatgtgcagctaatttagtaaagatgtagtagtgcctcacaaattacagctgcttcagccttcggagacacatttaagtttctgattgggtttccaccctccctagattctcagtttctccctttctggctggggtctggaaactgcctcaaaatacaaagctttgacaatcataaggcacaggtaatttgcttgtcttctctcagggatcacagttcggtgctgtctattgttcagcatccaagaatagctgtttcatgtatcttgtccagttttttagtagttttggtggaagggctagtctcaagttactccatcatggtaagactaatttaactttttataaatacaaggtttgcatgataaaggctattatagcctacttcataaattaatacattgcattctgcgggcagtgttttgcaccatttgtcctggcttagctgatattcatgttctaattgttcattacaggattttgtgtaaataaataaatgtttagcctttgtaatgggattgttaatagtaccctggatctgctactttaccaattgctccctaatgcctacagttgattgccaacactatctcactgccccctgtaactgcagtagtttgagctttaagatacaatgtcactaattatggattattctgttcttgttctacaatatcccaatatcttcagcaaaggattctgtattggctcccaccagctggtatttactagaatgtggaaataattcaaacaggaggactgtgcttttgaaaacctgctttaacattagaagaggaaaagtgattgtaaatggctatttttcatgtaagggagggattaaattttcatatctattgtttaaagaaatctgtagccaaaggtgtctgtttttagttgggtcattgtttaggactatagacttcagttttgtattcttagtaatattaaccccttcacctcccctgataacccaagaaaagatccttcgtataagattttaaaaattgcaccagaggagccaagtggctcatgcctgtagtcccagctactcactacttggcaggctgaggtgggagtattgcttcaccccaggagttcaaggcccaaggccagcctgggcaacacagggagaacgcgtctcttaaaaacaaacaaacaaaaaaattgcactgggatttgcattaaaagttgcaatacatacctagtatgttttctaatcataatgtgcaattttaaaaaaaagtgtaatttttatctgccttctaatttgagcctttattgttcaccagtaggtttatttcactggaacaagtctttgtgccatatttggcatcaccaaaggaatagtgccagtatttattgacaaatgaggacaaatagtttttccacattctattgccatcattgttactaggtaaacaatagaagcttataaaaatattgtgcatttaatacctttttggtttccttttatacttgtcaaaagtcatttatacataaattgacatactgtgtccatgatatgtatggataagtaagatctttttgtagcttgaatatcttatgagtaaatagcatttcctaactattaaatgggatttgaatagctgtcaagggattacttgatacagagaagttgctaatttattttgaaattgtaaaatacattttcccctctgaaatcacgaaatgcctcatattgctaatgcagtgagtttaagtgtttaatttagaaaaaattagtaactgctggttgcctcatattgctaatgcggtgagtttaagtgtttaatttagaaaaaattagtaactgctggtgttatttggcatgagatgaacctggaagggaagtgttgaggggcatcatctgtacttggcactgtttagaactttctttagaggtgtatagtgctttcttacactaatattccagtgtatgcctgaatagcacttttcttcttgtactgaaaaataagtccatggtgttaagcaggcatctctaaagtggccatctgatttaaaatagcttccataagttttaattaattttgcatgttttagtttctctttttgatagcaggtagtagctctctgaagcattccttctgccttgaaacatctttctttttcatatatttgccgttttcctttgtgagacttaggcttataatacaataaatatttaagtgccacctatttactaggcactgttaggttataggctctgtagatgtagtggtgaacaagatctccgttgttactcagtttgtagactatgaaggaaaaggagtaagggttggagaattactcatgtattaaatatatgttgctttttggaggcaaatgaataaaatatttagaatggttaagatagtcttctgctttctttggattcactaggggttttatcataatctgtctcatatcatttcatatgttaaaagggaattttaatgaaatacgttactactggttgtggattctaaaaggtagaaggacaaaatattatttgcctttaagaatacaaagaaaggattgtctgtttgtatggttagttgaattgtcttatttcctatttatttattttttattgctgagatctcactttgttgctcagggtgatttttaactcatggcctcaagtgatctcctgccttggcctcccaaaatgctggaattacaggcctgagccatttcaccccagcctatttcttattctccctacaagggacattttagtgtaaggcaaaaatataaaattatcactcataatgttttttcggaaaatatatgactgcatggttttgtagttttcttagcagtcactgggtcattaagttacctcgttttttgcttcttgttcttccttttttctgggggaaaaagttttctctaggtctcatctctcaattctttagcaaggcatatttttattcatcataccataactatatacatacttaaaagtaaatgacattttgtcttaccatggatttctcacgtatctggtgaagtggtttaaactgtccaattttatgtgcattgaaagcaaaagctagctgagaaaggaaagcttttctcatcaaataggttgaaattactgtcgtaaaacagtgataaataccagataagatatgtgatccttgaagtttaataaatatttttggactgttaatttatattcacttttgggcatgttttttttgagacatggtctctatagcccaggatggagtgcagtcatgtaatcatggctcattgcagcctcagcctcctgggctcaagcgatcttcccacttcagcctcctcagtagctaagactacaggcatgtgccaccatgcctagctaataaaaaaaaaaaaagttttgtagagatggagtctcactgtattgctcaggctagtcttgaactcctgagctcaagcagtcctcctgcctcaccttcccatagtgttgggattagaggcatgagccactgcacccagcctggttttaatctttaggaaatatttttctaggttaaactcaacacagtataagtatttttacatgtatttcagaatctaaatttattaggatactggctgatgacttacatgcttttattattaagatttaggttcccagcactttgggaggctgaggcgggcagatcatgaggtcaagagatcgagaccatcctggccaacatggtgaaaccctgtctttactaaaaatatgaaaattagctgggcatgttggcacgtgcctgtagtcccagctactcgggaggctgaggcaggagaatcgcttgaacctgggaggcagaggttgcagttagctgagatcgcgccactgcactgcagcctgggcgacagagcaagactctgtctcaaaaaaaaaaacaaaaaacccaaaaaaaattaggcaatttgctttaaaaattagataactcatgaactcgttggttattccttattagctaaaaaaaattattagaccactgtatattatgctaattaaatgactcatttctgctagttaaaccatctgtaataggctacagaacacattttgctggagtatgtaaaactaagcccaccaggaaacttatggctaaaattaaacagaatcctgctaaccttgtgtgtgtattcaattttggtacctgaaagaatttgtggtatttagaatatttgaatgttatgttatatttgtttggatgttcatattttatatttacatgacaaaaaggatatggttgctatttaaactttttggatggtaggaaaataatcttaggcacaggaaatcatgacaagaccagtgttgtagaactattatggataaagctttttttttaactttatgtataagtaattctctagagcagaaattactcaagctttcagtgtataaattgcatgtggactaaagattgatactgaccaaatataaaagattgatactgaccaaatataaaagattttgctgcttctcctaattttcttgtaccttttgatattctttgaagatacctaatggttatttaatttcttcaggttttactaaattttgttcattctaaagacttttaaaaagcttacacatctaatatgtcagagctatgacaaaaatgccaggttttttttagggggtggtgggggtggcgggggtggtcctgtaataatgctacagtatcttgatggacatcctgttaatactttggggaatgtgtttgttttgtattgctgtgaaggaatacccaaggctgggtagtttataaagaaaatagttttatttggctcaaagttctgcaggctgtacaagaagcatggcaccagtatctgcttctagtggggcctcaggaagcttccagtcacgttggaaggtgaagggggaacaggcgtgtcatgtggcgaggggcagcaaaagagagaggagaaggtgctaggctctttttaaacaaccagttctcacgtgaactaatagagcgagaacttgcttattaccgaggggagggcaccaagccatattagggatgtgccctcataaccagatatcttccactaggcgccacctccaacgtttgggatcacatttcaccatgagatttggaggggacaaatatctaaaccacgtcaaggagtttcttttgggagagcttaggatcttattactttttaatggatgattgatttattttctgaaattcctattttactgtgtctttttgaattgtacagttttctggcatttaaatactttcatatttgttgtgcattggttaccaccatccttctctagaactttttcatctttctcaattgaaactctgtacttactaaacactaactccccattcaatcctcttcctagtccttggcaattaccattctattttctatctttgtgaatttaactaccgtacatacctccatataagtgaaataatataatatttgaccttctatgactggcttatttcacttaacataatgtctttaaggtacatccatgtcttttttttttttcttttttttttttgagacagagtgtcactctattgcccaggctggagtgcggtggtgccatctcggcttgctgcaacctcgacctcttgggttgaagcaaattcttgtgcctcagcctcccaagcagctgggactacaagtatgcggcaccacaccagctaatttgtatatcatgtctttttttttttttgagatggagttttgcccttgtcacccaggctgcagtgcagtgtcgccatctgtgctgactgctacctctgcctcctgggttcaagtgattctcctgcctcagcctcccgagtagctgggattacaggcacccgccaccttgcccagctaatttttagtagagacggggttttgccatgttggccaggctggtctcaaactcctgacctcaggtgattctcctgccttgacctcccaaagtgctgggattacaactgtgagccaccacgcccggcctgtatcatgtcttttaaagactgaaaaatactccatcgtgtgtagactctacattttgtttatccatttatctgttgatggacagttgagttgcttctgctttttggctgttgtgaataattctcctatgaatgttggtgtacaaatatctgtttaagtacctgcttttacttcttgtgggtatatacctagaattggaattatttttgtttacccatttatccattgatggacagttgggttgcttctactttttagctattgtgaagaatgctcctatgaacattggtgtacacgtatctgtgtatatctgtatatcaagtctctgcttttactccttttgggtatataccgagaagtggaattactggatcatatggtcattctgtgtgttaattttttgagaaatctctattttctacagtagctgtaccattttacattcctaccagcaatgcacaaggatccacacaacccagccagcacttaaaaaaaatttaaaatagccatcataatgggtgtgaagtagtatctaattgtagttttgactcacatttccctagtgactagtgttttttttttttttttgagactgggtctcactctgtcacccagactggagtgcggtggggtgatcagggctcattgcaggctcaatcggttctcccaccttagcctccagagtggctgagaccacaggtgcacactaccacatccagccaattttttttttttttttttgagacggagtcttgctctattgcccaggctggggtgcagtggcgccatctcggctcactgcaagctccgcctcctgggttcacgccattctcctgcctcagcctcctgagtagctgggactacaggtgcgtgtcaccactcccagctaattttttgtagtttttttttttatttttattttttattttttttttagtggagacggggtttcaccatgttagccaggatggtctcaatctcctggccttgtgatccaccctcctcggcctctcaaagtgctgggattacaggtgtgagccactgtgcccagcttgtattttttttatgtagacatagggttttgccatgtttcccaggctggtcccaaactcctgggcttaagtgatctgccaccttggcctcccaaagtgctgggactgcaggggtgagccattgcacttggccaactagggatgttgagtatcttttcttgtatgtattggccttttgtgcttctttggaacaatgtctgttcaagtctttattagttttctcaggctaccataacaaaatatcacactctgggtggcttaaacaacagaaataagtctggcagggtttgatttttggtgatggctctcttcctagagtgaggtctctggtgtcttgtcttttaagcacactaatcctattggatcaaggatccatctgcatgaccttatttaaccttaattacgtcttacaggtgtaattaaggccctgtcttcaaatacagtcatatcaggggttagggtttcaacatttcaatttcaaggggccaaaaagcccatattcaaagccctttgcctacttgtgaattggattggtttttgttcttgagttgtaaaaatatattctaaacattccttaacagatatgtaatttgcaggtattttctccattctgtgagttgccttttgtactctgttgatagtgccctttggtgcacaaaagattttcatttggataaagttagctttttctttcttagcctgtacttttggtgtcttatccaagaaatcattgccaaatgctatgtcatgaagcttttcccctgttttcttctaagagtcttacagttttagctcttatagttaggtctttgatccatttgagttaatttttaaattaactcatgttaattaaaaacagttaattacatatagtctaaaataaaggtccagcttcattgttttgcttatggatatccagttttctcaataccactcattgaaaagactgtccttttcccattgcatggtcttggtatccttgttgaaaatcatttgaccatatatgtaagtgtttatttctgggctgtctgctttattctgttggcctatatgtctatttttatgccagtttcctcactgttttgtttactgcagctttgtagtaagttttgcagtcagttagtgtgagttcttcaacattgttcttttcaagttcactttggctattcggggttctttgaaattccgtgtgaattttagactgaatttttctatttctgcataaaatgccattgggattttaatagggattgcattaaatctgtagatcactttgggtagtattgacatcttcacaatataaagtcttccaatccatgaacacatgatattttttcatttatttgtgtattctttaatttattttagtagtgatttgtagttttcagtataatagtcttttgcttccttggttaagtttatttctaagtaattcttttttatgctattgtaaatggaatttgttaatttctttttttggcttgttcattgttagtgtatatgtatattttttgtatcttgaaccaagaatagaattgctagatttgacagtttataattaatttggctgtccatactaatattgataatagatataattgtctaagtaataggcttttaaaatgtttggcatgaaataatttgagaagcatttcccctttaaatttattttatttttttggagacagagcaaactctgtcacccaggctagagtgcagtagcacaattactgctcactgtagctggctcctccgaggctcaggggatcctcccaccttatcctccccagtagctgggaccagaggtgtgcatcactatgcctggctagttttactgttttttgtagagatggagtctgactatgttagtcagatcggtctcacactcctgggctcaagcagtcctcctgcctcagcctcccaaagtattgggattacaggtgtgagctgctgctcccagcctgaattttttgacgtcagtgttaatttgtgtgtgctatgttctgtctggatatattggactggtagcttgcaaacagcctaacccttggagataagttgattttaaattaagagtaattgtagtggataattgcagaggctcttaaaagagtaaatttcattttaaaaagaaggaaccaggagtaagaatgtaaaaataatacctacctttttatttgttttctttaaaaaaaaaaaaaacagctttgttgagctgtaattcataggccataaaactcagtcttttaaagtacacaactagggccgggcatggtggctcatgcctgtaatcccagcaatttgggaggctgagatgggtggatcacttgagaccaggagtttgagatcagcctggccaacaagacgaacccgtctctactaaaatcacaaaaaaatagctgggtgtgatggtgggcacctgtggtcccagctgtttgggaggctgaggcatgagaatcacttgaactcaagatgcggaggttgcaatgagctgagatcaagccactgcactccagcctgaaccacagaacaagactcggtctcaaaaaataaaataaaataaaaataaagtatacaatgtaatgattttgggcatgttcagagttgcatggtcataactgctatttaatttcagaatccctaacagagacctcatgccctgtagcagttattccactttcccactcctctttagaccttcgcaactgctagttgattttctctttcaatgcatttacctattttgatattttatttaaatagaaccgtacatgtggccttttgtgctggctgctttcatttagcatgaaagcattttcattttcatctgtgttgtagcacattatcagtacttaattccttttaatggctgaataatactccattgtgtgtatggatataccacattttgttcatccgtcagtgatcatttgggtttttattattttactattgtgaatactggtgcttttaatctttatgtacagatttttgtggggacacacgttttcagttttcttgggtatatacctaggagtgaaatggctgaatcatttggtaactgtatgtttaactttttgaagaactaccacactgtttcccacagtggagctataccatgtcacattcctatcagcaattattaggattttaatttctccacattcttgattacatttgtgattatctgcccttttgattttagtcatgctagtgggtttaaagtggtatctcattgtggctttgatttgtaattccttgatgcctaatgatgctgggcatcttttgtgtacttattggtcatttgtgtatcttctttggaaaaatgtttatttagattctttgcctatttttaatttggaacttaaattattgtcatgggagttctttatgtattctggatagaagttccttatccttgggttgtcctgattgtgccctttaaagcacaaaaatgtttaattttgatgaaatcccatttatttcatttttctttagccactaaatgcttttggttttatatctcagaaaccattgcctaatctaaggttatgaagatttactcctgtgttttcatatagaagtttaatagtttttgcacttacatttaggtctgtgtctattttgagttaatttttgtatatggtgtgaggtagagttcttatttaattctttggtagatggatattcagttgtcccaccaccgtttgttgaaaactgttctttcctcgttgagttgttctagcatctttgttaaataacatagatgttaaataaatgttaaataaattaaccatctatgtaagagtttatttcttgactttaaattctattccattgatctgtgtgtctttatgctagtaccacattttcttgataatttcaaaacttactacaaagatatacttgagaagtgtgagttattcagctttgtccttttttcatggttgttttggttattctgggtcccttgtatttgcacatgaattttaggatcagcttgttgatgtatgcaaaaagctcactgatagaaagattgcattgaatctatagatcattttgtcagtttgttgtcaccttaaaaggttatctttagatcagtgaacaagagatgtttctgtttaggtggtctttaatttttttcaataatattttgtagttttaaaacatttttgttttaaattcttgtttttttattttaatttcgaggtgtttagccggtacttctgttcttagtggtagtggtagaggtttatcaaaaaagagaactcaaatactgatggcctttctaaagcagtgtgcatgcaataaggtgcatgcattgggcacagcaacacttgtgagaaatgatagtaacattccttggatggagactctttaagggaggaaaatgtattatattagtttcttgtttgcatcagcacctcctggaattaattttcagtatacaagtaggtgaagaaatgctccttttaaaatacctttttctttttttaaaatttttaccacaatcatgactacatatccttgtaaaatattaaaatgtaatgctaaaatctctagcctttgtttttttttttttttttttgagacgacgtcttgctttgtcgcccccacagaagtacagtggcatgatctcaggtcactgcaaactccacctcctgggttcaagcgattctcctgcctcagccacccaagtagctgggactacaggcgcaaaccaccacgcctgtctagccatcatttttaatcccgttcttttctcatcgtctgtacgggtaatcactacattttttttttctttttttttttttttttttagacaaagtcttgctcttgtcccccaggctggagtacgatggcatgatctctctggtcactgccgcctccgcctcctgggtagtgattctcctgcttcagcctccctagtagctggggttgcaggcgcctgccaccacgtccagataatgtttgtatttttagtagagacggggtttcatcatattggccatgttggtctcgaactcctgacctcaggtgatccgctggccttggtctcccaaagtggtgggattacaggcatgagccactgtgcctggccacattttttttcttttaggctttccccccagtgcccttatgtatgtatgtaccaccaaatgatatgtagctttctttttttctctttcttctttttaaatatgctgtacatttactctatatatttttccccaattgatggatggttaggctgtttctagttttttgtttttacaacctgttggtgtgaagtttaaaaaaaaattttttttaagtttttttaaaatagagacgaagtctcggcatgttgcctaggctgatcctgaactcctgggctcaagtgatccaccctccttggccacccaaagtgctaggattacaggtgtgagccaccactcctggctcaaagtttttaaaacatgcctcagggaatatgtgcgccgactttgttgaaatatatcaagggaagtagagttacttggctatatggaatacgtagtagtagtcgtagtatattgtcaaggtactcttcaaagtagctttagcagttttaccattatcaaaagtgtgtacaattgctcacttttggctgggcatggtggctcatgcctgtaatcccagcactttgggaggccaaggtaggtggatcacctgaggtcaggagttcaagaccagtctgggcaacatggtgaaacgctgtctctactaaaaaatacaaaaattagctgggcggggtggcgtgtgcctgtaatcccagctactcgggaggctaaggcaggagaatcgcttgagcctgggaggcagaggttgcagtgagctgagattgtgccattacactccagcctgggtgatagagcaagactccatctcaaaaacaaacaaacagaaaacactcatttttccaccagtgccagtacttgaaattaagcaacatcttacttttctgccaatctttttgatggaaaacagtttctttattgttttaattttcattttttctgattatttatgaagtcgacatgttttcatatgtgtgttgaacatttgcatttcttttgtaatttttttttggtctgtttttcaggttttttctctctcatggatttttattttttcttagacagagtcttgctctgtcacccaggctggagtgtagtggcgcaatctcggctcactgcaacctccgcctcccaggttcaagcgattctcctgcctcagcctcccgagtagctgggactacagttgcgtgccaccatgcccggctaacttttttttgtatttttagcagagacagggtttcaccgtgttagtcaggatggtcttgatctcctgacctcttgatccgcccatcttggcctccaaaagtgctggaattacaggcgtgagccaccgcgcccggcctcatagaaggtttttaaaatggaaatgctcaactctttttagattattattctaacacttactgggaaggtctgaattttgactgaactgtttatagcattggacaagtgtttgagaggtgtgaggggtgtgtggagagtacagcaggtaagaagagccctagtaactgtggacagcacatagattgggttccagacacatagtctttgaatttttgtctttcagttgaatcagttcagtgaattcctttcatactatttgatttccagataattttttaaagccttaggagtgtgtttgtataatatttttgcttttgaaagtcaattaaggtaaattgtctacaacaaaattcacttcgtatattttggaaaatatatacagttataaaatcaccacctgattaatatgtagaatatttccattactgcaaaaagaattccaggtaccctttggccattaattctctctactgctcagtgaaccactgatcatatctccatcactataggttagttttgcctcttgtaggatttaatataaatggtcatcccagatcttttatgtagacttccaaacctagcattatattcacattaataatatgaacttggccaggtgcagtggctcatggctgtaatcttagcactttgagaggctgaagtgggaggattgcccaggagttcgagaccagcctaggcaacatggcgaaaccctgtctctacaaaaagttagctgagcgtggtggcacatgtgtgtagtcccagctacctgggaggctgaggcgggaggataacttgagccaggaaggtcaaggctgcagtgagctgtgattgtgccactgcactccagcctgggctacagagtgagagcctgtcttgaaagagaaaaaagaatatgaatttttgactgggtacagtggcttacgcttgtaattccagcactttgggaagctggggcaagaggattgcttgagcccaggagtttgagaccagcatgggcaacatagtgagacctgtctctacaaaaatataaaaataaaaaaattagctggtcatgctgatgcgtgtgaatagtgccagctactcaggaggtagagttgggtggatcacttgatcctgggaggtggaggctgcagtgagccatgatcacaccactgcactccagcctgggcatcagagtgtgagacgctgtctcaaaagaaaaaaaaaaaaaaaaaaacttaaaaatgacctaactttgagagtggttggtttaaaaatcttgaatttctctatagttgagaattgtttctgaattgatttggcaactttatgtcactatttaataagtaaaactttttgtgttaaattctgcagtggaaatactgacacaacaaggttaacagtacttgaatctctgaaatgagatatagtcagtggaaggaagacagtagtttaatctacccctttttccatacttgcctcttaaatgttagtttcatggtactgttaatcattatatacaatgacttttggttgttctgtacatacatatattgctttgaacaaaggaggacaacatccaaagtgataatagtatttagtttctgccaaagctgtttttttgttttattttgttttgtttttgagacagagtctcactctgtcgcccaggctggagtgcaatggcatgatcactgcaacttccgcctcctgggttcaagcgattcttctgcctcagcctcccaagtagctgggactatgggcgcgtgccctcatgcccagctaacttttgtatttttagtagagatggggttccaccatattgaccaggctgttcttgaactcctgacctcgtgatccgcctgccttggccttccaaagtgttgggattacaggcatgagccaccacacctggctgccaaagctatgttttaaaaaaataattttctatttccgtagtcctcctagaaggggagagagaatcctttttttttttttttttaaagcagattaagaccattggagggaaggagtatgtctaacctgatttttagcccttttttgtaagacagcaatgtcacggatttatcaagatttcatgttatttggtaggaactcctgacagccagctctttattcttctttgcacatgtgcattgatttcactgtacaccttctcaaaattctggaatggtttattcttttgaaaaaattcccatctcagagatacactaatgttgatcaggattataaggacaggttataaatctgaatgctattgtaatttgtttcagtctattacattgtagatttttgacttgaaccagtgagttctctaagtgcttctcttttgttctcttaattataaaaattgagatgtaatacacgtataaggtatagtaaccctaaattaaagcctggcagctttttagatatgtatagacccatgtaactacacccatattaatatacagaacatttatagctctctccctactaaggttcccttccatcctttcttaggcactacatactgtgagataatcactgtcttgtcatctgtccccagagtgctttcatttttgtttttggtttcatagttaaagttcttttcaaaatgttcctttttttggtggaaatttaacagggtactaaattggtataactaacttattagtaaagttataatcaaagattgctgggaaggcacggaagtgatcaagactaattatgattcagatgattaatagtatcattcagagatagtcttatgcagcattcctcatggtcagagtactttacctgggactagagtacaacattttttaaaaaaatgtggattttgccataaggaaaataatgaaaaagcaaaaggataatgaactgatgtgatgaatgttcatgtacctacgacctaatttaacaaatatttatccctgtcatagttcagattttaaaaactaactttgctatgttatatgaaaataataatagttatagaaataatataaggaactctcaatgttcttcaccaattgtttacattttgtttcatgtgctttattatttctccctttctccatattttttccctgaatcattttagagtaagttggaagcactgtgcccctttgcctctaaatacttgagagtttatttctttttataaaattttaaaatttttattttttgagatggcgtcttgctctgttgctcaggctggagtgcagtggtgcgatctcagttcactgccacctctgcctcctgggttcaagcgattctcctgcttcagcctccctagtagctgggactacaggtgcgtgccaccaggtctggctaattttttgtatttttagtagagatggggtttcactgtgttagccaggatggtcttgatctcctgacctcatgatccacctgcctcggcctcccaaagtgctgggattacaggtggagagtttatttcttgagaataaggacattatcttttttttttctttttattatccaggcaaaaaaaactgtgaagaatgttattttatataaccacagacaatctttcatgggtttttatagattaattttgaggatgcttttatatccaagttcttggatacacatcacagttggcaaaatatttctcgtgctatctcagatttgtataccatcagaatttttagtatatttttaatcttcttaactaaatgcaaatgtagcttattttactatcggtcaagttattttaaaatttgagaattaaaatgcatcttgctggcttcatttgtatttcactgggtggttgtcaccaggtatgctctcttccattatcttcacataatttttgaactgagaggtactaatcagactttagtcatcaatgatagtcttgttctttgcacataaagatgatagtgtaaacccaacagagcagttctgtgtttttttttttttttttttaggagactgggtctcactgtgttgcccagtctagacttgtactcctggactcaagccatccttctgccccagcctcccaagtagctgggaccacaggtgtgcaccattgtgcctggctaaagtaggcatttttagttttgctttcttaccacctctcaatgagatgatgcacttgtggttgtccagccatacatattcgtctacttatttccctatgatagtacatgtttttagggtagttgatttatggataaaaacatgtttatattatgtataatatctatggaagtgaataaatttgcttatgaaaattaaactctagctgggcacggtggctcacgcctgtaattccagcactttgggaggtagaggtgagtggatcacgaggtcaagagatcgagaccatcctggctaacacggtgaaaccccatctctactaaaaatacaaaaaattagtcgggcattgtggcgggcacctgtagactcagctactccggaggctgacgcaggagaatggtgtgaacctgggaggcggggcttgcagtgagctgagatcgtgccactgcactccagcctgggcggtagagagagactctgtctcaaagagaaaaaaaaaattaagctctggacattaaagatgttagcacgcatctaatcaaatgagcaactgtgtattagattacttgaagaaggtggtatcccatttggctattctagagcccaatttttcttttgtatgtgtaatttctggagttttctcttgccatacttgcattttaatataaaaatctacactaatgtggtctcttttccttagtatctaagtttttaatgtcattatagattgtaatatttggagactttgaaaagattctattttaggggaaaactagggcatgcaggttgatcttgtcccattatggtgagttgtttgtcctaccctgttatattagaatctagaaacatactagctttgaccttggacaagttattgaatccttgggaaccttgaagtcctcactgttaagtgggttaagtggcacctccttcaacaactatgaagattgaataagatagtgcgtaaaaagtacatagcccagtgattggcacatagttcagtaaataatagctttaaagtatgaaaataatggtatttattcagagtttggtttcgcttaacaaagtaatttatccatttagactacttttattaagcatatatttttctattatagtatttaagcagagctttgtgtgtaatatattttaactataggtgtcttgtgaattaagaaatggatacttctgtaatgaagacgttttaagagcttttaagttgtacattagtttgttctttgataaacccatgagattgttttgtcaggggagataattctatttcttttgagaggtaaatacagcttgtactatagtatttgatcaatttacaataggacattagtggtagagctaatatgtatgtgattactaaatggcatgtacagttcgaagtgttcctgtttattagctcacttaattctcacagtaacaccataagataccattgggagtggaagcaggagaaagaaaaagtgacttgctcaagattacagaactactagatgcctgaattgggttttgagacaaggtcaggctgactttaaagctgtgtaagaatgtgttaaaaactaacatttaaaaaagtgctagtgtatgttttcagttcttaccttacacactagtattccttttgaaagccttgtttaaaacagcagaaactgaaatgatacggcagagtaaaacgagacgtcatatttctccactaggtcaaagaggtaaagaatagaagtaacactgccacaaattgtagagaatagaataaaagaaggaaagcaggagatctattcctcagttatgacttttacaaaataatttccatatctgatgcggtttactgtctgattgaatgatctcttctctccatgcccacttttttttttttttttttgagacggagtcatgctgtgtctcactctgtcgcccaggctggagtgcagtggtgcaatctcggctcactgcaggctctgcctcccaggttcacgccattctcctgcctcagcctcccgagtagctgggactataggcgcccgccaccacgcctggctaatttttagtatttttagtagagacggggtttcaccgtattagccagggtggtctggatctcctgacctcatgatccgccctctttggcctcccaaagtgctgggtttacaggcgtgagtcactgtgcccggcctccatgcccacttttaggggaaaagtttagaagatggagacaaaaccaactatccttctgctatctcttagattttcatctctttctattctgtagcctacaatcgtaatgtagaccaagattaggctgaagaataaaatattccttaatgtatctaatatttttatagtattgaactgtaaccccataatgaatttttttggggaaagtcagattatttggttatgcttgggaacttttaggtagttgcagactcattaataaactgatcacatggaccagattgtcttatccggtcagctttttgcttccttgttcttatatttgctctattgtgctggtgcccataacaacataaacttacagctcagtaatgcagggcaagtagacttcttcctgccctggagctttttcctgtactagatgccagttctgaggatggtgagcctgagagtttaatggaaaacctgatttcttgattctctgtggttagattagatttgtttcaatgctgaaataaagaaactctaagagagtaggtagaaagcagtgcttggctggaggatatttaataagtgttcaactttagaatgaatgggtttcttgctttgttaacttcttgaaaatgccagtgtctttaatgataccatttaatagaggtaatctgtagtggaacattatttagtgacaccacattttcaattcaatagccatttatttgcttttgtaaattctctgtattttctcatattcccaaagacttttttcagttttctaagtgaattaatttctttgagtagaatataaaatagtaatattaaaaaatatggcccctcatgctatccacttgagttttaagatggttaggttttttcgtattactgactggctaaaaggagaatttgatcctggagaatttgatttgagttttagatataaaggcttatattttaccccccttttcttaaattttttgtcaagcaccccccttctacagctgacaaaactaagatacttcttaatattggattaagcttttgttattatatattagttttctgtgttatctttctagtcatatctagtaatgttaagcttcattttgtcttgtacttacttggatttgcagctttaagatgcttatcattagggctgaatcttatttctctggaggatactgactctttaaatggctgtaaaaatcattgagcgcctactcgataccaagacattctcttctaagaagagacttctttctttaccatatactgtctacctttggtcacagcagttttgaggcttgggagctatttgttctattcctttttttgtgcttgttcacttttttctttcaaaaaactttgcagattttttttttttttgagtcagggtcttgctctgttgcccaggatgaagtgcaagcagcacaatcatagcttactgcaggcttgagctcctggggttaagtgatcctcctgcctcagcctcccgagtagcggggactataggctacaggtgccgccgcacccaaactttatttgttttataaaacactagtttttagaatataaaacttggtgaatagtatcactatgtataattcttgagtctcaagtgtaaacacatcaaaatgcgtttcgtagggagtatatattcagggcaacttgaatctatgctcctgagaaaaataaatttagaaaaccgacaaaaacccaaaatgcatttcataaattgtacaagaagatttgaagtaattaaaaaatgatggagcaaactttcacaagcctgtttttttagttgttggttcctaatttggcatcagtctgtactgagttgatgcttcagtaggtttgagacaggaataatacagggtggtcacaggagaacagaaaattccaggcagcaattttacatgactagcataaaggaaactattgaaatagctgcataaactaggggctgacaagaccttaaaaaaccagagtgtgggccaagctggctaagactgacccagcatggcactggatttgacctaggtttcacctaggatctcattatatgctcattaacatactaaatcacatacccaccagcaccatgcagttccaggaacacccatatttggtgtagaaatgggtggcactacagttctgagaaatcgtaactgttttcctggaatcttcctgaatattccatgctttgcgtaaagaaacccataaagatggaagtaccaacccgcttggtacaaccttctcttgagtatacccacacccccctttcttgagtttataattttcgctttgtcataaatctccgtactttcactgtttctgactcattcctgaatttctccttgtgatagtgtcaagagcctggacaccagctgagggagaggtctcactgctctttggggacttcccccagcccgctggtattcagacctttccaaaatctgagtgtctgttgtggaatcatatagagagaaatttttcttggtcattagagtaaagtatatgcaaattcttttcttcttttccatagctcactgctatttggggacttccctcagcccactggtattcagacctttccgaaatctgagtctctgatgtggaaccatatagagataaatttttcttggtcattagagtaaaggtatatgcaaattcttttcttcttttccatagaatgtttgctcaggaccagctgcataatttacagggcctcttcaagaggtgatttagaaaactatacattttctttacttttattttattattttttttttgagacagagtctcactctgatgcccaggctagagtgcagtgtcgtgatctcagctcactacaacctccacctcccgggttcaaccgattctcctgcctcagcctcctgagtagctgggactacaggcacccgccaccacgcccggctaatttttgtatttttagtagaggcggggtttcaccatattggccaggctggtctcgaactcctgacctcaaatgatatacccgcctcggcctcccaaagtgctgggattacagaagtgagtcactgtgcctaactgaaaactatacgttttctaattgtgctgcataattgtatattttgtgatttgtatttgatgaaaatatgtccacgctggaatttaaaataaactgttttacaatggtatttttgtgtcctaacttaaggtctggttaaggagtgtcatggttcaaactatttttattataggtttaaataaaataaaaacaaaacaccgtggggccaaaagatgggaaagggactttgttggagctgatagttttattattttcaaacattgaaatcttgtagagatagacttttcaaattaatcctgagttgttaattttaaactttgtgattatctcactcttgagataatcctataaaccttttcagacataatcattgaggttagctaaaactacttttagcaaaagccatatgcttgttttcccagtgggtgaaattgagcactgacttttagagtcactaatgttttagtgaaactgcttaaatttcaaggtagaccttagtgactttctatatgtatgaaggtattacttgactgttttataaaataagaaccgtaattggcgtagactttcagatgagattgggaacattcagggtggtatggccgtaggcagtatggactttcagatagcagctataactgttagtaataagagtaggactgtcaggccactctgcccaggctaagccatcatatctcctgtgacctgcccgtatacatccagatggcctgaagcaactgaagaaccatgaaagatgacattcaaccattgtaatctgttcctgccccaccctaactgatcaattgaccttatgacaatacaccctccccgcccttgcgatcatgtactttgtgatatttccctgcccttaagaaggtactttgcgcctgtaatcccagcacttcgggaggccgaggtgggcagatcacgaggtcaggagatcgagaccatcctggctaacacagtgaaaccccgtctctgctaaaaatacaaaaaaattagccgggcgtggtggcgggcgactgtagtcccagctactccggaggctgaggaaggagaatggcgtgaacccgggaggcggaacttgcagtgagccgagattgtgccactgcacgccagcctgggggacagagcgagactccgtttcaaaagaaaaaaaaatactttgtaatattctccctgcgcttgagaatgtactttgtgagatccaccccctgcccacaaaaatttgttcctaattccactgcctatcccaaacctgtaagaactaatgataatcctaccaccctttgctgactcttttcttggactcagcccgcctgcacccaggtgaaacaaacagccttgttgctcacacaaagcctgtttggtggactctcttcacacggatgcgtgtgacaatgactgtacttttaacagatgagaagtttgatgggagttgaaactagaacttttttttttcctcctgaataggaaaaatcggaacattctttaaggtccagcttttctcaccctgccccacctttttaaaaaaattgttgcttattgccaatagactagcaagtggttgaacagtttccttggcaagaggtgccaggtgactgactaatgccatcgtaaagcacatgcccttgatcacatcatatggacttgatctccttggaggctaattatatttagggacattttagtactttcaaggaacctcagactttgctgaggttgaaaacactggtgacctccctttggttataagagagaccaggagttcatatgcattccttcagaaaaatatttgaaaaatataacactgaccttgggagattagtgcatatgatcttgattttatgatcttttctagagacactgcaccactgcagccactgcctcaatcatgatacagaacttttacatcacatgagaaagttcctttatgcaccgcttctagttagtctttctctgccctaatccaaactactattctctttcctatcactaaaaattagtttcgtccttgaacttcatgtaaatggaatcatacaatattcttttctaacttgttgctttgagtcaacatcatgcttttgagacttatccaggttgtatcagtaagtagtttgttcatttttattgctgagtatggcaatccattatagaaatataccacaatttgtttatctgatcacttactggatatttggggttgtttccagtttggggctgttatgagtaaggttgctgtgaacatttgtgtccagacctttttgtgataatgtgctttcatttctcttgggtaatacccaggagtagaattgttggatcataggataaatgtatgcttaacctcataagcagttgccaaactgtcctccaaagtggtaatgccattttacactttacgagccgtgtatgaattccagttactcgatgtcctcaccaacatttgctcttgccagtttctttaattttagttagttcagtggatgtaaaagggtatctcattgtggttttcattttttgtctccctgatgactgatttgagaatacttctcctacatgactttccttttcattttcttaatggtgtcttttgataagtagagatttttaaaataaaattttaattgtgggaaaatatgtatgacatttattaccatcttaaccattttaaaatgtacaattcagtggcatctctacaaaaaaataaaataattaaccagacatggtggtgagtgcctgtaatcctggctacttgggaggccatggtaggaagatcccttgagtcccaggagtctgaagttgcagtgagctacgattgtgccactgcaccccagtgtaggcaacagagtgagatgccatctcttaaaaagaaaaaacaaaaacaaaaacggtattttctatcttgaatgcctttagtttttggatatgttgacccttctgtgacaccttggtccacatgatgtatcaggcaaaattcacctccgatatttcacgtaggttcttttctattttccctaagtgtcagccagtctgagaaataaagggaaagactacaaaagagagaaattttaaagctgaatgtctaggggagatgtcacatgtcggcagcttccgtgatgacccctaagccacaaaaccagcaagtttttattagcgattttcaaaaggagagggagtgtacgaatagggtgtgggtcacagagatcacatgcttcatttgcttcacaaggtaataaaatatcacaaggcaaatggaggcagggcgagatcacaggaccacaggaccggggcaaaattaaaattgctaatgaagtttcgggcacgcattgtcattgataacatcttatcaggagacagggtttgagagcagacaactggtctgaccaaaatttattaggcgggaatttcctcttcctaataagcctgggagcactacgggagactagggcttatttcatccctccgctacgaccgtaaaagatagccgtccccaaagcggccatttcagaggcttcccctcagggacgcattctctttctcagggatgttccttgctgagaaaaagaattcagcgatatttctcccatttgcttttgaaagaaaaatatggctctgttccatccggctcaccggcagtcagagtttaaggttatctctcttgttccctgaacattgctgttatcctgttcttttttcaaggtgcccagatttcatattgttcaaacacacatgctctacaaacaacttgtgcaattaatgcaatcatcacagggtcctgaggtgacatacatcctcctcagcttacgaagatgacaggattaaaagattaaagtaaagacaggcataggaaatcacaagggtattggttggggaagtaataagtgtctgtgaaatcttcataatttatgttcagagattgcagtaaagacaggtgtaagaaattataaaagtattaatttggggaactaataaatgtccatgaaatcttcacaatttatgttctgtcatggcttcagctggtccctccgttcggggtccctgactttccgcaacaatgatgtgtgtatttttctttttttcttttttttttgagacagagtctcactctgtcacccaggctggagtgcagtggcgccatctcggctcactgcaagctctgcctcccaggttcatgccattctcctgcctcagcctcctgagtagctgggactacaggcacctgccaccacgcccggctaatttttttgtatttttagtagagatagggtttcaccatgttagccaggatggtctcgatctgacctcgtgatccgcccgtctcggcctcccaaagtgctgggattacaggcgtgagccaccgcgcctggccttgatgtgtgtatttttcttgtctacgtttgccactcttttagtatataagtttataagttcatagaaattttagctgaagtttttggagaaggtgtgttgggtaaggtgagcttgtcagggaaggaaggaattggtatgttatgactattccagatctactttgaatctgtatcctatgacttaaaggattattttgctatgtctcatatagcaaaatgaggctcttatagtcttagaacatgatagacttttagtttaggcattttgcttccccttccccacccccaaaccccacccccaatgccagctccttcatgtggacaacttttttttttctttctttctttcttgagacaaggtctggctcgattgcccaggctggagtgtagtagcacgatcttggctcattgcaaactctgcctcctgggcttacgccattctcccacctcagctgcccgagtagctgggactacaggtatgcaccaccatgactggctaatttttttttgtagagatgggattttgccatgttgcctaggctgttctcgaacttgtgagctcaggtgatcctcccgccttggcatcccaaagtggtgggattacaggtgtgagccactgcatccggcctccgtgtggacaacttaaggcaagagctagcggggtcttaaagcccagaagagtgagaacagtgtttcgtggttccttttgagacattaatatcttttagattggtgcaaaagtaattgtggtttttgccattaaaaatgatggcaaaaactgtaattacttttgcaccaatctaatacttatctccactgcttttatctaccccaagaacttgtcattgtcctaggggagaattaacttttacttctatctgacttacgtgttagttttgtgatgttttattctagattaagtatcctcacataaagtcatgtttttgataataggggaaaaagtcagacttttacttttgtcttttcttcctacccccacaagaagacaggaagtagatagagatcaaattgagttggaggaggatagtatttgtggacttccaaacaaattcttttatcctcaggacatatgtagcttggtatgcagaggcagcatgacttttggaaattaggtgctgttctttttcttatttctgttacattttaaagttttgcaagctactttgctcggttatctttaatgttgtatgttagccagttgattagtgactttttattgtgataaaactttatttgcagtagatctttacaaactgagatcacagaacatgtaaactcattagaactgttattttcaattggtgtatttctgatttaagcttttcttttagaaatgtttacttttatatttgctaaatagatatttcagtcattgattcaatgaataaactgtataaataggttcattgctgaaattgctgctgtgtgtgatttataataatagcagatttctccataatcaaagtaaatacaatatccacattttatttctggaaatgaattgtttaaatattattttttagacagggtctcctctgtcacccaggctggagtgcagagggatgatcaccactcactgcatcctcagcctcctggactcgagtgattctctagcctcagccttctaagtagctggggccacaggcacgtgccatgaggcctggcgaatttttcatagaggtgggattttgccgtgttgcccaggctggtctcgaactcctaggctccagcagttctcctgcctcgccctcttaaagtggtggaattacagttgtgagccactgcacccagcctggaaatgtaaataattataatgacatgtagtaagcattataaataagaataactatattgaaatggcacagtgaactctgcagggaagcttttgcagtaaaaatgttttcaagctggccaggtgcggtggcttacatctgtaatctcaacactttgagaggccaaggtgggaggatagcttgaagctagtttgacaccagcctgggtaaagcgagatccctgtctctataaaaaattaaaaaaaaaaaatgtagccaggcatggtggtatatgtctgtggtcccagctacttgggaggctgagacagtaggattgcttgagtctgggatcctgaggctgcagtaagctgtgatcgtgccactgcattccagcctgggcaacagagtgagactccagtctttaaaatgaaaaagaaaaaaaaaaaaaaaatttcgagccaagaattgaaggacacatgggccttgtccagatggataaagtgggatgagggaatcaggcaaagataatagcagttaaaaaaaatttatggatgaaaaaattttaaaagcagtcccaacttgtttaatttggaaatgtaatgtcagagggtttattttttggagagaaattttaggaaaacttctattgaaggactacgacagggagtgttaaaagatttgaccagagtagttatgttataaattcaattgtaaaacttgtgtgtgtgtgtatatatttgtgtgtgtgtgtgtgtaaggtaatcaaggtataattaaatataagcaaatgtttgagagtcaatttgatggaaaaagtggcagtgatactgataacatgcaatggaaagatgagaattaggcatttcaaagaaagcagtgaaaattggtgtcagattttgtcattggaaatagagtcaaatggtttctagactggaatacctagaacaactgtgattcccaaaggagtattaaggagctgtggtggggagaagagagaggagagggaggcagatgatggattctgtttaggatagaggtaaaggtgctagattgacaacctagaggagatctggtaatctgtggtcatgtgctagcaatagcagtcagggttgagggttatttggggagctctctgctagtagctgagggctcgagagaaaggcttatcatttctgtgggaaggactgatcctgttgcatgtgcaccaggtcaggcctgttcatgaatggtttcagactgttaatggattagaaaaatgtcttatgaagaaaaatgagggaacaaggaatccggaggaaatgatttttgtagcagtttctctatatgaagaatttgtattagtattagggcaatatcattcaaacctctcattaatgtactacctgcatattttttttgcagtatctgtataccaaatgggagtgcatcttaaagacaatggcatgttatggttgaattggaaaagttttttttttttctagtggtatgtaaattaatagtgtgtcttgaatttgatggcatctcagactgaataaaaggtaaaattttaaaaatgctcagtagcgcaaatatagttcttaaaaagatacttgtttatgttctgtttaatctcagatatcaccaatgataatatataccacggcatggaaatactggtaatagagtactcccattgaaaaaataactatatgctttagaatatagggtttaggttagattgtaaggaaactgttgaagatgtaaatcattagaaaagaaaaagtgtaagttctttccaaggttcttatgtttccagcattttaacatatatacatgttctgactgaacagtagtagtgcagaatctgttatccaatcacaggtttgattttaccagagagcttggataaacatattatttctttctcctctttccgacatagctcctttgacaaatgatttttatgttggaaaatgcaagaaaaataagtagctcagattgactttggaaatgtaatattattcttaattcacaggcttgttggcaacttgagaattccaattatttgtctgtgtggattgttttttttaaatgctgaattgtatagtacttaagtttttgatgtataaacaatatacttaatatactccataatgtatgaggataggtttctattaggctgtatgtttgagaaagttttcctcttatgacaaaagttaatttagccagtatgctaaattaaaaaaaaaaaacaaaaaaccctgcctcccagttttctgagttaagtaaaatgatggtgtaagaattttttaaattcaaggtttggtctgtctgaatttttctgagtcattgatttaaatgcagttacttaaaagcatacggggagaaattccttttactacttgttagctctgatttaacttggtacttttgccttccttaagtaaagcatgttgatgaattctactttttggctttagctgaaaaagttcattttcttcctgtatgtatttggatggcagtcacatgtattcctctagtttacatgagataaatattactaattttaaaaaggtgggtcttttctgggggtatgttgaattgaagatggtgttcaggtcaagacagtttctggtcttttggccatttaataatctgagaattgctttgaaagggtaggtatttgagctcatcatttaaacagagcctgcattgtggtgtgtggttattggaggttgttggtgttttcattggcgtgttttcaaaaatatgagtagccccctacctaaatgccagaatacaaattttaactaggccagtagaagaggggattattttcatttcacatagcctctagtatttgaattttgtctgtctttgaatgtacctcttggctagctagagttggacagttttcaattgtgatgacagcagttaaaaattcaaatctgttccttttcattgttgagttgtatgcttaaagaatgcatctgcattttcattcagctttctggtccttgtcgatttttgatgtctgttattctgcataaaactgtgtggcaggcgccagaacttttaagaatctttttgtttacagatggggagacaataacattaacattcattaacattcaaaataaaacattcttatactgataagcagtatgcaggttagctaggtttgggatactgatagatattttttgagtgtagtttacttccaaatgtcttctagaatttatgtttaatatctcaaatacctacacagaataggaatggcatgcttatttatacatgggcgtactcttgagttctaatggcaagccagccttcaaattaagttgtcttcctggaaaagaaacctcttaggcaactgtgaagggagagggataatataaaaaggatggagtttagaaatttgtctttttgtggtaagatctagaaacaaagcatattagaataagcagtgtaaattttgcacctttcaaaaagatactgatgtttttatcatgaaataataaaaacatattattgtctaaaaaaaaaaagccaaaaaacccagccaggtgctatgactcatgcctgtaattccaacactttgggaggctgaggcaggaggattgcttgagcctaggagttcaagaccaatgagaccacatctctacaaaaaaccacaacagtaaaaatgagccgggcatggtggcatgtgtctgtagtcccaactactcaggaggctggagtgagaggatcgcttgagcctgaaaggttgatgctgcagtgagccacaatcatgccactgcactctagcctgggcgacagcgaggccctgtcttaaaacacacacacacacacacacacacacacacacacacacacacacacacccccccccccccccgaggccctgtcttaaaacacacacacatgcgtgcgcgtgcacgcgcgccaggcgtggtggctcatgcctgtaatcccagcactttgggaggccaaggcgggcagatcacctgaggtcaggagttcgagaccagcctggccaacatggtgaaacaccccatctgtactaaaagtacaaaaattagcctggtgtggtggcggtggcaggcacatgtagtcccagctattcaggaggctgaagcaggagaatcgctggaacccaggaggcagaggttgcagtgagccgagatcatgccactgcactcaagcctgggtgataaagtaagactctgtcccccgcgcccccccccaaaaaaaaaaaacaacacacgtacacataaacccacaaaaaacacacacattccacatttctggcctttgctgcctgtctcattgattagttttctgttgagtacgtgagaataggagctcttaatttaagccttattaaaaaaaaactttttgagaacctgtttttaaaactactcctcttcgtggagattgattattttgggtctttttgtccaagaaaatgaaattaagattttattctttgattggtatgagggaggaaggagagtcgtcagtctagtgttaaagataaaattatgtatgtttaagaggggcagaagtcatcacaagattataattaggaaaatttaagtttccatacttccaaggaagtatgaatttctagaatatcttttatttccatttgatttaggcattgctattgaagacactgatttggggcaaggtgtcggggagaacaggaggaattgtagttaacttctttcctcttcaccagaggttaactgagagcaagaagcaggacatgaatgagtgtgcaagaatttgccttctgttaatttcccaaaggtagaccttggaaatagtcaaaagaacaaaagtcaggaaacctttttccgaggctggagctagtctttctgatctttccaaagcagttataaatattgaagtacctctggcacttagataaaatgattctgcgtggctttaaactcagttaatttctaatgcttgaatgtctggattttctatgatttctgaacaactcagatttaagtatgtcttttgttttctgtgaaattataagggttttttccttaggagatagggaacatttctgttttttatttttttatttatttttttattttttgagatggaatttcactctgtcgcccaggctggagtgcagtggcgtgatctcagctcactgcaacctccgcctcctgggttcaagcaattctgctgcctcagcctcctgagtagctgggattacagatgcacaccaccatgcccagataatttttgtatttttagtagagacggggtttcaccatgttagtcaggccggtctcaaactcctcaccgcgtgatctgcccatctcagcctcccagagtactgggattataggcatgggccaccaccacgactggctgggaacatttctttcagatggtaaacctaaatgctgccttataaaattagattttaaactcttaatttctatagtaaaataatgcctaccttgtgatatttcatagaggacatagattcagaaaataactttacagattacttacagaacttccttaccatcttgttaatgatatatcagtatatctgagttaaaagtataaagtgggccgggcgcagtggcttacgcctgtaatcctagcacgttgggaggccgaggcaggtggatcacgaggtcaagagatggagaccatcctggcccacgtggtgaaaccccgtctctactgaaaatacaaaaattagctgggcgtggtggcatgagcttgtaatctcagctacttgggaggctgaggcaggagaattgcttgaacccaggaggcagaggttgcagtgagccaagatcgcgccattgcactccagcctggccatagagtgagactcagtctcaaaaaaaaagtataaagtgaatgtgttctgcatgtagaagggaatataaggagcaaatcagaacatatacttttatattcattcttaaaaatttaatttttaccgtttttagcagattgtatgtgatctttggttttaatctcttctgctgctaaagatattatatatggctgatattcccctaccccctatctcttgtataagggttgagtttaaaaggaaaatgcttgtaaaataagttatttagaagggtaacaatgaaatttgttaaggttggtttacttacagttaatcttttctgagaacatggtcagggctgcctcctcttccctgttgagatgtataaagcaataaggtgcatgtgaaatgcaaccagcctgttgtctaaaaatgttagtgtgtaattactttgcttttcatttctcacatttttgggtttacatctggaaacgccactaaatgaagacgagtgatttttaagcattaatcactaacctactgtttcagattctgtctattgcagaacttcttttgaagaatgtatttagaacctttcccacattaaaaaggtcaatttatgtaaatgaagaataaacaacatactctgtacctcgtatgtagttacatacttacacatgattgatcttttggtcattatctattgaaacagagttttcacttgttaatagtggaaattatcttaagtgttgctggttcaagtgatttattacaagtaaaggttttttttttttttttttgagacagtctctcactctatcaagtggagtgtcgtgtagtggctcgatcatggctcactgcaacctctgcctcctgggctgaagtaatccgcccacctcagcctcctagtagctgggactacaagcatgtgccaccacgcccagctaatttttgtgggtttttttgtagatgatggtttcatcatgttgccgaggctggtctcgaactcctaggctgaagccatctacccgccttgagtaaaggttttttgatacaagaaatgattataacttggagttcagcttggattctgacaacttactagatttttttccccctcgggagaggatggttgtttcttgcttaggaaatgataatattttagcagcttatctgtgccccacagctggcagagtaatgcagtatgctgatcatgaagttgcatctggaaccctgaaaacttccagaccttaatgtttccaaagagatagaaaagacacatagcttctggtgtgtgtgtgtgtttttttttttaaaatcatgttagttggaggtctcattgaaccaggacaatgacagaattttatatttatatttgttttatctttttcaatgcatggtcatcaatagggaaaaagtcacactaggagcgttgagccctgtgaggatatcacacctgaccctggaatggcagttgtgtaagggtaggaactttgttttgttcattgctgtatttctagttcctagaatagtgcccatcactcagaaaaacacgttgaatgaacatccaccacttaccacagtagctgaatgtagccatgcttttaactctctgctcgtctgttttcatttatagttgacttcaacaacagaggttttagaaaatttgagcagggagtaagactaacctatagtagttttacacagtgggttttggttaatgctcatgattaatttctcttcccaccatagaatggtcttacccaacatgctacagaattctagtttctgatatgtgaaaagttaatagacataagaaaggaaacactaacaagctgaaaaaaatcacctaaaattgtggcggttgtaaatctacttcttaaaattttgcacctcttgaatttttaaaatactgcctctacactcaaatttttctctggatctgtttcttaatattaaatgcatgtgtaaaaaaatctattttaacagcgaaagtgaaaagattgttttaaaattattcagtgttgccttcttaaggttttgactcttaattatcgttcatttgaaagacaagactatgtagaaagtattctgttgttcttttgaagttaaagtgtatctcagccaaaaaagtgctgctttagtccccagtacccctcaacattttaggaggcctggccagagcctcttagttttccctcatgaatttggttcagacttactagtttttgtagctggggttcttttattatataaacggtacaaattggtgtgcctctttgcccttgttgaagctgatgtgctaggtggcacatcgatgatcacataaacagttctgtgtaggtgctaaatatgtccattcctttttggccttcttagggcctctgtgcccttcgttttagtcattacctcattattttacagaaagggacttagagtatattgtgttaggtccccctctccagtgaaagctgcatgatgatatccaatactgtagtatttaataatttagtatatttttactccttcagggttatcttttacaatggacaaaatcctgtccatatgggacaatatgtgtaccaatatgtgatggtgaaagttttaccctcttatttcagataacttccagaaaggtgtatttatttatacccctcttggagatggaacctaacaaccctgcccacccctcttccctgtttgtctgttcgttagtgcttaatgtgtttaagcatcccttgttatttttaggtaattgcttagatttaatgcaaccacattacattctgctacctctactaatacgtgaatgttcaaggttacccaaacataactactcttattccttaaggtatatacatgactggtatcatgggaaggtaccttatggtaccagagagcttctttcagactcacctctacttggccctttttttttctttcaaatgagtctttttttttttttttttttttttttgtctcttaaatttaaaagagacgaggtctcactgtcatccaggctgagagtacagcattgtaatcatagctcgctgcaacctcggactcctgggctcaagcaaccctcctgcctcagcctcccgagtacctgggactacaaatgtgtgccaccatggctggctaattaaaaaattttattttattttatttttattttttgtagagatgggggtatttctttgttgtataggctggtctcaagcagtcctcccacttcggcctcccagagtgctaagattataggcatgagccaccacgccctgtctacatggcccttatctgacaaatagtcctaagaggcatgagcagtttttaatttgctcgcaatgtttcacaatgacacactgtttctaaccaagcagatgtttgactgtggttactgggaagaatagtctttgccagcattaagcccacctactcgaaccttttctgttgaatctctcgtttggtccatctcttggaagttaatcagcacctgtggaaactttacacaaacacttctgtattactgaagatacctcatctttttgacagaataaattatcacgtgatttttagaacatgtcagatagcttttacagcagatatagtgattttcctgaattaaatctagcaccatcaattcattcttgcccttcgacttgacctgtctcttgaaccatttctcccccaatttacctgttggacgtacatctacttgggaggtcactgttaaagccagcatatcatagctcgataacttcattgggatctacccttcatttcttaatgataatatcctttttctagttaccataagccttaaaatttttcagttatttttaacaacttgctctgcttcctttttttccattattttgttggttgttgttgttcttgtgacaatctagggtcttactttgttggccaggctggagtgcagtggcaccattgtggctcactgcagccttgacctcccgggcccaagccatcctcccatctcagccttctgagtagctaggaccacaggtgtgtactgctatgcccagctttttaaatttttatagagatgaggtcttcccatgttgcctggactggtcttgagctcctggctccagtgatcctcctgcctcagcctcccaaagtgttgggattagaggtatgagtcattgcacccggccagacataatttttaaaaagcaatataatgtccttgctctaataaaaaggaaaaataaaaaggaaaataatttgtaatagtatatatttcatgcaaatactcaggtagaattatactcttgcaggaaaaggttctacagatttacaaatccctcaactttcctgctgtactatgttgtatttaatacttagttaagcaacttaatagcaagactggtcttcatactaaatacttaatagcaagactggtcttcatactaaatacagttcgtctctgaagttgcaaattatgagtagctattttcattgtcatatagtgtgtgtgaataatatggcctgagttataaaacataaaagttattggggagacaaaaatattatgtttaaaatggttaagacacttcattgttgcatatttagctttcctttatggttcttagttaataatgtaccatattttactgactttttttttcttttcttttttgagatggaatctcacactgtcgccaaggctggagcgcagtggcgcaatctcagctcactgcaacctccacctcccgggtttgagtgattcttgtgcctcagcctcctgagtagctgggactacaggtgtgccccaccacacccagctaatttttgtatttttagtagagctggggtttcgctgtgttggccaggctggtcttgaactcttgacctcaggtgatccacccaccttggcctcccaaagtgctgggattacaggcatgagccaccgcgcctggccttgacttcttaatttcagagttttgatattctgagcaatcttgttcatttatgtgactccatgtcatttaaacagctcaaatggatgagtcgtgtttgcacaactttagagaaattgtcacaaaggaacaggtcggttagatgttttgtctctgtaaagttcagattgttgcctactggtgacaagaattctttgtttttgttttgtttttttgagacagagtctcactttattgcccaggctggagtgcagtggcgtgatctcggctcactgaaacctccacgtctcgtgttcaagtaattgtcctgcctcagcctcctgaatagctgggatcacaggcgcatgccaccacacccagctaatttttgtatttttagtagagacggggttttgccatgttcaccaggctggtctctaactcctgacctcaagtgatccgcctgccttggcctcccaaagtgctgggattacaggtgtgagctaccgtgcctggctgaattctttgtttttctaccatattctccttaccctttttcttaaacaaaaggtcagatcccttgatagaagccaattatgtgtacaaaacaccttaaaataagtccaagcctggagtgtctgtgatctttttagttttgtaaagtacctgttcctgtattggcaacgatttacccaagaagccaccagaaatgatgcttgcttgactgagaaaaacttaaataagcctctctgtggggtttgaaaagctctgttctctacagttctgcaatttctgaaggcatgctaaggcttgactgggtctgttctgtgcagttataaacattctaaaatctgtggttgactaaatactccatgttgcaccaatttaaaaatctcattgtcatagcattatgactggtagagaaaggtcttgtggggagatctaagtggcttaacttgattcttaggatatttgtcattataaaataactgttttttcttttgcagacttccttgtgaaacctcctagtagaaaaagttcttgggacaaacttcatttggtaagtttgtttctcccctcctgccacccccgcccccctccaatactctctctgtgctgtttcgaggcaaggaaaaattaatttacaggttgatttttggggatctgtttgtcaatgtccatgattatttagatgagtttttctatgttcactttaatgtccttacatgtgattatttttttttttcactaggactcataccaggtcactttttctatatataattgcactgtaatagtgtactggaaaacttgtatttaagttgagattttgagttgcagcactaatcatttgtctaaaataaatagatttatcaatctccagttgtatttatttatttatttatttatttatttatttatttatttattgatatattttttgagacagtcttgctgtgtttcccaggctggagtacagttaggtgattatagctcactgcagccttgaacccctgggctacagcaatcctcctgcctccgcctcccagttgctgggactacaggtgtgtgccatcaggcctggctagtttggaaactttttttgtagagacaggatctcgttctgttgcccaggctgatatagttcttttaaattcaaacttgcttcttgttttgagttttcttaaattggtatatatctatatgaaaaataagacctcttattactagagttagttcagcagttcccccttaccttcttttgctttccaaggttcagttatccaaggtccaaaagtactaaaatatcaagagagcaagaaagagagacactacacattcatatgactttcattatagtgtattgttgcttgttctattttgttattagttgttgttaatctgtcactgtttctaatttataaagtaaacttaatcataggtacatacgtagaggaaaaactatatatatatatatgtatgtagttttcagtactacctgtagtttcagggatccacagggggtcttggaacatattccccgaggataaggcaggggattactgtagtgcaaatatgaattttaatgagaaaaacaagttctgaaaaatttgcgagttctttctccagtgtggctactaaaccttgtcctttttcaaaaaatgtccttttcatagacctttgtgtgtctcttactaggtaaatctttattagtgcctcttgtttctgccacctgtttagggaactgtagtacagttttattagaagacaagttattgccttggttttaagttcctaaatccagatcatttccttgttcaggaactgttgccttgctattgcctctagaacaaggatcaaactccttagcataacatttcaggttctttacaggtaggcttcaaacagcttgtcacctgttttctctgtgtaccaagttcatctcttgtagccacaccgacctacctcctgtctctcaaatactctccaaggtgcttttttgtcttactctgccgccatgccattcctgctcccctcttgtctcagtggctcaaaatttggctggttcagttattaaaagcttgagtcttccagaaagtcttccttaagtgcccagctcagaatctctttctctgctttttgcattaccatggaattaaatttctgtatctcttaacatactcttgtcttattagttatatttgttggtcacccccacaggattgggaatgcccttgaaggcaagaactatattgatatttgaattgtcagttcacagaaacactcctagactcctgggataccaatgccttctcagtataaattcttcttgactagggtttttgttttggtaagaataggggaggagaatagattggttttagtagagattggtcagcatagtcttgttgatttaggttactgttttttccccacttttctgtatagtggaggatcatagggtatatataatctgtgcccttgtagtccaagttgctccgtgtattacttgaggtattctttgcaagtataagttttagtttttgataaggaattgagtaatttctctttaacaggtgcctgaaagatgagattccatgttcagtaggaagattaaatgttggtttgcttctgtaaagatttctgagaagtcatatcatggggtggtactgatgatggagctgagagaagcatgcaggttccagctgtcaaattctcatatattaaggaaagaaaggttatttcaccttcaggcttggaataggaatcttaatcttcatttagccaggggggtgggggagtgttgcagattagatctgtagtgaaggaaatgtaatcctttttattttatttacgtatttatttttgagacagagtcttgttctgtcacccaggctggagtgtggtggcgcgacctcggctcactgcagcctccacctgctgggttcaagcaattctcctgcctcagcttcctgagtagctgggattacaggcatgctccaccactcctggctaatttttgtgtttttagtagagacggggtttcactatgttggccaggctggtctcgaactcctgatttccagtgatccatctgtctcagactcccaaagtgctgggattacagatgtgtgccactgtgctggccagaaacgtagtaacatattacttggctctgtagcatttaatatttgtattgccataataatgtaaatttgtaaaagtgttaatttttttttttttttttttgacacaaggtctcactcttgcccatgttggaatgcagtggtgtgatcatgggtcactgcagcctcgatctcctgggctcaagtgatcctcccacctcagcctcctgagtaggtgggactatgggcatgtaccaccttgctaggctaatttgtttttatttttatttttgtggagactagggtctcattatgttgctcagggtggtcttgaactcctgggcccaagtgatcctcctgcctcagcctctcatagtgttggtcttacaggtgtgagccactgcccctggccacgttcttatctgaagaagcatgatctaggtttgaagagaaagatgtaaatgtatttaattttgatgccaggaaacatactgtttaattaatatgtgccccagattaaaggagactaaagagatataaaaatagcttcaatatatgatcccagactagatcctttaccaaaggggggaatattgctgtgaaggataaaggatatgattggattcattgacaaaattggaatagatatggtagattattatatcagtgttaaattttctgaaattgaaactagaactgtggttatatgagagattatctttcttaggaaatacatactgaagtagtaagaattaaagagatatttgtatgcaagcctcttttaaatggttcaaaaaaaatgcacgtgcatatgcgcgaacaaaaaaggagacagtgttggaaactgtcctatccaaattctctgtaatgaaacatttaatgaagtacagtctttatataaccatgtgttgtcatatgtatgtacatgtacatactaatttaaaaagtgcttattacatgccagtaactattctaagcatgttatatgcattatatcttaattctcacaattctttgatgcaatgattgttctccttgttttctcgatgaagaaactgaggctcagagaggtagtatgatttgctctcaaggtcatagagttagtatatggcagccctgagggccattgctttacattcctgattgttttttcttgaggctattatcttaacactctgagtttaaatgaaaacctttcattaaaacttattttgagttttctgtttaaaagctttttttgtagaaaaatttgttatcctaattgcaaatgttttaaaagtttaaaaactgaaagttgctgctcccactctcttccctaggaaggtagattgttaaccattatatagttttttgtgtatgtataaacatactttggaattaatacagacaatgcttaggcatatttttattttaacttttaaaattacagaacattgaaaacttatggcaagttgataaatatgtgttgtgttttttttaaatagaagagtatgtagtctttggcaataataacccctctgcaacccttcccccaaatttatatgcttttacctagtatattcatttttaagaataattagggctacagaaatagcgacttgtgcatagatatggataagggtggttgttgcggcttttttggtggcaatggaaaaatggaaacaacctaaatgtctcactaattgatggatggttaagttatgatacattggggtataatggaatactgaactgccatatgtatatactgacataggagggatttgttatattaattaaagaatatatactgaagaaactacagtatggctaccccaccccacccattttgggggtagataatgtgtgtctttgtacactcatgtgccacataatgatgttttggttagcaacagacccaagatacgatggtagcctcatgagattaaaatggaactgaaaaataactatcacctagtggagttgtagttgtcataatgtcttggtacaattactttttaaaaataaacttagtgtagcctagttgtatagtgtttataaagtctgtagaagtgtacagtaatgtcctaggccttcacacattcactcactactcactgacatacccagagcaacttccagtcctacaagcaccattcatggtaagtgttgtcctatacaagtgtaccattttaatcttttgtatcatttttactgtatcttctctgtttatgtatgtttagatatacaaatagggagcactgtgttacagttacctacagtattcagtacagtaacatgctgtgcaggtttgtagcctaggaacaacaggctataccatatagcctaggtgtgtagtagactgtcccatctaggtttgtataaatacctctgtgatgtttgcacaacagctaaatctgctaatgatgcatttctcaaaacatgtctccattgttaagcgaagcttgactgtatgtgcatagagaactgtctggatagacttatgaaatagttaacagttgctatatttacatgtagatgaactaaagggcagtaaggagtgaaaagcgaacttctgcttaccaattttttttaaataagtttaactcagatatattaataacataaaattcacatactatacaattcacccatttaaagtgtacagttcagtggctcagtatattcacgaagttgtgtagccatcaccacagtccattttaggaccttttcctcacctcagaaacttcaggccaggtgtggtggctaatgactgtaatcccagcagtttgggaggccaaggtgagaggattgtttgaggttgggaatttgagaccagcctggacaacatggtgtgagcctccccttttccccccacaaaaataaaaatagccgggtgtggtggcttgcacctgtggtcctggctactctggaggctgaggcaggaagatcgctggagcccaggaggttgaggccgccgtgaaccatgatcctgtgattacagcactgcaactccagcctgggcagcagagcaagaccctgtctccaaaacaaaacagaacttcatagctgtcaacctctcttaccgtcggtctttcccagctcctggcacccactaatctgctttctaagattttcctgttctggacatttcatataaatgatatcataacaatatgtggtcttttgtgactcgcttcatcatttagcataatgtttttaaggttcattcacgttgaagcatgtatcagtacttcattcctttctctcttttttcttttttttttttttttgagacagggtctcactctgttgcctaggcttctggtgtgccgtggcatgaagatctgggctcactgaaacctcgccactgcatcctgggctcaagtgatcctcccactttcagcctcccgagtagctgggactacaggcacatgccagcacgtccagctagtttttgtattttttatctttttttcttttattattattttatagagatggtgttttgccatgttgcccgggctggtcccgaactcctggccttgagtgatccacctccctggacttcccaaagtgctgggattacaggcatgagccaccatgcctggctcaatttttgtgttttttgtagaggtggggtttcaccatattgcccaggctggtctcaaacacctgggtaaaagcagtgtgctgactacatcttttcaaagtgttgggattataggcatgagccactgtgtctggccacttaattcctttttttttttttttttgagatgagtcttgctctgtcaccaggctggagggcaatggtgcgatctcggctcactgcaacctctgtctctcgggttcaagtgattctcctgcgtcagcctcccaagtagctgggactataggcatgcactgccatgcccagctaatttttgtacttttagtagagatggggtttcaccgttggccgggatggtctcgatctcttgaccttgtgatctgccctcttcagcctcccaaaatgctgggattacaggtgtgagccactgtgcccagcccacttaattcctttctatggccaaataatttgccattgtttagatatgccacattctgtttattcatccatctgttgatggacatttggtttcagtgagcctagatcttcacgccactgcacaccagtagcctgggtgagagtgagaccctgtagtggaaaaaaaaaaaaagaggaatgaagtactaatacgtgcttcaaaatagcccatcccacctttgggctactttgaataaatctgctataaacatgtatttgcaagattttacatggacatgtttttgttttcttggatatatacctaggagtaagattgttgagtcaaatggtaactctgtgtttaattgagcaactgccaggctatttttcaaagaggctgcactattttacattctcactagcagagtatgaggttacttgtttactttttacatctgtatcttatttactgagtgcatgcattactcgtatatctaattttaagaagtattacactgcttatcagactaacagtaatgactcaatttcttccttttgtactgttggtataactaccactgtggggttcacattttacaagtcaggtgctgtaatgaaccctgaatatttcctaaggattggtcacatctgcgatttgtagtgttttttgtttgtttgtttgtttgttattttacataatacccagagtggtctaatgctctttctagttttaaaaggaacctttagcaagtacttgattctgatgggttgcacagtttcctgtgatcttggctttttcttatggatttggaattcctatagcagttttaacttttctcagatacttaaagcagcacctcttactttgaactattttaactatttcttgtctcctctggactgtaagttctttaatctccctttgctgccacatctaggcctctacctaaacctgtgagttacacaccaggatatctttcacatacttaggcttttatccgtactgcctccattctaaatcaagccactagtctcttactgtaattgtctcctggttctcttctttattctttttctcttttaatccattcaccccacatcaaccagggtgatcttaaaatcaaatcacgtcactctgctatttaaaacctgtcaatggctccctgttgtatttggactgtattttaaacttactactattcacatgatcttttcctttacatttctccaacttcaagttgtgccactcttctttctgattcggtacagtttagctacaatggtttcctccttttagttcttcaaaattatcaaggtctttcctgtctgaggaacacatgcacttccgtatattagaaactggccttgccccaccaagtagtcttttctgatcactttatctaaagtaggtcttcggtacccccaaaccccagtccctgtctcagcatcccgtttgtttcctttatcacatttagcacaatttgtaattattaccatctttttctgtcttctgcgatggtatataagttgtattaatgcagagctaacagtgtcatactgtctaacacatactagattattggtaaattttgactgactgcagtgcagaaagaacatcattttacagaatctatttggtatagaaatggaaggccttatttctgggtgaagactatgtttaaattgagacttttaatgccgagtggcaaatctttgtcttggtatttctgtactcattaaaaaattagagtaggccaggtgtggtggctcacacactttgggaggccaaggcaggcagatcacttgaggccagaaatttgagaccagcctgatcaacatggtgaaaccctgtctctactaaaaatacaaaaattagccaggcatggtggcatatgcctgtaatcccagctacttgagaggctgagacaccagaatcacttgaatccgggaggcagaggttgcagtgagctgagatcgcaccactgcactccagcctgagcgatagagcgagactctgtctcaaaaacaaaacaaaacaaaacaaattagatttgactgggaagatagcttatgtatatatatataatgtgactgcagattgagagtttattttgtaattggaatttgatttctagttcagtgtcactacagatgagtacattttagttgggacatccgggatgcttgtgagagttttttcagatttctctgaaaaaaatctgaaagacataacagtgcatattgataggcttactgtataaacagtggtttcatgagagataaaactttgactctttaaattaattcttcaataactggaggttttgaggtagaattgccattatggttaaaaaaactttatgtgaaaatttcaaatatataaaagtagagaaaatagtttaataaatctccattaacttatctcactggtcttcaaaagttaccaactcatgacccatcttgtttcagaggtactcctactcattctgcctactccttggtatataactttatgtattttatagttaaaagataaattctttttaaaaacccatcaccacacacaaaaacctataaccacagtaacattgtcaattatatagaaaattaataactccttaatatcatcagatatttagtatgtggtcagatttccctaatagatgtctcagcttatactttgaataagaatccaaataagatctatatattgcagttggttgacatggtcacttaagtctctcttaattctgtaggtttcccttctatgtcggtcttttgtcttgctatttaaagaataggggttattttcctgtagttttccatagactagattattatttgcatcttgtatttcattagcagttgtaaaatagtattatcaaattcttttctttgtatattaggtagaattcttccctcatcaactacttcattctatactagttcattttgtgtaagaaaggcgggatagatacttgattctttccccttacttgctagttttcaaaaataaaaggttagttccttaacatcttccactggtgacctgtaggggtgtgcgtgtgtgtgtgtgtgtgtgtgtgtgtgtgtgtgtgtctgtctctgtgtgtgtgtgagagagagaatgtttctttatgaactcatatttaaacatcctgaaacccaatccattgcatttaaccattttgctcaaattatttcatttttagctagtgagtctcttcaaattgactcccaattatttctgacttaccctcagtagtcttttatatgtttcttacattccagtttaatatgatgtttcagaatcaaattgtacattttcttttctagacctggaattggttatattttctttcaggtgccccatcttcttttgaagtgggaattagtctttagggaccacagtctaggggcttagaatgctcattgctgctgggttgatactgtaacttttttgcagcgtttatttttatcttatgaagagtttgattatattgttactcttcacctctgttgtgtgtgtgtgtgtgtgtgtgtgtgtgtgtgcatgcgcgcgcgcgcgcatgttttttagagacaaggtcttgctctgtcactcaggctggagtgcagtagcataagctcactgcagccttgaactcctgagctcaagggatccttccacatcagcctcccaagtggctaggactacaggtgtgcacaaccacctaattttttttttttttcagtagagacagtcttgctatgttgcccaggctggcgttgaactctggggctcaagctgtcttcctgtcctggcctcccaaattgctaggattataagagtgagccactgcacatggcttctgtatttttttttttttgagctataagtcatatcacataaaatccacccttttaaagtatacaattcagtggtttttagtatagtcataaagctgtagaaccattaccattacctaattccaaacatttcatcaccctgcaaaggtaccttgtacccattagcagtcactccctattcttccctcaacctggctcctggcaaccactaatctactttctgtctctgtggatttaccttttctggacatctcatacaaatggaatcacacaatatatggccttttgtgccccaggttctctcatttagcataatgttttcatctatgtgtgtcatgtatcagtattttattccattttattgctggataactccattatatatactgtgtgtgtgtgtgtgtgtgtgtgtgtgtgtgtattttttgtttgtttatccattcacattttgtttgtccattcattgattgatgcatatttgggttgtttgcacttttggccatcatgaataatgctgttacgaaaatttgtgtagaagtttttatgtggacataccttgtcagttctcttaggtatatacccaggagtggaactgatgggacatatgatgactctaaacttttttgggaactgccacacttttcctcagaggttgtaccactttacattcctgccggcagtgtatgggggtttcaccttcacattccatctacatctgacattagtatcttcctcactggagttatattttgttatttaatagttttgcaaaatgcattaaattcacttccatttaaattgtttaagatacagcagtttgaatgtgtcaatgatgctatctttagaaattttattctaaaacacaaatatcttttgtgtaatattaggacagttttttaaaagtaattcagtatgtttcttttttgaaaaggttctttataacagtatcccgttcttttaataagttcataccctcaaattttctctgcctttgcccttctcctttttaattccaataagtgcctttttgcacatctttaccttcctatctaaagtagcatttctgttacaccatcaccaaactctgcttaattttctttgcagcagttgcctactgcttaacattagttatctgtttctttgtttctaatgagaaagaccaacaataaaatcaagttccatgaatttctgttcacagtggtgtccccaaagtctacaacagtgcatggagtgtagaaaatattgaataaatatttattgaaaagaatgaataaatgagataattttacattagtttcagttcttgagctaggccaaatcacaaaagtttggcttggtttgaagagtggttaagaatgatgactccaacttggtctgttactgaaccataaggttcttcctcatccttccagcctctaaaaaatggtgcacccaaaacccctgtccttagtcatcttagcctctccatttatacttgctcctgcatttggctttaatgccattcacacactgatgtctcccacatttatgtttatatctctaggctccatcttcttgatctctagtctggtttaactagcactttacttggcatctttgtttggatatgtgataggttttcaaacataatgtgtctaaaatggaaactttaatttcttgttccttgtccgttgagctgtctctgcatggcacgagaagaatagatttttcttacaatgctcttcatcaataaatagaaaatccttgcttccggttgctgacacaaaaagcttgacttctctttttctatcctatttaattaatccactcaaatcctatgggcagtattttcaaagtatatccagaatcagtaacatcccaccacttctatctctactaccttttcattgctatattgtctcttgctggggttaatgacgctttctaattggtcttcttttgccccttacccccagtagccttgactgttctctacccaacagccaaaatgattcttttttttgtttttttggtttttttttgagactgagtctcacactgtcacctgggctggatgtgcaatggcgtgatctcggctcactgcaacctctgcctcccaggttcacgttattctcctgtcttagcctcccgagtagctgggactacaggcacacacccccatgccctgctaattttttgtatttttagtagagatggggtttcactatgttggccaggctggtctcgaactcctgacctcgtgatctgcctgccttggcctcccagaatgctgggattacaggcgtgagccaccacacccggccaaaatgattctttagagtaagtcatctcctaccattcctctgctcaaaatgcctcaacacaatctgggccttgctactgcttttatgttctcttgttcccttgcttacattgcccttaaaagagttttatgctgcacattgaagcccagactccctgaaatatcctgtgttacagaagcttagcaaactagaaatgttggttttgcatgagactgttcaaagaaaagagcaacttacttactctttgtataagcctatttttgggtttctagttggatattctttcccccttttttgttcttataaaaccaggtaaaggtattagtacagattgtaagtttttagaagagcatagaatatttgggtaataaggcaaatttatttttcctattttgctcgtaagtcagtttggtttcctcagatgggggatccattttgaatttagagataaccacaaaaacatcctaaaatactacaagaataatgattttgcatttgcaggttgatgttatttatttttttgagacagagtcttgctctgttgcccagactagagtgcagtggtgtaatcacagcatactacagccccaaccttccaggctcagttgatcctcccacctcatcctcctgagtaactgggactacaggcatgtgctgccatgaccagcttttttttttttttttttttttttttttgagacagagtttcactctgttgcccaggctggtctcaaacttctgagctcaggctatctgcctcagccttcgaaagtgctgggattataggcattaagccaccttgcctggcctgtaggttgattttaattgttgctttattcatccaagttttatgatattttttgttttactacgaacattaggaatgttagcctttgatactgtttttgcagaaacaggttaagactaacaggagttttacaaaggaactgtcaaattgggatttgactagtgggaattggctgggtgataatcaactttttcttggctgactctgatcagcttcttaggcctgtgtatatacaatacctttgtgaggatatggccgattaggggaaaaactattgccaattttgcctcccctcctcttttttttttcttcttccccctcttcccccccacccccagacttcaccataagggaaagaagagagccttgttggacactgaagaagggacggggatttctcctcctaatctgggcctcttgtcatggtaagtacaaggaaataagagtaaaaaaaaaaacaaaaaaccctgtgtcctgacaattaagtgaacactaataaattcatacttacccatttttgtttttgtaagaaattatttctttttctttcccagatctcttgtgtcttttcttttcttgtttacttagtagtaatagagtactccaatatacagagcagtttcatttctgttaactttaatcctgtgagctagatgttgtctcttatttttcagtcagcaagtaaatggaatcaagactaaaacatacagttctcggactccaggtttttaattccttttctaggaagtagcgtgtagtgaaaactgtgtgtgtgtgtttgtgtgtagacaaattgtaagatggtaatctgcatatttacttaaaaatttttttaaattgacaaattacatatatattgtgtacagcataatgttttgaaatacatatataccttgtggaatggctaaatcaagctgattaacatatgtattacttcacatagtatatatgctttatgaatttatagaagcaattccctaccttccctgttttgtctctttaaggcagtattttgatcccatagtaggtggagcagccctgcacaccccctcctgtatctttaaccagaaagagaatttaatggacaatttaatgacttacgggccatttcgggcccagctcaagcagagaagatggagcaacaagccagccacattttcatcaatcctgaggaaatgtaaacagtgcttcaaggcttaaaaaagaaatggtcctctgtaatattgtccttcttctaccttgtgatgtttcctagatccaaactgttttatgctgatgcacagagaaggaattgaaaaggctacattaatttcaagcttcattagggacgtatggaaaatgcttttcaaaattagaaaaagtaaaacaaaaaaactagttgtgcagaaatgtcatattaaaaggaagagaaaggtaactgcccttatcttaaaggcatgccaattttttcttagtttgtgggcattacaactttatgatttatcttatacctaaacattgatgaacttttcctgttattttcttgattatattttattttattggttttcccacagagttttcaatgaattgaaaaagtgcttgtctagtatttcagccagtgctaatgaataacaaatgatgggcttatgaaagcagctctgttctgtattgagggtttgtccttcattgtataccacacggctagtaacagtgtggtcctcttcctggtgctgctgggttctccatggtgcctagcagaaagtcttcctggtgttttccctggcctgatgctttagacaacgcttgggagttgattctgtgtgtactagttggggagtagcatggccatgtatgtatcttttgtttttgtttagtttctcataaagtagcattgttacaagtttttacaaattctcatttataactctaccaccagaacccatggttgtattccgttttcttttttcttgagacagagtcttgctctgttgcccaggctggagtgcagtggtgcgatctcggctcactgcaacctccacctactgggttcaagcgattcttgtgcctcggcctctcaagtagctagaattacaggcacctgccaccatgcttagctaatttttgtattttcagtagagacggggtttcgccatgttggccaggctggtctcgaactcctgacctcaggtgatgtgcctgcctcagtctcccaaagtgctgggatcacaggcatgagctgctgtgccccattggttatattcctttctaactagttcatgtctcatatgtatgttttatatagttagaatgataaaataattaagtttctattttgcttatttcacttaatgaattaaacattctcccatgttgattccttggattcctaatgatcattttactagctgtataacattctgcaagttgttgaaccattgattttaattatatactgtataatagcatttagagtgtatgtccttaatccttagtttttgtgtagacaattcaggagcattgaacattctttttgtttttaactgtaaaccgctgtactaatttgagagtgacatttttcccttgtcttttatactcttaaaggttcttaaacgagattggagtctgtctttgagaggttaagcattagcaaaatatattttcatgttttgtggaaaatctcaagcctatgcagagagaaaagtacagtgcactcatatgaacatcattcagctgcagtaatcataaattcatgactattcttgtttcatttgacctcttttacccctacccttttggcaataatcccaagcattttatcaagggaaatgtattgtttgtcttctaataccagtcttacgaatatgactggaaatgacagtaggactgataattattttcacttctacgctttgcaaacacgaacactagatatgaattcagttagtaggattaattgactggtcatcagtctctccttcccatgtactttatttttttgaaatggagtttcactcttgttgcccaggctggaatgcaatggcgtgatcttggctcactgcaacctccgcctcctgggtacaagcgattctcctgcctcagcctcctgagtagctgagattacaggcgcttgccaccacgcccagctaatttttgtattttagtagggacgggatttcaccatgttggtcaggctggtctcgaactcctgacctcaggtgatccatctgcctcagcctcccaaagtgctgagattacaggcatgagtcaccgcacccggcccttcccatgtactttaaatatttatctctatggttgacttctgctctgaagcatgtactttcctctcttagctgcataatttagccaatagcagaaactagcctggaactgtggtgactggccctttttcagtattttgtagatgaccccactgactttatggaggtggatggagactacgaagtgccagatgccacaatgcctggtgttcctcagcagtaccaggaaattaatgacatggaatacatctctctaataagttactgcttatagctaggatacgtttgtttccaaaactgttaccagaccagcgtttcccaatttatcttcttccaacttctcaccttattaaccatctcaagtttggccttcctcacctatgaaactcacagaaactataataaattcaggctaattcaactgctaaattcaactgttcagccacatgggatcaccagtcccctagattcaatgaatcctaatgttacgtccttggggattaaatgcatttttgtgtacaaggggagaaaagttctgaagctttacaggtaatgtgaattgagacaatagcttttaaaaagaacatttgtttgattatgaaaaataagtacttcatattcttgccttgctggcctaattctcagttgttttatgttgaaaatcatgcattttcagttttcagtagctactttggtgatacatattggtctggattagcaccctggtgagtgtgccagcaagagtgagtaggtaaatggtttctttttgttctttacaagcctgctacattacttcagttctgtgctaaaagtcagcagaaaactaggtcaaggaatcacttaaagattaataatgggtacctctgtaaaatgaccttacacagaataaaagtctaggccttatgagtttatgtgaggtaaaaagttaatgtgatgctgagaagttatgttaaaagtatacttttatgtaagatttttgctcccctccatgtttacatagcatttccttactatcccatattggtttatgagaaaaatctccctaaattgaagattcttcacatctttcatttggtctctttttttggagacaggatctcactctgtcgcccgggttggagagcagtggtgcaatcatggctcacctttcatagattagcactaggagaatggttttaggaaaagcctggcttttggagtgaagcagctttaattggtatttagtattagagtatagtagagaagcagctctgatggtttccagacctctttttacttcttaaattattgaggtacccccaagagggtttgtttatgtgggttatgtctgtttataccatattagaaaataaaactgagaaatctttaaaatgctcataaattcatttaaaagtaacaacaaaccaattatatagtagcataaataacattttttgatgaaaaatatttttcctcatccaaagatagttttagtgttaacatttttgcaaatctctttaatatttggcttaatagatgacaggtaaattctcatatctacttcggcattcagtccgttacaatgttttctttgaaatatataaagaaaatgcagcctcaggcagatacgtggttagaaaagtagttaaaaaaaggaagagtattttaagttttcccagataatttatatttttctttaataccaaaccaaaacttgacaagtgatgtgtttttttgtttttgacacaaggtcttgctctattgcccaggcttgaccgtagtggcgcaatcacagctcactgtagccgctacagtgcacctcaggtgcaggtgatcctcccacctcagcctcttaagtatctgggactacaggcatgcgccactgtgcccatctagtttctctattttttgtagagatggtgtctcaccatgttgcccaggctgggcttgaactcctgggctcaagcgatctgcccactgtagccccccaaagtgctgagattacaggcatgagccgtgtacctggccagtggtggttctttaaaggttagttgcagtgtagaatctgaaaccatatcagtgaactttttgtattatattacattaaaaccattagtctgtcttgtactttgagtgaatcttttatccacatatgattttgtaacatgcattggtcattaggaaaataatgggttcgttgattgaggcagatcttcaaaagttgacattttattatagtgtgtgttttttttttttttttaaatcacacttggtaataccttcactttaaagataaaagttgtaagtactaggaagctataaagttcatggtgggagatgagaggttttccaaaatctaatctttgcacaaaagctttattattgacaactaatactatcttttgttgttactgtttgtttttttcctaatagtgtcttttggaaaaaagacctgccaaatgtccaagtctgcattaccatagtttttccatcagttgttcttccaattaagaatgatactcaatgaaaaaaaatggctagttcatctcttaattgaagcatttgcacaagtgctttactttgtgacaccgtaatattgcaccatacatcagaggtgttttacttgtatttcctctgtaaaaaagacttctacttaagggtcaggatttaataaatagaatttataatatttccttgctttatcaaggtcattcttatgaaattggcaccactgtctcaattgtgctaaggtaccagcagttttacctaccaggtttttttgcactattagtatagatgtcaatacagtgaagaaaggcaataataccgtaatattattgggaaggttttgacctcgcagggcccctgtaagcatctcagagtctgtggacttcattttgagaatcatgctagtgtagagtattaccagtttatgattatggttgctgttagtaaaaccttaagtgttgtttatagataagaagaaaaactctttttgggggaagacttacaaaattattggaattgtgttaagtagtgtacacagaagcaaccagtaaccactggttataattcttaatgctgtcagttgaacatgatgtggcttttgctcttttaaaaattgctgtgtggggccagtcttggtggctcacacctgtaatcccagaactttgggaggctaaggtgggaggattacttgagcccaggagtttgaaaccaacctggacaacataacgagaccttgtctctactgaaaataaaaaaaattagcctggcatggtggtgggcgcctgtggtcccagctacctgggaggctgaggctggaggatcacttgagccccggagttggaggttacaattagctgtgattgtgctgctgcactccaacatgggtgacagagcaaaaccctgacttaaaaaagaaaagtgctgtgtaaacagattctattataatttagtcaggctttgtgatagatgacatttctctcatgtcttcctataccataaaaattcataatgcaaaatattactttttaatacaaattgtaatttacatgtcatctagatgagaatttattgcttcctcttttgaaattgtcttaacagaaatctattttgtaatataaggcagagtaaatgaaggatagtctttcatatattttcaacttgggaaattcagttcttaagcttactttttcttagaaattgttttcaagctttctattatgaaaatttcacatataaccagagtagacacaatggtagagataatgaactctcacccagtttcatgaattactaattcatagatagtcctgtttcacttatgtcccgcttcttccttactcttgccccagttattttgaagcaaatttcaaatgtcacctttcatttttaaatatttcagtatgtatctctcaaataatttaagatcgtaacttaaagagaaaaaagcattatatcttggtttctcttaaaagtagtgtggggctgggcacagtggctcatgtctgttatcgcagcactttgggaggctgaggcagctggatcacctgaggccaggagttggagaccagcctgaccaacatggcaaaaccccgtctctacaaaaatagtagccaggcgttatggcacgcacctgtagtcccagctactcaggaggctgaggcaggagaatcgcctgaacccaggaggcagaggttgcggcgagccaagattacaccaccgcactacctgtgcactacactaccagtgcaccactgcctgggtgatagtgagattctgtctcaaaaaaagaaaaaaaagtattaagaagctgttagtgcctaatagaaatattctaacctctttgacattttttttgcatcaatgtgttttcagactagatgtaactaatgtattggatagaaaaactttttaagatcaatattgtttccttgagcttttctgcctgttcaccttggtctttgtactttcattgtgattatgctagcagatatggcagaaaaaccaaatatgaatgattagaagctttgaaattattttaaggttttggacttttccaggatgaagagactcggcacagccttgagtgcatccaggccaatcagatctttcccaggaagcagctgatccgggaggatgagaatcttcaggtaattataggccacttttaaatgtaaaatatttatttagcattaactgtatagcagagttaatggatttaagtgtaacgtactatattatatatatatataacatacatgtagtagaaatgcaagctggaaaacatctcattttagcaagacttatttcctgagaatccactgtttaagatgatcttctctgtatcattcctttagtagttcagaatttgaataactagatatatttgaattaggtgggtataaacccatcctctttagcttccttatctacttatgtgctgtgttttcaacttcagtggcagaggatttaccatccattcagccaactgatgtttgaagcttttttttttttaactgcttcagaactctgaagggtttctttcatttcgaaggttcctttccttgaacttcatggagagagcacagagtttgtgggccgtgccgaggatgccatcattgccctttccaattacagacttcacatcaagttcaaggagtctcttgttaatgtaagtgattaccagctgttctccctctaaggtaaatggagaaagtaagtcaaaaaacttaatgctctcaaagagaggagaggcatacagaattgggagagaaagcattatgtgctctgcttttctcacttaatttagcactcaaggaacactggcttggccaggcgcggtggctcacgcctgtaatcccagcactttgggaggccaaggcaggcagatcacgaggtcaggagatcgagaccatcctggctaacacggtgaaaccccatttctactaaaaatacaaaaaattagccgggcgtggtggcaggtgcctgtagtcccagctactcaggaggctgagtcaggagaatggcatgaacccgggaggtggagctggcagtgagccaagatcacgccactgcactccagcctgggtgaccagagcaagactccatctcaaaaacaaacaaacaacaacaacaaaacacactagatcagcaagcagctcttatgcttgatttaaaatgatgtgtgtagttgtcagctgaggtgtccattgtttagtttaacagtgaatgatttgcattaggtaatgctgtatcattaagctttataaaggtataaaggctgaatgggcttttattctgcaatctttagtagttaccaactgcctcagttgagataattcccttggccttaatgtcaaaagatgagatgcactttgagctcactgcagactctcattacagcatgaggttactctaatgactccttggtggtataagtgtagatgttaagtataatgttgatttgcataatggactatgtattactgaagaaaaggaagcctcttgattctcaagagtacatttacccttttcagttatgaatgtcctctcagtgaactggttcttccagtgctctgctatcattagccttaaatgaaacgaataaaggcttgaaaattcatgtacttacagcaaatgccttcttccttctttacttgccagtgttgtggctttctacactccacttccagcacagagaagtgtattatgacacgttaaaacagctcaggactgtaattccatgcagactgtgttttggcttcattttgggattctttgaaatcttgttcattcgttttactcagcaattaaaaaaagactcagtggctgtcattttttttttggtagttgacattttttacttcttattatcattcttctttgtagttaagcatttatgtccaggagcagttttggcctgaatcccttctggcttctagatttgggccatgattatagcagttacatcagttttctgtctatcagctaaagatacacaccagattcattaaggaaagaggcaatgctgttctttcatactatgtagcactctgttcagaagggtccacttggatttgagtagtcgtgatggggaggggaaaggggggaaacacctataaaatcccagcaactgagaattccccaccagctactgtggaagtaatgatagtagtgtttagtagaactgcccaatttaactttgtgttctttcagtgtttgaattgctggaattaaattataattaaattgcatgtgagaatgatagtttcatatcattgcattttctcatatcatcctgtatttatcagtttattggttgatggccaagtgtttcagagactattttagaactatttgggaataaggtctgctggaaagcaagcaggaaagaaagaaagaaagaaactgatcatgtcattcatcagcttaaagcccttcagtgtttcttcactacttctatgatgaagatcagattgtttagcatgacatgaagctgtctgacaacgtggcagggaccaaggatcacagcttccctcctttccccattatcacatttttacttgtaaaagcagcctctttgtactattcagccatacctcacacctctgtgttctcttttcggcccaggaacttctgttcatctgtcaaaattcagttcaggtgataacttctcctgtgaagcctttcttagtcccagttccctctgtgacagttaactacactctttctttgctttgtctttatcttgtacattcttttataacatttaccaaataggttgtaatttttggttaattgtttttgtgtcttcaagatccagcatgtctcctggtgccacaatattcagtaaatattaaatgaattgaagttaatgtgggtttgaagtgggcattagaaccttttccccctttggtgtttaaagctcattttaaaacagtacacttctgtgtgaataggctgtggcttaattgtctctaaggatagctgtgtgagtaggttgttgactggaattgttgatcccccattgtgattgagagataatgcttaaggaaacttgccactgttctttcttttgatcaattttcttaatctgaaagtgttttttttctgttagcatcataaccctctaaggcatagagcctacatgttacttaaaaagcccagggtaggccgggtgcagtgatgcacgcctgtaatctcagcactttgggaggctgaggcaggcagttcacctgaggttgtgagttcgaaaccagcctggccaaaatggtgaaaccccatctctactaaaaatacagaaattagctgggcatggtggcatgtgctactcaggaagctgaggtaggagaatcacttgaacccaggaggcggaggttgcaatgagctgagatcacgccactgcactccagcctggatgacagagggagactctgtcaaaaaaaaaaaggaaaaaaaaaaaaacacccaaggtaatggctttgtacagaaaaatgatggtgtaaaagtattttggcattgcagtgactttaaaaatttcagattgaggccgggcgcggtggctcacgcctgtaatcccagcactttgggaggccgaggcaggaggatcacgaggtcaggagagcaagaccatcctggctaacacggtgaaaccccgtctctaccaaaaatacaaaaaattagccggacgtggtggcaggcacctgtagtcccagctactcaggaggctgagtcaggagaatggcgtgaacccgggaggtggagcttgcagtgagccgagatcgtgccattgcactccagcctgggtgacagagcgagactctgtctcattaaaaaaaaaaaaaaaaaaaaaaaaaaaaaatttcagattgagagagactagaactcctccataaaaataaattaatttcatcacagctagtgctaagagattcctgaaacctgaaacctggaggtacttaggaaacaaggattcttcctgcatcgggtcctggatggagatcagacagttggtagtggtgttgcccctccctctttccttcccttagcaaataagtatttcaataaaatatgtgtatttcaataaaatgttagatcaggaggctctctttaaatgttattttatctatatcaaacacatttaaaccatcaaagcccagacataccagcatatgttgtggcatgccccagttcatcattttgtatgcttaaatcaaaatacttagcacttcagaaaatgatttaccatcaagttttaaatagctacctgatatcatatattctcttttaatttcacagcacattgagtaaaatgtgtctgtaggttttgataccgtaaacatcattactttaattcacacattcactgaatatcaagttccagttcctgtggtaaagaatctctgtagtagagtttatgtgtagcatttaaggtatacattgctcctattctgtgcttttcccaaattattatatatttacagacatagttctttgaagcttagataaattataaacaagtgttcaagtggaattcatgaacgtttaaaagtttgtttgtgtgtgtgtgtgtgtgtgtgtgtgtgtgtgtgtgtgtgtgtatgtgtttgtaatttaatagactgcttctcaatctgctgcttctaaaatccctgtaagtagtatgaaaatcctaggcggttgctgcacctgtgcttggagcaaattggttttgagtgttagatgctcaccttgcaaatcagcagaatgtttcccctctgcatgagtccttttcctcttactggaccaaattccagttgtatgctactaggagaacaatttgtagggtaaggaaaaagccctgcagtttatacataagcagatggaattgtgaccttcaaaaaaatgtagaacaagtttctgttagaaataatttgtaaaatcaacactagtttttttttctttcactttgttttttggagacggagtttcactctgttgtccaggctggagtgcgttagcacagtctcggctcactgcagccttagtctcctgggctcaagttattctcccacctcagcctcccaaagtgttggaactacaggcgttagccaccacaccctgctgcgaaggaggttattgttaacatttaatgcactttgatctagcattcatataacagtgggagcctctgaaagcagtgctggaggcttgtaaattgtcaaaggtgaacaatagagtttgaatcttaaaccagtgacagtcttctgctgattagtgggtttttggtggttgttttttgaaacagggtcttgctctgtcgcccaggctggagtgcactggcgccatcatggcccactgcagcctcaacttcctgcgcttaggtgatcctcccacctcagccttctgagtagctaggtctacagacacatgccaccgcgttcagttaatttaattttattttttgtagagatgatgtctgtgttgcccaggttggtctcaaaactcctgggctcaagcagtgcacccactttggcctcccaaagtgctgggattacagatgtgagccactgcactcaattttttattttattttatttttattttattatatttattttatttttatgttatgttatgttattgtagtgacagggtttcaccatgttgcccaggctggtcttgaactcctgggctcaagcgatcctcctgcctcagcctaccaaagtgctgggtttatagatgtgagtcgtcgtgcccggccctgattagtttttaaatgaaaagatttttgtgcccagatattccactttattactgattttagatttagactcattatttttactcttttactgccattttaacttcacgtgtacaagattagtacttcccattcaggctataaaaagggtgtttgtttttaaaaaggtaggaattatcccactctagattctggtgtttaaaaataatgcacatgtatgcacacacacccagaatgaaatgaggtaaatatagtagggtatgatggcatcagttccctctggaatgtgacagtactgtggacataacctgtgcatgtctgtatgtctgttaaatttttaaactgctgctcttctgctttttttggattgatgctcttcagggtgttagtgtctataatgtaacttggctttttgaggaattggttgtagcactgaatgtgtttgatgcattgtttgagcatgagtttggtgaaatttatattaggaaaagcattgtaaggtgagattgcgttacctggcaggtggagagatagaggagagaggagcaaaaagaaaatgagttgctacaagacattgaatcagtacgtttgagaggatttgaaagtgagtttatcttgctactcttttacaaaaggaattgcatctgaggagttttgatttaaactctgttttcctcttgaagatccctggtggagaagctacttatttgtgaaagaaaaactaaagtagagctcatatggaagagaagcccacgtgtaggggcagaaagaaagacacaccgtgtatggtggaaggagcccaggctggaggacagacatggatcctggtcctgactttactactatattagcttatagtgtagtagtttaaccttcctgggctgtaaagtggactggctcttgaatctgtaatttgcttttgaggttgaatatagggtatctctagttatagaaatgttaagagattgttttcatatgtgaggaaatttgaacctaaagcagtgtagtgggccttaagaaaatagagaaacagtatgttttggatggaggtatgaacaggaaaagaaggtcaattctgccttttagaaaaggcaatctggactgggtgcagtggctcacacctgtaattccagcactttgggaggcctaggcgggtggatcacctgaggtcaggggttcgataccaacctggacaaatggcaaaaccccatctctactaaaaatacaaaaattagctgggcgtggtggctgggatcacaggtgcctgctactcaggaagctgaggcagggagaatagcttgaacctgggaggtggaggttgcagtgaaccaagatcgcgccattgcactccagcctgggcaacagaacgagactccatctcaaaagaaagaaagaaagaaagaaaaggcagtctgtgcaggaagtgctgaagggaaacactgcagtagaaaggagaagaaaagggagatatttgttataaaaatcaggtgtttctcttttgtatgtccctattcttgctgcgtattaagctttcctgcatgtgacagtctgcatgaatattaaaatctgctgttctccgtatctgtgacttgtaatacacatggttgattttggtgacttgctggtgtctgcaatctgatttcaatgcatagaaccaacattctaattcttttttcttcaatttaagatgttaaaatatagaaaaaaatatgtatatattgcctgaattttaggtagcaaatgttttgcatggtctgagataattttatgatattaaatttgggcacgggccattgggctctggtttagtaataaggatgtaaaacttacctgttctttgtagcaaagtagcaaaggctaatccatttcccccagcagctgctaagagcattagctggttttcatgtcttctgtccataaagaaagtcagttgcaggggacttgggatgcaggtgactgctgcaagagcagcctcttcttgtggatttgtaaagctcactctaatcctatcccagactcttcccaggccccatgactgagatttccttagttgtgaccaaggttcagaaagcagaggctgatggcacatgggaaggctggaggcttgcccaatgaagccagcaaaattttaattggtaacattttagaaaattgagattagaactcacggctcttaattgccagtctggcagccacattttggggggatatagtgagtaaggtagttagcaggagtatatacaaaataaaaagcagtaagtgtctgttacaggctacccagagaactggcctgagaacaaagcaaagttatcttctaatctgtcttcttaatctcaatatttcttctttatagttttatctctgataaattgtaggtttgtttgtttttttttttccttcttagatgcacaggtctcagaagaattcttagttgcatcagttgcagtttctcacagcaccttggggttaaggacgtaaataaaaacagaaggccaaaagctccttttgttctcagaacacaggcaagatttttcttttttcttttcttttttttttgtttttgagatggagttttgctcttgttgcccaggctggtgtgcaatgacacgatctcagcttaccgcagtctctgcctctgggattcaagcgattctcccgcctcagcctctggagtagctgggattacaggcatgcaccaaaattacaggcatgcaccaaatacaggcatgcaccaaatacaggcatgcaccaaaatacaggcatgcaccaaaattatccgcacctggataattttgtatttttagtagagatggggtttctccatgttggtcaggctggtctcaaactcctgacctcaggtgatccgcccacctcggcctcccaaaatgttggcattacaggcgtgagccaccgtatccggccaagatttcttagtctttttctgacccccagtcctattacatttgtaagggaatttttatagactgtagacttaaaagcaagaagactttagtcctaaggtagaaactcccagtcatttatctgagtaatattattttgctttcttctcttctttaacccctgctccagtttctgtttctttgtccagcactgggcttctttttgatccctgcatcctcattctgagagttctctgctgactggcagctctgtggtggggcagagtttgcaggaagcttgttcctgaaactggctcagctaacacgagggccagcctgtgcagacagtactcttgttcctgtctgcattggaggagactgtcctcctctttgcatactaaacacaagttgttggaatgctatttgcaactcccagagccacattttggctagacttgatacactgtaagaggcaaatggcccactcctttttcaaggagtaaaagtattcactattattttaccaggtttgccttgaaagcctagaaattgctttttgaagccaagggttgaattaggatgatttaagggataggaggaggatcctcatattatcctgaagatttggcaccctgtctagatgcttttgcttctatctgtctcccttctctctatctgctgttgtacataatcctgtgtccagtagagtctgtagaccagattggcaagggggaaccattccagcttgttcaaacctcaagccccatttggcaaacggggcttctaactgattttttgaagcaaatctgacatagttattatagctttagcatccttgatcactgtatggccttctccctcctttttgatacttttgggtctattctacttagtagagagcctggccagcagctattgccccattgtcttttctgtgcaatccacagtcagcttagaactctagtctttttcaggagcctcattggctgacactaagccataagcccactctgtcatttggggcaaacaatagtctcccactggcattctgatctgtagttcttttctataagcaagaaaagattactgttctggctcccttcagcttctatgtcattgcatcattgcaaatcatagtcagttatagcatctaaaagtagtactctgatcttgtgaattcggtgcctgagagatatattctccccttcttccaaaggtggtgccacctctttgttgccttcatgctatgacatgacttgagaccactgatttagagataaagggaagtcctaattcactttgtagtaaatcacttgagtactgttgatccagataagtttgcagttctatttttgttgctttcccttatagatctttttaattagtcttgttggacacattgaagaactccagggtcaatgcctttttgactaagaggacttcatttttttaaaattgcaggttccattacagcttatagaaagtgttgaatgccgagatatatttcagcttcatttgacttgcaaagactgcaaagttatcaggtatgtggtatggtatgtttgtgttgctgtttagtgtggaaaatattttttaaagaatgggtccattatttggtaacttagtaaaataccttttgatgattagcctcattaggaatattttctgagtagtttgtgcctgaaatattttatctgtaggatgtatactttgctatgttgaaagatgttttttttttttaatttggaaataattttaaatttacaaaagggcaaaaataaaaatactaaaaagaacatcagtacaccattcacccagattcacttgttaacattttaccatttgctttattatttgcagaggcgtgtgtgtatgtgtgtgtgtgtttcttttcctgaacagattgagagtaagttacgtaatcatggctcttaaccccaaaatactttagtgtgctttcctaagaatagggatattttcttacataaccataacattatcaattttcaattttacattgataatacttacatccagtctactatacatgttccaattttgtcagttcacctaatgacctattgatacttttttatagcattctccctcacctccatctcattcagtacaggatccagtctaggtcatatattgcatttagctgccatgactctgtagccttctttaatctggaacattttctttttgtttttgtttgtttgatttttgagacagagtcttgctctgttgcccaggctggagtgcagtagcacgatctcagcgcactgcaacttctgcctcctgggttcaagcgattctcctgcctcagcctcctgagtagctggggttacaggtgtgtgccaccacacccggctaattttttgtatttttagtagagatggggtttcaccatgttggtcaggctggtcttgaactctgacctcgtgatctgcccgtctcggcttcccaaagtgctgggattacaggcatgaaccaccatacccggccaatctggaacattttctacagccttattttcttttatgacattcacattttgcagaatacaatcttttgttttaatggaatacttctcatgttgtgtttgtccagtatttcctcaattaaattgaggttctattttctcaactggaatactgtatatatgatgtcacatccttttcagggtattgtattacatctggaagtacagtgtccacatgtccttcattggtgatgttaattttgattattccagtcgagatgtcacctggcttctgtataatttctgcgttttctctcttgcaactaaaaacagtctgggggaggcactttgaaacaatgcaaatgtccctgcttctcataaaaatttctccataagtttagcattcattgatgatttgtatctgcgcttaactataatggttgcaggctgggtgtggtggctcacgcctgtaatcctagcactttggcaggccgaggtgggggtggatcacttgaggtcaggagtttgagaccagcctggccaacatggcaaatccccatctctactaaaaatacgaaaattagctgggtgtggtggtgcacgcctgtagtcccagctacttgggagtctgaggcggaagaattgcttgagcctgggaggcaagaggttgcagtgagctgagatcacgccactgtactccagcctgggtgacagaacaagactccatctgaaaaaccaaaaaccaacaacgatgcctgaaatgcatttttaaatttaatagctctagaggtcttaaattccacaagtttttactgcattcctctgacctcttctggggtgtcagtaaatattatgtgttggcatactgatgagccaccatgattgggatgagagagaggtttaagtgaccccttggttttaagatagatatttatattgctttttagtcagtgagatttggcttatttttgatagatactggctacaactcacagtttaagaaggtagttgcttattaattagtcagtttttaacattgcattcaaaaaggccaaatatttaaacaaatctttatttttatttatttattttcttgagacagagcctcactctgttgcccaggctggagtgcagtggtgtgatcttggctcactgcaacccgtacctccctgtttcaagtgattctcgtgcctcagccttctgagaagctgggattacaggtgcacgccaccacacctggctaatatttttgtatgtttatcagagacgggagttttgccatgttggccaggctggtcttgaactcctgacctccagtgatctgcccgtcttggcctcccaaagtgctgggattacaggcatgagccactgcactcagcctaaacatatctttaataaattagttttcactaattattttaacttcttagttgtatatactgaaaatcgcagttgacaatagaattgttttgttctctacatggtcatagctgaaagtttcagtgcaatctgtcttttggatctgatttgtcctaatagctaaatattgaaattactacctaactggctaaaaataatgctgtttttttttaaacttgatctaatatgttactacaaaacaaagatttttctaaacatattttttatgagggacaaccataaaacttcgatggaagaagtagaatgaaactccactcatgaaagagaatagctgccatttttctgtaataattgtcattaatcttagaagagatttcattagtctaaaaaaataggttttccaatggtcagcttcctccttttggacattttgttccattggctaacatttgtttttcttataagtgataatgagcatgcgaatgactgactgcctcagatgctttcttggttgtagttcccacttcactacgagtgggcattcttgaaataatggcttttcttacatttcatttcaactgtcttctgattacatccatacttgtttggctttacaaaaggtgtcagttttcaacctttgagcagtgtcaagagtggctgaagagactgaacaacgcaatccgaccacctgctaaaatagaagatctcttctcatttgcataccatgcttggtgcatggaggtctatgccagtgaaaaagagcaacatggagacctgtgcagaccaggtacgcctttctgaaatgtgcaaatggccaggggctttatcaagctactgatggaggtacttttaacatgaaatgggacacctaagcattcatatatcaatcagtgtatattttaaggagcacccagcaagtgcgcagcattcttttaagcttaatagaacatcttttctgccttccggggaagggaagaacactagaaggcatcacaatctattgggcctaaaaacagctcaactataataaggttttatgaatagtatggaagcctgatagaaaggagccatgagttttgtatacatgtgtgggaagacttcacatttaaagtggcttttgaatcagctttgaaagttgaataggagttaattggtgagaggccaggttcctatcaagaacaaatagatagtggggtttgttttttgttttttttgagacggagtttcgctcttgttgcccaggctggagtgcaatggctcaatctcggaccactgcaacctccgcctcttgggttcaagcaattcccctgcctcagcctcctgtgtagctgggattacaggcatgcgccaccatgcccggctaattttttatttttagtagagacggggtttctccatgttggtcaggctggtctcaggtgatacgcccgccttggccacccggagtgcttggatttataggcgtgagccacagctcctggcctagattataggttttaacatgtgaccccctcccccccaaaaaaaccaaaaagagatgctgagcctgttctggaacccaggcttcctgactcctctatagtctttgtccccctcactgtcattctccgtcagaaatggctttgaccatgttatttctctgcatgtagtttcttgtaaactttatgtggtcataaaactttgctggtccaacactgacttttagtgtgtcaggtttcaaagtgaagtcttaaatttctgtgcagtgaaaagttgtaagcctccttcaagtaaagtttactcttgggacttttttctagaaacctgaaattttaatcctgaatcttcaatcttataagtctgccctgggtcattttaaacatttgaggctaatcttgctatgcttgtgttactttgttctctggccccatgactaattgaagcttttggttcacattcttgttctattaaaatgcttgtagcattagcattatcttatgtttaacaatgctttgataaatacttttgtttgatcctcatgaccttgtcaaacaggcaagataggttggtgtctgttttgggagccaaagaaatggaggctcagaggtaaaaagcctgttgtcaagtcccagtgctagtcactgacgacagaactaggacttaaaaccagttctcagttattcagacctgaccatggtggatgctgtggatacagagtttgaaaaacaaaagcacctgccctcttggagcctcagggaaagcctcagaatcccagcttctcacaggcgtgtccaggctagcagaatcctgtcacctacgagagaccacaccaaccttggaagtttatgagaatgtgcttaaactgtctctcacttcactccgattgttacatctattttttttctttattgaaatgccatcacattttaaatacattttttcattttttatggctcttttcaaatttgggggtttttcttaaagagaaagtttacaaacagtgatgtgtacaaatcttacatgtacagtttctgagtttttaaccattgcatcttctttattaaatttttagtttctaccatctcctaggataatgaacttaatgagtgcatcctactgcattatgttatataagaactttaatttgtttaagacccctgactccaagacccctgactccaagaggtattccctaattttgggttgccagcatttactcagcaagatttgctttctcctatcctgttctctcacaaccacagactgaaaagtccttatctttttaggagagcttttttagtcccttgataatttgagtttcttttagatttcagcaaactcttaggatattcctgagaggtacctcagtctagtcttttaattatgggtggctctgccctgaggtgggatgactttggtccccagacccttccccttcctgatgatatctggtattctttggccatcaggacataaagatatctacagtgttctctgtcttttcgtaggtttgtgatgcaagggcatgtgaggggtaaagtactgacttaggaattaggaaacctgaatttaaatgcgtattctacgatttagttgaaaaaaagaacactgggcaaagaatttatgctctctgtgctttagtttcctttgtgctttaaagtgggacattcatgctcttcctgcccaggctgatccaggtatcctgaagatcaaatctgttaatgctgcagagttcaattcagtaaatgtttaagtgccccctatgtgccatgcttatgaaaacactttggaaattatgcaactacaaggtaatgcaatcataactgtttggctagagattatgagtaagggttgcattttgtttcttcccagtatacacagtccacattgatgttaacctgccaccactcagcatggaatcttgtatttcagtgacttggttgaatgtatgtgtatgtatggcttttgccttttatgtatattcgctgtggagtacaaaggaaaaacttggttttaattaaaaacaaaccaaaaaaaaaaaaaaaaaacacctcgaggacatccagtcaacctgtttcttttgtcattacctcatgttgttgagcagtggcggtgtatatagcattactcatcaaatattagcataccagacaaccacatacttataagtcatctttaggatgagacaacacttgggatatttcaaagtcatgcctttttataatctgccccagtacatgatatcacaagtgtagactctgaggggtggaagttagtttaatcttatagcagttaataaagccttttatggagtcttctctacctagcctgctagaagtagaatgtatcagagaggagagaaatgagaaaattacataattgtcttagtattcatataaatcttagtttctggctgttgaaccggtcatagttaagccggctgtactgtggtcacagctctaaggcttaatcagctttggaagaagtttcaacattgctgttggagtttacctgtgaaacctgcagaagcctttgccaaattcttgacccttctcttagcccctcaaactctaaaaaagtggactgaaagctaaaagcttctctcccatgtccttaacttcctgctcctcattgcaattgacttgttggtgatggctctgtactagagtgttaatctggaggcctgacagatgactgggcagcttagctgccagtttagtagcatcaggcctacctctctaacctctctcatgtgaaatgtcccttaagcccatcttgtttatccacgactagcatatgactctgggtcttaacactgctgtgaagctgcctatttatctgtcttccgggtttgaatgcagtccaggaagttgcatctagaggatttactgtgacctttgtacatagaaaagcataattcctttctccatatttgaaaatctgctaagaggtagttcttaccttctctgactctggtattggtctgcttcctcacctgccaggtaaaggcctgtcccttctgtcccaggccttttaagctgtgtgtaattgtgggcttgactactcaggatcagccagggagctagacttttgggggaaaattttttagattgctgattgacactgtgtttgtgatagagggagttagggaacttcattgcttttaaaaagaaagttttcatttccactaaagtgaaaattgctggactgtattatttttattataagaaacactaaatgctgaaaagggacaaaggcagataggaagggttgaaatggaaatataaagccaaacaaaaaccttatagccccagtatttaaagaaagttgggatatcacaatgtatttaatgttgaattgattgagacctgagaattctgagatggagatttttaaggggaatccagcaatagatctgtttgtgtttatttttctggctaagtaaacgtgagtgaacatctcacacaatttgcaaaagctggttgaattcctgatgtatgtaatgatgtggttttcaaataggttatgatccagtagtgggtcatgaaatctaattttaaagaaatggaatagaaaatatcaaattgtgtcacacacatattaagagtgggtattgttttgtgaaatgctttcaaaaaaataatgtatgttgtattagctgggcacagtgtctacctatagtcctagctattcaagaggctgaggtgggaagattgtttgagtttaggagttcaaatccagcttaggcaacagagggaaaacccggtctctcaaaaactgaataaattaaaacatgtttgttgtattgtgttgtaaaacataattcttattgtgggttgtgatggtcagtttcagagtttatgaagtcactgccttagaggatataaaaataattaaaactcattcccattcccaaagaactcgaaataacagattttctatacctgctagtcagtatatatttctgcgtatagctcagaatgttgtgctctggatggtggttctaagtccttctttggggaaatggttctatgaagtaaattgctagtgatagtgattgttactgttattattttgccagtggttatttttaaatcacaagatcctttaagggtatctatgtgttttatcctgagatagaggtgttaatgtaaaagatcattaatgtacagttcaagaaaagcacaaaaaaaataaatcattaatgaaatacttacagcttttgcaaagacttggagctatatcccagagtcgggggaaaaaatctcttaatgaacttggaatttgccacagttttgcagcttttagattgggattatgaattaaagactccttgtctgttttttttgttcgttttgttttgtttttttcccctttttttgagacagggtctcactctgttgcccaggctggagtgcaatggtgtgatgatggctcactgcagcctcaacttccctaggttcaggtgatcctcccacctcagcctctcaagtagctgggactataggcatggaccaccacaacttaatttttgcatttttgtggagatggggttgcccatggggttgaccagatgttgcccaggctggtcttgaactcctgggctcaagcaatctgcctgcatcagcctcccaaagtgctgggattacaggtgtgaggcaccgcgtctggcctagtattcttgatggtcaatattccttgcaatttgtagacagatggcaccccaattcagatagttttttcctgtttggaagcctgctacattgcttctaaaacttttccaaaatgggatggatttagtttttatttcttcttgcacctcatattctctcaacctcatctttttatagctctccttcaggaaatgtataatacctagcttgagctcaagaaaagcagtttaaatgggaagtagtttaacagaattgtcttccatccaagtaattgctgtttcctattctgtagctcctctcccagggagaacaaagctttatactctgaacactaaagtgaaatctgttttgtgcttttgttgttgtggtttcttccagccctgctagcacttattttacaacctgtaccactatatattagaggttctgcttaatattttttaaaataacatgctgccctaggactgtgtatgttttgaaggaagaaagttattttagatttactgaatttatgttagcttcgtttctacctctgttttgcttttttaaggaagataaagccagattcattagggcaaatatagccagattataccagcttgggtggctgttcttgcaaataatcagcacttagtagtatggtgtttcctgagattcctggctggcagttatgattccatgacctgttaacctgccatcatctaaaaggctctggaaaccagaatgtttttcataccctatttggtgtcttggctggacctgatctgagctgacatgaggctatttgttgctttatttatcccacctggtatgaatgatctatacctttcacgaaagaaatattaatatttgtttaaggagatcttgttaagcatgtgagcctaatattatattcgctgtcttaccttaacgaaagtttggaaaactctcaagttctaaaatttggaccaaagggttttggatgaggaattatagttctgtattgctactcgtggtgatcttgttattgattttatttcttattaagtgtactgtcagtctgagtgtggaagtaggcaagtagccagtgtaggacaagagcatggcttctggggccagacaggcctgccataataacctgttttaattttgtcctttgtaaaatgagctcagtgatactgttctcagagatgattgtaagggttagatgagataacataactcttgatcagaattaatttctttcctctttataatcttaacctgacagggatctttctaaactaaaactatataatatatgttactttattatttatacaattcttacctttaaaaatacacaggctgggcgcagtggctcacgcctgtaatcccagcactttgggaggccgaggcgggcagatcacatgaggccaggagttcgagaccagcctggcccatgtggtaaaaccccatctctactgaaagtgcaaaaattagccagtcatggtggcatgcacctgtaatcccagctatttgggtggctgaggcacaagaatcacttgaacctgggaggcggaagtttcagtgagctgagatcacaccactgcactccggcctatgtgacagagtggaaccctgtctcaaaaaatatatatatatttacatatatgtaacatatgtatatttctttgtttttattccacctgttttgcaaaatggtattcatttcttcctttctgctgtttatctttggcctctaggggagcatgtaacttcaaggtttaaaaacgaggtggagaggatgggttttgatatgaacaacgcctggaggatttccaacatcaatgagaagtacaagtgagttatatgggtccctgtggactgtttcacagccagtgcctttgcagaaaccgcaattctcatgtggcagaacatttgaacttagactttttatttgaaatggttttatttattaaatctaaaggcatgatcttcagagtatttattgaatcttctgttcccgttgctatcattggagtggaaagtgatccttacttaacaggatcctagaaccttcccttttaccccctctaggcctctgttttttctggtacatgcatgtctaaataatattgtatttgcctgtaggcaggcagttaccatttttctcatcaccacttggcatcacattagagagaggatcagtggtctcataagcagtgacagaacatttatgaactagtttttatgactgtaattttactccaggtggtgtgaaatagacataagtacagttgagtatcccttatctgaaattcttgggactgtaaatatttcagattttggatttttttcaggttttggaatatttgcatgaacataatgagattatcttgggcctgggacccaagtctaaacacaaaattatttgtctcatatacacattatacagctggaaggtaattttgtacaatattttaaataatttcatgcatgatgttttttacgaaaagttttgactgtgacttgactgtgacccatcacatgaggtcaagtgtagaattttccacttgtggcattatgtcagcactcaaagttttggattttggagcatttcagatttttggattaaagatgctcagtctgtattattctgtcctttaatatattgatctaaaaccaacttcactgctatgatcatttaaccattaaatattaatgtaacctttatttggctggacatggtggctcacacctgcaatcccagcactttgggaggccaaggcagatcagctgaggtcaggagttcgagaccagcccagccaacatggcgaaacactgtctttactaaaaatacaaaaattagctgggcgtggtggtgcacgcctgtagtcccagcaacttgggaggctgaggcaggagaattgcttgaacctgggaggtggaggttgtagtgagctgagattgcaccactatattccaacctgggtgatagagtgagactctgtcgcaaaaaaaaaattaatgtaaccatttagccattacccagttccttaaaatgtgtaagtgcgttggtgggggaggacagttaactactatgattttggtgatccaaatttctataaaacaaaattgtccatgatagttaaatatcttaaatctttaactatatccttcttggccaggcgcggtggctcacgcctgtaatcccagcactttgggaggctgaggcaggaggatcatgaggtcaggagatcgagaccatcctggctaacacggtgaaaccccgtctctactaaaaatacaaaaaattacccgggcatggttgcaggtggctgtagtcccagctacttgggaggctgaggcgggagaatggcatgaacctgggaagcggagcttgcagtgagctgagattgtgccactgcactccagcctgggcaaccgagcgagactttgtcttaaaaaataaaaaaaataaaaaaaaaaaatatatatatccttctcctacgtttccctgcatcattaatcattctgcggtcctcttagctgtctcaaattatgacgggcattttcctggtctgtttgtggctagccgtcagagttttcactggaaaagctatagctaattgctatacacagttcttaatgtggaccttctccagggagttgagaacccagggtgttttgaagagttggagctgcagactttttatacttttgcctgttctcagtgatgagtcaaagcaaagaaggagggtgaatgctggatgagggggcggcctcagagagcctgtggctgcattaggctttcctgagtgtaacctatactggaaattgtttatccacaagtgagtaggtagtgcatactgaagagctgactactgggagtgtagtacctataggacaatgaacagaatgtttagaaaattagatcaagtaaaaaaaaactgtgaattaagacagacttgttggaaaataatccccaattcggcttttaaaaattaacttcttgagaggccaagatagaggattgattaagcccaggagtttgagactaggctgggcaacatagtgagacctcatctctacagaaaatttcttaaaaatttggccaggcatggtggctcattcctctaatcccagcactttgggaggccgaggcgggtggatcacgagctcaggagatcgagaccatcctggctaacacagtgaaaccccgtctctactaaaaatacaaaaaaattagccagcgtggtggcgggcgcctgtagtcccagctactcaggagactgaggcaggagaatggcgtgaacccgggaggtggagcttgcaatgaaccgagatcatgccactgcattccagcctgggcgacagagcgagactccatctcaaagaaaaaaaaattagttgggcatggtggtgcatgcctgtagtcccagctactggggaggctgaagtagaagagttgtttgagcccaggaggtcgaggctgctgtgagccatgaccgctccactgctctctagcccgggtaacagaacaactgtctcaaggagtttaccagttatacctcagaaccagtctttaggatgttatcaccaccataaaacaaaatggggggtggtgggaaacaacaggatgttgaaagttcttcctactacaaaggtagaagagtgagagccaagtttactcttgagtttaatacataataaagggaatgagattcatggttagatattaaccatcattactggctcccagcttatttttaggagtttgtgaataggtgttaggaagtttgtatagctactcttagtcatagccattctcttttgttcagtggcttttaaattcctgaaaattccagaagtctcctcttctggaaattgaggagagatttagtgcaaaatgatcaaaacccccaaatcctaagccattttgtgtttttctgcgctttctgctatgtataggataggctagggcagggggttggtggtgttggtggagtttgtgtgttttaggatttggattaaaggccttattgccttcactattgaaaaaagaagattggattatccagagagagacattgtcctgtaagtaaaaatctatcggaagtattgcttcctaggataccggcttgactgtagctgggatcttccctaattaaaagaaagcttatccccccgcccccagtataatttgttctgaagtatgttttatggaaattatggttaatagcttagtcacattactaacctggttcaatgggactgaggctgtgtatgcagatagactggcttgtgttggttttgcatacccatggctgcacctgttacctataaggatgacaccctgtttggttcaaatcaaagaatgagttaatcctgtgaagtctctggaaacttgcaattgtgggcttttttccttccctgagggtctggtagaactgacacggactctcagttctgtaattggactgggcgctcatgtagttagaaataacctatgtacttgttacagcagaagagttgtaatggagtataaagagctgaccctcgactcccctttttttcattgatagttaagattgccagattcccaaaaggtagcatcaagtggaacaattcaagatagtatcatttgttgtatacacataagtaaacatttaaggcaacaaaacaaaacaaaacacacttatggtaacccattctgttgaggagtccaaaactcgaataaagcgcctcattgcctttaactggttctgtggcagtgagatcatcatccttatgctggctcacctagtgtctctctctctctcccgttttctctctccctctcttatccccttgactctccccacttctcatcttctctttagattatgtggtagctatcctcaagagctcatagtgcctgcctggatcactgacaaagaactggaaagtgtatcaagtttcaggtcctggaagcgcatccctgccgtcatctacaggtaagttaaactggaccagtcccagcttgggctggtgctgctgcctgctgcatatggtctgctgcctctgctgctgctaacctgggaagggtggggagagttcagagaactttctaggcaaggctgtacttccttattgttaaagcttctcctccagtaacacatcagtactgactgcattcagaacactagctggttgttcatttgaaacagataagaaagttttagttgtaaagtggctggacttgctatttcaatatccttcttacattctgtgagaagataatgtgcttactaagcatttagcttcagctgttagcagggcttttggattgagagatgagtcttagaaagtgatctttgggaatatagggtcgagttggctctgattgtctttgtggttgaaactttgacatgtggaagaactctgtttcgagaggaagcatttagagaagaagactgaggcatgactagatagaagatttcagtgatcagaggcatgagagccatgggatgcaagttctagatggggatggtggcatggtgatggagcacagattttggaatcacagatctgaattcaggtatattcttagacttcttgctaaggcaccttgaataagttccctaactgacctcagtctgttcctaatgaatacaatgggaatggtagttcttattttgtagatatgttctgattctaaatgaggggctataaacactgagcttctgtaccagcatttggaataggttaaatctcttgagtgctgcttttgtaattcattgaatatcttagttctcacagaatcctattaaattttaaagaagtccttccttcttattctggaaatgttttggatgtcatctctttgtaatgtttacattctccatttcattttcccagtttgccggctttttggactctccctgagttgggccaatccagtggcttacagttagaaacttcattccactgaaatattgagattgtaggaagggatttgtctccttgtggaattcctacagaggtaaccagcttgttcatttagtctactaaaggcaaactctgatgcccactctgaatggagagagatggaaaagtatttgctctggcccagtggaactcattacgtttttaatctcaattctcatcactgttgttttcagacacccctagaaaagtcagtcaccaaatttacctgtcattcaagtggtaaggatgctacaggaactagagagtagtgaaagctgaagggatttatgagtcttatcaatgatcagctcagctggaatggggaaagcagccagttgctgctctggccaacaactgtgttaggtcagcagccctggcatctgtggggcttgctgactttgaccaaaagggggaaggtactcttacttgcaaaataagaggctttaggtgaattctccctttgggaagagaagcttaagagggctggttgaagaaaaacttcctttttttctaaattttattctagagggcatgcaccttctaaaattaattctagagggcatgcaccctaggttttccccccctttttctagagatacaagaggatatataaatgaaaaattttatttgcagtttttcagagaaagtctttcaaaagatcacaaagttcttggtgtagtcatccatgcaaaatcaggcaggtttcctggaactgggctctgtctcagaacatgtgtcttgtatcgctgagatgcagactgggttgctgtagtatttgggagctttgtaaggggcgtgtggaagaatcggatcctccaccatgctctgctttgccagcctaggtggcaggatgcctggaactcttgacatccatttcctgaatttagttgtctgtagattgggtcatgattcctgaggttgccagcagcagttacttgacagcaccatgctgaaccagcgcttgattagggctttgtcctactgtgatgagagagcacttaattggatttataactgaaggtagagattgctctaacatagcaagatgatgtaaagggcacccatctgtagtgcagttcacagctttttcctttgtgcatgtggtgattattctaaactcctagttacttaagggagcttgcctaaatctaagttgaggttacttaagacaattctgttcctatataaaattgaagcattctgtgttttagtagggagggctttatctgttggacatcataatttttatactttgcctggttctgttagtgatagaaatgcattcctttagtgatttttaactgtagtgtttgaattatctttcatgtagtctgaagcattttagaagactgcagaaaacataattgtttattgcaatagtccagttgaaatctaatagctactataatgcagtgtcccctaaaacccaagatccaggctgaagagcgccatctactgctcctcttgggcactgctgggaagcattgaagaagaggaggatgttcaggaaaggcccaaccagcctcttgtgcagggtttggagtcattcagctcagtggttgcctgttatttgctaggagacattttataaagaatcattgaggttttatttctattttggccccattcagcacgtgagccagttgagcatgttggcaatacacaagtacttacagctacttgtctcccagggagggaggatttaaaaactacaagcaaactggtgatttcagtggaatttgattagtgccaaatttaacttatttgtgagttttaggagtaaaaacaaattacagtacattttcatcgtcccaaaaaacccattcacagggcacccagccaccctagccctgaataattaagatgtccaatggatgaagcccctgctagtaaaacatagagtgcttcagttttatatagaaacatactcgttttaagtaaccccaacttagaattaggcaagctcccttaagtaactacgagtttataatagtcactacatgcagaaatctacttccatctttatagattcgcctattctggatacttcatgttaattgtcgtacaataagttgccttttgtgactgacttctttcacttgtcataacatatttgaggttcatcagtgtcctagcctgtatcagaactttattcctctttactgccaagtaatagaatttttctaactttttatcagttaaaattgcctaactaggaaaagtctgggttttaatagcaccttaaagtagactgtgatttctggtctgtcttattggaaaaggatatgtcagagtatggttttctgaggttgatgctcttcttctctttcttaagagccctaggaagggtagctggctcattgagctatctgcctattataagagcagtctgtgactcatgaaatctcaggagattttgtaaagcagttcactgtgggccaggtaaatgttttattcccagaggcgggctcttggttcagcattaagaaggtagcagatttcactattgggtagcagaattagtgtagtacctatagatttaagttacgaatattgatttattttcactaagagtacacattaattcttttttgttttttggaaatggggtcttgctctgtcacccaagctggagtgctggagtgcagtggcacaatcatagctttctgcaacttcagccttctgggttcaagggatccttccacctcagcctcctgagtagctgcgactacaggcatgtgctaccatgcctggctaatttgtaaaaacttttttgtaaagatggggtcttgctatgttgctcaggctggtcttgaactcctgggctcaagtgatcctcctgcctcagcctctcaaagtgctgggattgcagagtgagcctccatgcctgacccctgttagtcatttttttgggtaactttacagggatctccgtgatgttatggtaattgagaaagacacacaggttttgttgtttgttcttgttggttgtgtaagatttctaccctctttaatactgagaggacttgaagctgacccaacacttacctagaattagactgttcattaaggcacttaaaatctattttgtgtgagtacagagagcatctgaatgggtacagttgttgtctcttgttcctcacacaggcaccagagcaatggagctgtcattgcccgctgtggacagccagaggttagctggtggggctggcgaaatgcagatgatgagcatctggtacagtcagtagccaaagcttgtgcctctgactcccgatcgagtggcagcaagctgtcaactaggaacacttctcgagactttcccaatgggggagacctttctgacgtggagttcggtaaggtgctccctggacccatggcaatgatttttatagcatctaagaaccttttcttgaaatggcctcttccttacaagacatagatttacttttatagaagtgaatgtgcagagcttcacttgatgggattgattgaggagtcatgggtcttggcagagaatcagaagaccctttgtttcaaacctgaatcaagatattagtgtgtttgttgtctttcttgccattgtgacaaaaatggagtgtttatgtaatagaggacttgcagtatctgcagaccatggcaggaaatgccaggcttcatgaaaggacaacagatacagaaatgaagtataagagactgggctgtgtgaaccccatgtgtactctgggagtcagttttggagaataaatccttctcatctttcataagaaggccacatagaaaaaaagagaaaaatcctatgtatcaagggttttggttaggggatttcattttattgagccttttttgtgccataagatgtgcttgtgggtctaattctgcacagttctgggagagacaggctcatttagtatgccctctccctctgtgtccctagattcttctctgtcaaatgcttcaggagcagagagtttagccatccaaccgcagaagcttttgatcttggatgcacgctcctatgcagctgctgtggcaaaccgagccaaaggaggaggctgcgaatgcccaggtgaggtgtatggtgctttgttccccatactttctccttgtgagtgtagcccttgcccaactgagacttagttcccaatttgaaataagtggcaagccatattcctcatccatcctgtcgtgagagtgccagagcttctctttggattcttaacactgtatgttcttttctgaggagaaatggaggaggaggtgcagtgaagtcacataatcttccttccttgtgccaacttgtaggtgataaggaaagcagatcttccccataataagacctgttcatgtttggaagctgctgctttagtgggctcaatttctcagccgtctaaaagctttttgttgcctttgacagagggtatgctcaccactggccttgtagcaaactcctcaagggcctctccttagaaaacctggggtgaaaattgaagcagtaaatacagaaccctagtaaggtatctctgtcctgagctgtaacaccattactgttggaatgctagctttccccaaggagggacccccctcagtgcctatggcacaggcagaggcaccaggctctttgttcagatgtggtctaagctggaaattgaaagcagctgtaccaaggtgaaatttgaatgtgtgaacgcattgttctgcggagttcttttcaaagagatttcaaagccacaagttagataaggcccaagaagtaaagccagagtgagatcgaagtaggcctttcttttaaaaaataatagcttttattttatgtcagtatcttctttacaaatctaaccttcccttttcacgctttttgaaaagatagctaaaattcagtgtgttcctcttattataaaggattgggctaatagttaagcatttcaaaacatttcagtttcgttaatcagaagctgcagtgggtttgttttatagccagtttgcttttaaatttggccatgtgggctttaagttcaacgtatttgtgttctctttattgttactctctccagagtattacccaaactgtgaagttgtgtttatggggatggcaaacattcattctattcggaggagttttcagtctctgcggttgctgtgcactcagatgccagatccgggaaagtaagtccttggccttggctttcattttgcatcgctcttaaataataagtttgcttctttccttgaactaagggggaaaaaaagaaaaaaaaattaatttggagcagtctttccttctgtttcttggtaatcttcagttaccagaccagtctctgcaagtatctccttgctgggtctgaaatgtggcagcacagaggaagagttgggagaaaatacagccatttgaaaggttttaaaatctgcagcacagaagaaatctcagcatcaaaacagaagcattaccttactgtttgtcctgggacctttcccttccacgtcatttttagcccaaagaaatttaattcttcagtttctgatgtcccatagtgatacataacctgttttgaactgggatgttttatcatgaaaagtcagaatttattcatcatgttctaaagggtttaaacttgccattaagtcagttccttttacatctgctttcaatttctaaactgttctcatttactaagcatattatcctgattcttattgcttattaaatatgaatggctggcatttgcagtgaggaaggtgaactaataccccctccaagggtactgattgaatacaagataaattaggaagaatgctctgtaaaacaaatatggacagataagtatttaaaaatcctgttttactatttcaggaagccagagataggtgccagagaagacagaattttcttttttctggtatttgtgctggagcccatagttgtttctctgggtcctattcagtagatctgatgatcacatcaagttttactgcgttctttatttgatttattaaatcagatgctgcctaaaccacttatattgactgccaatagcaaatgattaaattcaccgtagttgtcatcagccaagaggatgaagcagtgcctttggggaaagcctgaccggagaattgagcttgctgcctcctttggggattagccatttgcatttgctacacagttccaggtcccagctagcagcgctttcttccctagggtggtatgtagaaggagccttactaaggacccaggagatcggccgcgaactgtgtaaccttggccaaggggtttaactactgtagatctcagttttcctgtctataaaatgaaagacatgtaatcaacactacatgatctaataccctccatatattaaaattcttaaagagctatcagagtcaaaaaagatagaattagccctcacctggtccacataaatgtcttggggattttattaaaggtaatgcttttatgtatttggcagcaaatcataatgctgcactgaagtctccctcatgggtaaaaagcagctgtagcagtgatgggcagctgtaattaggcccccggcctgtgtttggggctgtggaggataggggaatggtaggcttctagtgcaggttgagaacaggacaagggaatggggagtctctcagcagcccctccttggctggcaggttttggagtacagcttcattagtcacagacaacaccaactggtattaaataatagtttagttaggttcaaaagaacctcacaccggttctcttgtttaccatttcttcaggtgctaggagataatttagtatttgttctcctaagccttatcttttagttcctttcaagaatatgtgaggaatgaaataaacaattgatccatcaggaaaaaatgtttctcaggtacctgctaggagatagaaagtcttacgattggatttttacccataacagacttacaattcattaaacagtgggactccctactgtatgctaggcactgtgctgggggtacagttatgactgagacatagtgttagccctctgaggagtcacagtctggttggtagtccaaacaaatccatatacaaccagtacttatgcactgcattctgttgtctctttgcctggaaagacccccacctccttagactatgccaaaatttcatacttattccacagggtttagtaggcctttacagccttcccacagtcccctgacagaaatgtttatttcttcctctgactcagtgtttgaaagacttgacttgtgatcttaactacaaatctgatcacatttgggaaaaatcaactcctttttagggattgggaggggtgagggaaagcacaagaaacaaaatgcaacagagtttaaaaagcaagtgtgattagcttgtgattactcccaaggggcagctactgctatctgatactccaaaagtgagatggagtctctctctctcatccatgctggagtgcggtggcctgatctcagctcactgcaacctccacctcccgggttcaagtgattctcctgcctcagcctcctgagtagctgggattacaggcgtgtgccactatgcccagctaatttttgaatttttagtagagatggggtttcaccatgttggccaggctggtctggaactcctgacctcaagtgatccacccacctcagcctccgaaagtgctgggattacaggcatgagccactgcgcccggcccctaaaagtctttcaaaaaaaggttcttcctagatcgctgctgaatccagtctgtgttgagcccagcaatactgtgtggccattggtatactaatttgtatcagtataaattatcagattgggctcatcttgttttagtcagtaaacattaaagaattaaacagtggtaagtgttacagtctgggtcataggcagggttgtgtgtaccattcttgtatatggcatccagcttatgtctcatagatatatttgtattcatgagtttttcttttcttttcttttcttttttttttgagaacttgttgggcgtagttgctgatcattaaatataaatatcttctgttttacatctcagaagtggctacattttttattcaggagaagattccagaaagagccactttccttataccatggactgaaaaatgtcaaatattttgcccggggaatcatccatacagattttggaacaaaaggtgtgctattaattgtagcccctatttctaaggctcttctctattgtatagtagggcttgggcctcatcctgagacatgctttataaacacacagatttttttgttttggcagtgttatatttggagagagaaatctttggaaattgctttttcatttgacaatcattgagcatgatgcagtaaatcataaaaaaatcagcattttctaatcctctcctgtttttatagttggctatcagctcttgaaagcacaaaatggctccatcacttgtctgtgcttctgaaatcagcgcttctggtagtgcatgctgtggatcaggatcagcggccggtgctagtacactgctcagatggctgggaccgcaccccccagattgtggcattggctaagctcttgctggacccttattaccgaaccatagaggtgagcccatccaaatgggaggggttggtacttcaggatgagccagggaaacgtctcaggagtgataccagttttgggagtggtgattcggttaaagaaagtgaaatttctgttttggtcattgttcctttatgccatgagctaaattgtggtggttcctcccacagttcttgcacctcttaaaatggggcagattatgggtaacaaggtattgagaatatagacatattttcctttacagtctatctacttgtaaaagtttttagctacctcaggaaaataaggagtctgtaaaaggatcttggcatgctagatattaccagagtgttctgtggagaagcagctctacctgaaataaccatctgttgggttaaagatgaaagaaaaatcataaagtaccctaaaatatatgcaagtattaattaaacttggggtatagaaggattttacagacttgactttgtaacaccagaggcagaaatgttaagagaaatttaggggaaaagtgtggtttttatatagtgaacacaagaggctaaaaatacacattcaagaaaggcttagataaacgcagtcagtaccattttagtgatcatggaatggagttcagggaattgggaaatttccctaagtgtgtgcctcatcagggatagagccttccaccaaagggcaaggccgggtgggctttctgggaggctgttagaggggattgctttctgtgacaccaggcttaggactgtcacagtctggatagtctagcacaaatggtctctcctggatgcttccctgcagggtttccaggtcctcgtggaaatggagtggctggattttggccataaatttgctgaccggtgtggtcatggggagaactcggatgatctgaatgaacgttgcccagtgtttctgcagtggcttgactgtgttcatcagcttcagaggcaatttccttgctcttttgagttcaatgaagcattccttgtaagtttcttcattttggggactttctcaatttgaaggagggtcagtacaaatgttagtgggccagttctcacatgaaactgtgctgcctcttcagaatttaatagaggtgatttttttcctgtttctgcttttttttttagtaaataattttgctattttcaaaaagagaaaatccaggtataccaggtttgcatgaagtccttgtgttgttttaaacttagtttttttttaaagggatggtagaaaccctaaatagcagttagaaatagaagcaatcagaatgtctggaccatactccctccagtctgtctaccagacccccatgactgtctcagactctgcaccctctcctttgatggagggtacactatccctgccctctttcagcccctctgtccatttgtataccagctctcatctcctctcatctgctgcactggctggctccagcatttctcttctctgccttctgcatcagtgcgtttccctctctaccagagcatgggtttcagcttaaaaatgtgtagtgtctctcatctttttaaaacccattcttggtcctgcatttacctctagctatcatcctattgctcttgttcccctttacagcagagctcctcaagttttctacccttgctatctcaaatttctctttccactctctcttaaacccacttcaatcaggcattcaccccactgcttaacaaagctgctcttgttaaaatgaccagtgaccttcatgccaccaatccagtgagaagttctcagtcttcatctctttgatccatcattaccatttggcacagtttaaccactccttccttgaaatgctttcttcaattgaccttctagtacttccttgcagttgacttctagtacttccttgctgttagttctccttttaccttactggattgtttctgcctcctttgctgattccccttaatccctccagttcttttttttttttttttttttttttcagatagtatcttgctgtgtcacccaagctggagtgcagcagtgtgatcataactcactgcatcctcaaacttctgggatcaagagattctcccacctcagcctccccagtagctgggaccacaggcacatgccaagatgcctggctagtttttaaaaattttttgtaaatagacatggagtctcgctatgttgcccaggctggtctcaaacctcctggcaagtgattctcccgccttggttgcccaaagaattacaggcgtaagcttcgacacctagcctcctctccccagttctaaatgttggaatgcccccttgctcagcctccaggctgctcctccatccacacttccaagtatttcatccattctagtggctttaattgccatctgtatgctgatgagtcccacatttatacaccttcagcttagacctctccacttcagactcacgtatctaagttactactaggtatctccacttggctgtcttaatgttgattcagacttaataaattcaaaacttgatgcttctttttggagacagcatctcactctgtcacccaggctggagtacagtggcgcaaacacagcccactgcagccttgaactcccagggtcaagtgatcttctcaccttagccccctgagtagctaggactgcaggtgcgtaccactgtgcctggctgatgtttttaatttttttttttttttaagagatggggtcttgctttgttgcccaggcaggtctcaaacacctgggctcaaacaatatcctcccaccccggccttccaaaatgctggtattaacaggcatgagtcaccatgcctgtccaaaacttgattcttgattcctgtgtttcctcactataaaacttgatcttccagaagtcttctctctcaccatatggcatttccatccctccttttgtttggggcaaaattctttgtcatcgtcaagtctcctccctccctccctccctccctccttccctccctccctcttccacattcagtcagattctgcagctctgctttcgcaatctatctaaaacctggttatttattgccacctttactggtaccacactggttcaagccaccatcatctcctgccccaattgagttatcccagcatagagtctcttctaaaacacaaggcaggctgtgtcattccttggcttaaaaacctctagttacattttacacaaaagccaaagttcttaaaatggtctccagggccttcctagaggttacctctctaggttcatttcctaccattctccctcttctgcaatctcctttagtcacactggcctccttgctgtagctcagaaattgcaagcatgtgctttacctcaaagccattgcacctgtggttgcctctgcctggagtgcttcccctcagatacccacatgcctgctctttcaagtccactgggtcccagccagtgaggccatcctgcactgcctcatatgtgtcctgtccatctcagtctgccttgttctccatagcactggtcactcttcagctatgactagagcaagctccatcagggcagaagaatttgctggtcattgctacatgcccagcaccttagtcatgtttgggccatgtgaaatgctcaataatttgtagaatgaacaagtagttttacaaacatactgtcagctcagacttgagttgtacactgacgtgctcctgcacccagttcatatgctgtggcgcttgtgagagtggctgttaattcacaatctcagactatttatcacggaagctaagaggaataggggcaccaacaacctgtctgactcaggttgttgggtcctggaattggtggtgtgaggaggaggaggctactgcatggcttactgggttccccgtcctgacagagtaaattgaagtgttctcagggatgttaggataaggtggctcagctgagctgacttatcagagtgtgcatgcctgattgcttaatttgtgcttcattggacttccataggtgaaactggtgcagcatacctattcctgcctgtttggaacattcctgtgcaacaacgccaaggagagaggggaaaagcatactcaggaacggacatgttccgtgtggtcacttcttcgggcaggcaacaaggctttcaaaaacctactgtattcctctcagtcagaagccgtatgtatccttcagcctttccactgtggtcagcagaaggaatttggggttggttacatatgagagcctttttgagtagtgactgtttttgtgaagacatctctactgtctctggatggactggttccatttttcccccatgattctgtcctgaggaaggcctgcttctgatggtgctctgatctgtttctgatgactacttgctgagggtggtttggtttaacacagatctctactttgccaccctagacatgaatcttttttggcactgcctccagagcttatttctagcatattctgtcttacgggagaggcacttaagttgcttcctgatgcactgatagctcagaatgagctgccaccaggcccccagcaccctcccagtgtcaataagcaatgatacccaccaaagcttctgtctcagaacagtaaactgtgtttgacattggtatgtgtgtctgtctgattctctgctcacatgaagagctggcaggccctttaagactttgttccccgaaggaatgaataccttctgttaagcagagaaaaggaggcacatagacctatgtgtcagtttcatagtaatactagctttgtcagaatgcatcttagaccctaaagaagtcaaaaggaggctaatcagagttcatactgatttcctggactattaatatggttctcattacatttaagtaatcacagaaaagatttaagctgactgcttgtctctccccttcagtgtgccttctggggaagtaacaatacagcaggaaaatttccttcttttcacatgattaatttaaatgatcccataaaatgggtttgacagtgtttcttgaagccaagcttttgtgccagcaggatggacaatcaccatctaacagaatgactcactttcttaggcagtaaaagcaacaaatcaagctgatgaaagtcagacattgaaggtgacctaagaaataactataatgagaaagggatctaaaaaatattttatattttcatgctctcaagtggctcttaggtgaaaaatgttggctatataaaatgtctagtcctgtattggtcctcttgggatagacctgtatccattggtgctgcttctttgtggagatcctgtcagccctgttgggtattccagctgggtgcttgctcttgatcctcatttccagacatcctagaagacttattggggcatatttaaacctgtgtcctcccccctcctcaggtgctgtaccctgtgtgccatgtgcgtaacctgatgctgtggagtgcagtgtacctgccctgcccatccccaaccacccctgtggacgacagctgtgcaccatacccagccccaggcaccagccctgatgatccccccctgagccggtgagcccagggtgatgccacaggcctgacagcctgtgtgggtgtattcctgtgttgggacgtgtgcagggatggtcagagatcatgatggtatctggctccacagtatctttcttaggtctctgcagttttttcagggaagttatagggatttctgagctacgaggctgtaagatccttgtttctgggagtgagttaggccctgttgcttcatgttgttttgcatacactgagccgctcctcagtgatagagcaaatcctccagtttttctgtgaccccctggtttgtgttttccccagtgctctgtgctcctgcctatttgccatgatttgtcttctgaggcttaaaaggcagatgctgtcagatgacagaaaattttgctttggggccaggcttggtggctcatgcctgtaatcccagcactttgggaggccaaggtgggaggatcgcttgagcccaggagttccagaccagcctgggcaatgtgttgaaactctgtttctacccaaaatgcaaaaactaaccaagcgtggtggcacatacctgtagtcccagctacttgggaggttgaggcaggaggatcacttgagcctggaaggtggaggttgcagtgatccaagatccattgcactccagcctggatgacagggcaagacctgtctcaggaaaaaaaaaaaagaaaagaaaatttggctttgtcacttgagaattagctttattaaattcagactgatagataatacattaatttaaaatactgtaatatcaagaaacaccagtgctactttgccatccactgagaaacacagcagcatcatgaagaacgtcttttggaaatagcatttgcaggccgggcgcggtggctgacgcctgtaatcccagcactttgggaggccaaggtgggcggatcacctgaggtcaggagttcaagaccagcctgaacaaaatggtgaaacacccatctctactaaaaatacaaaaaaactagccgggcgtggtggcacacacctataatcccagctactcaggaggctgaggcaggatcgcttgaacctgggaggcggaggttgcagtgagctgagatccgccactgcactccagcctgggcgacagagtgagactccgtctcaaaaaaaaaaaaaaaagaaaatagcacttgctgttagctcatttgtatgtatggggcatggggttgggggagtttgaaaggaaatctgcacactaggaggacttgttccggagctttgctgctccagcagtctgggcctcgctccagagatgctacagctccatgagtagccataatggacccagttatgaaacaactgcttgttaaaacctattgtctcctacttcctccaaacagtttccaagattttcatttcccccaaattcctttcctttaggctaccaaagactagatcatacgacaatctgaccacagcctgtgacaacacagtgcctctggccagccggcgctgcagcgaccccagcctgaacgagaagtggcaggagcaccggcgctcactagagctgagcagcctggctggccctggagaggatcccctttctgccgacagcctagggaagcccaccagagtgccggggggtgccgagctttctgttgcagccggagtagctgaggggcagatggagaacatcttgcaggaggccaccaaagaggagagtggagtagaggaacctgcccacagggcaggcattgagatacaggagggtaaagaggaccctctcttagaaaaggagagcaggaggaagacacctgaggcctcagccattggacttcaccaagacccagaactgggtgatgctgctctgaggagccatctggatatgagctggcctctgttctcacagggcatttctgaacagcagagtgggctcagtgttctcctcagttctctccaggtcccccccaggggagaggattccctggaggtccctgtggagcagtttcgaatagaagagattgcagagggtagggaggaagcagttcttccaatcccagtagatgcaaaagttggctatggtacctcacagtcatgttctctgctaccttcccaagtcccttttgagaccagaggaccaaacgtggacagttctacagacatgttagtggaagataaggtgaagtcagtaagtgggccccaaggtcatcatagatcttgccttgtaaatagtggcaaggacaggcttcctcagaccatggaacccagcccttcagagacaagcctggtcgagaggccccaagtggggtctgtggtgcataggacttcccttggcagcactctcagcctgacacgttccccttgtgccttgcctttagccgaatgtaaagaggggcttgtgtgcaatggtgccccagagactgaaaacagggcctcagagcagcccccaggtcttagcaccctccagatgtaccccacacccaatgggcattgcgccaatggggaggctggtaggagcaaggactcactgagccgtcagctgtctgctatgagctgcagctctgcccacttacactcaaggaacttgcaccacaagtggctgcatagccactcaggaaggccatctgcaaccagcagccccgaccagccttcccgcagccacctggacgatgatggcatgtcagtgtacacagacacgatccaacagcgcctgcgtcagattgagtcaggccaccagcaggaagtagaaactttgaagaaacaagtccaggagctgaagagtcgcctggagagccagtacctgaccagctccctacactttaatggagactttggggatgaggtggtgagtaggctgtggtattcctccatagctgcccaaggagacggcatgctgaggctgggtgccctttgtgcccagtgcatggtgattggtacaggttgttaaaggattggaaaggtccagagtagccctgttaagagaggctggagatgagcctccacgacagcgatggcagcctgcctgttttctgcttcgcttactttctgcagatgtcctgttgaggccgttggagaggaagagacttagcatgcactgcatggttgatcagatctctcagacacaggatcataagtcttcagaagggcttgaacccatgggcagaatgacatctgtagggcaatgccaagttattcctgtcagattttagtgcctgttctgccttagtaactacaaagtattagtccttccagacgtgggctatggctttgaaggttcagttctttttaaacaaatatttatacccatcctgtggcagatgctgccagtagaaatggagagaagggactggtttctagcactgttgaggagttagctctgatgggggtttgtggctggaaatgggggttccagagggggaggttctcaaggaggtgctttcctctctgggtggacttgactcaggcagctcaagtacaagtgtgagcctggctctcaagtggtcagcgtacattaaaggcgggcacatccagtgactttcagttcagagtgacttggcttttccttcatgctaatgatagtttctcatgttcccagagagtccttctaagaaaaggagggcatcccgaaagcactcagctttaacttagtggcaggcagggttggattgacaggcccactggagcagctgacatacagaattctcattccattttggtcacttccctctcactcactttctggaaccctgagggcctgtttttctactccagagtcactgcacacaacctgtgtatccctctcccagctgagcccaggcccacactgcacttcttcaccccagttcttgatggctgatgcatctgcagattcggcagtcctagcactcggccccacccagagtcctcagttctcccttcttcaccaggccttttcttcttttgggaggagaccaggttcattctgttcagctgtgtttgtttgccaacagacttcaatccccgactcggaaagcaatctggatcagaactgtttgtctcgctgcagcacagagattttctctgaagccagctgggagcaggtggataaacaggacacagaggtacaggctcagcccctgctctgagtgccatccatttaactgttttgtggttcttctccacccccattcccaccccatacccctggccaaggaagcacctcccagcacagctagccctgagcctctggcaccttagctcctgggaacccacatgaagcctaggatttctgagccagggagactcagcaagctggccctccctcttcattgcctctatgaactggagccttgccagctctcacagtgacccagggtgctgctgcctgctactttatctcaggggagattggagtcccctccagggaaacgatttggacgcctttcttgtactgttgacatcagatctgctgggctggtgccactggagctgatgtggtccttgtgactcttgctgcccccagcatggctctgctggctccagctggatggcccatctcctgtcagtaacctggtcccatctgttttgcagatgacccgttggcttcctgaccacctggccgcccactgctatgcgtgcgacagtgccttctggcttgccagcaggaagcaccactgcaggtaccattgaggggctgtggtagggtgggctgtgtgtggaggttgagggtcggcccacagagcctgcagagtagagggttgtgggtatctcagtgttctgtctgaggcagagccatggtctcatcttcctgtgcctctgaaattggtgtttgcaaaactgcatttggcatctttgttcaaattcagagtaatcactgttaaattctgaaatgtgcaaatggtagcattttgttgtttcccagattggtgaaacaacagccaccactgaaaccaccatttcttattctcagcataacatttcttcccattcaacatggctactatgagcaaaaccagttttcctgcgatggggagggaactattttcctattcctttcctgctccctgaccccacacttgttttcccttgtgccattggtgagcagctgtagcttgggaagtagtagagacagctgaggacagtcttccaatcattaaggttcctgacttctttttccttctgggttagggtagtgagtttactagggaccctttgccccagctagggtgttgactgtctggtggatgttcagtgttcttagaagaggaagtttatctgaatcatgccatagctcacccacacgagtgggtggattgaaaatggaacagtctctttgcctagtaatgatgcttctaggacatgtatctccccaccctgcaccccaagcccagatatctttggttggcttctcttctgagctctttctcccctccttgcagggacactgaccgtgttgatcaaacgtggtgagcatttgcaacaacctgcctgtgatgtctgcacatctacaataacttctccacactaactcttatcatttccccctctctgcacttactagggtgaagcctggggccttgggtgcacaggcagataggtgggcttgaggggattcaaagcagctgaggagaggccatcgagggtgggtcaggctgcagccatgtgctcccctcctgatcacagaggtcagccaggccgtcttgcttgtgacgagaagtagtgcttcttgtcttctggtcttgtaggggaaccagttgggttttcagagctatttattttgggtcagtgattcattgagatgccagaataatgctagtaatttccaggtcaaacagcatcactgcttcttttttccctttttttttttttttaagagaccaggactgaacagaggtgatctttccagagaattgttttagcttggaagacttcaaggaaagattccacttagtgtctttcagggtcctctgaaagaagtcagatagaaaagcatcagccaggtgcggtggcttacgcctataatcctagcactttgggaggccgaggatggcagatcacctgaggtcaggagttcaagaccagcccgaccaacattgtgtaactccatctttactaaaaatacaaaattagctgggcatggtggtgcacgcctgtaatcccagctccttgggaggctgaggcaggagaagagaatctcttgaacctgggaggcggaggttgcagtgagccaagatcgcaccattgcactccagcctgggcaataagagcaaaactcccatctcgaaaaagtaaagaaaagaaagaaaagcatcaaattcatgtcaggcttttgagctgaactccagcaggaatgttaaagaagtgtagatgttcagaaatttttctgtgtaactacaggtttttgctgactcacgctttttagaactagttacgaagtacagcattctagaagatgaattttgtgtttttcttttctgtctttccattgccccatgtcccaccttttccttttgtggtattcttttgttcccaactggtcttagtcttctctcctcctgtgcctaagtgatccttaatccagcagtgggtttgcattccgaacagcataaatgaaaagttagaaggctaagaagctgccctcccccagtctttggtgggctgtgtcaggctccttggagcttcttgttcttaggctcattaggattgatttgtacctcagggcccagcaaaagtagagttgtaaggtgggcagaaactcattctttgccaattccctttcctgttggctctgatgggcatccatctgggggtgcagaactgtgctgcacagatgcctcagaacccagctttcaggggaggaggagagggatgcctggggcctgagtgcattctggccttctggtagaactctggttttccctggagatgcatgggtcggggagtgagccataattgactgacacctatctaataagggggtgtgtgtgcacgtgtgttcatcctgtgttcttgtcctcccacctctcctctttcaccctctgagcatgcatcacaggctgcttgtccctggctttgcatgctgccagcagagcagtccaaaatggcagcagtctatctgccatgttgctgcctttgatcctctggagaagtggccgttgggcaaggctccttactccccagtgaggctgggtagttgtttctctcgtttgaggagcctggcctctgtgatcacaagctacacagagggcattgcctaggtgggtgtggccactgggttttcctggatcaggactaacccattgttaggaccatgtattcttacagatctctcttgagcagcattcttttgtatacctgagcagcattcttttgagtcagtggtgaggcagccaagaatccttggccccaaagtgaaaatgacatgtgactctgctaggtagggacaccctccctacccagcttgttcctgggctagagagatgaaagggtttgatctcaaggagctccagcacatgcaaattacacacggcaaagtttgtcttttgaagttggtttccctccgcatacctgctggccaaaactaacattgttctgtttcttctcatctcaaggaattgtgggaacgtattctgctccagttgttgtaaccagaaggttccagttcccagccagcagctctttgaacccagtcgagtatgcaagtcttgctatagcagcctacatcccacaagctccagcattgaccttgaactggataagcccattgctgccacttccaactgaagctcagtgacctgggtgggcagtggccaagctgctgttcctatgacaggcccactcaacctgggcagaccgagaggcccgtgcactttggaatgggagcgtggaaccacctgtacagagtgacagatttgggatgcaccactggattgtagattgatttttctttcctgtccccctactccctccctaccttttccatcctcctcctctgccttcaaaaaaggaaactttcccttggttgtcttaattttttttttttttgatggaagaccaagggttgccaggcccactgtaactgccgagctgcctgctgtcaggtgacactgagggatggcttgtttcttccgggtgggaggatggtggtcagagccaggagtatggagatctgagaccgtgagcagggaagaaagccagtgctaacatgcaaccattcctcacgccaccgccacatcagagctggttgggaaccctttgctgctggggaggctggaagcatattccccaagagcactgccctgggcatcatctccctcctgcgaggagctgagccagtcccctcacagatggataaatgaggctgatgtttggagggagaggcacacggtaaatggcatccccttaggcgcctctttgggaaaggaaagtggatgctcctttgaggcaggcgaggggctgggagtgggtagccgtcatgttgtcccccgtgggatcccatttttaacttgacccagattgtcttgggctccttttactttcagggggctgctttcctgggccaggctgtgtagcacttcccaccctcaggcatgagtacagactggtcaaaatgtttatgcagtcaaggccaaagcctgccctgagcccagacacacctgggtccccattctggggcctggtcccctaaacaatctcttcctcagccagcacagggaaatccagactcagggttccagaaatcccccgttcccaaaccaaaccaatcatggatcttccctttaaggggtagaatcagcctttagagttacaagcccctggaaaagggagcaggtcccatacaatcagcctttctcctcttctcttcttgggacaggaataactgctgagcagtccccctttgccactcctggctgtctgagtgggcacttgtctggctgctggccagcagtgaagggccacttggtgacttcgtagggttccttagagaagtgacatggccttgaggagattcagggcacctttcctcagtgagctttgatatggtccaaaaacagccttaaatcaagaatatttgtggaggtaggtgtggggaaggttggagaagagttaggtttgtgctttgtaatcttggcatccatgttttgtgcctgccctccctcttggggaggccatgcttgactctgctgaaagctgctaactggtgacagggtggatcatggtgaggactaggggtaaggtcagggaatgcttaagctctggccctgccctgtattcctcttccccttggtagcagttccctgaccaagggcaaggtgtgtctcaggaaggtggttctgtgcatgcctgggtgtggttaaggcgtggcccagaaggcttccctggtgctctcagtccaggcaaagcccagagcatctgagcacgtctctgacttccagtggcaacacagtttgaacgtggtgaaacagggtgtagttcttttccacattctgtgtcatctagtcgtgcaggtagggaaaaagttggtctaattgaagattgtgcatttcctagtgacaggtgccaagaggttatgatacgggtttcttgggtctgatgtacagtgtgaataaatgcttgcagctcttagctcttttttgatcgatgaagcacttttttattaatattttcctttgttaaaggaggaaccgtaactctccatagctgtacatataacccttttctcctaaagaggagtcagtcagtgctcctatatttttcattttttgtcaaagcaagaagtaaatactttagaattgttaaatatataaataaagcaaataaagttgagtgttccacatggtagcatttgctaacacttcctaattctttgccctgtggtttatcccctcttcgtcccttttccctctcacacagaagtgtttgagggcctgctgggaaactgacctttggcaaaggaaagctacagatagccttccgactctagaccttggcaaggagcctcaccatgatgttcaagcactgaacgcatttcctcagtgattttgctcctaaaatctcccaggctaaaagagggcaaagcagtcagggatctgacctggcagctattcctccttctctgaagagttcccatcagtagtcattacaactacctctcgcctcaaggctccatttttagctgctgctctgatttcagggcagccagtactctggccccttcagtcggggagtggaaggagatgtggggtgggggtgagaaaatgcttctgcctgttgttcttgaaggatagactatgggtgggcagagagaactgggggcagaaatggaattagatgtgattgggttatgcagtcaactagaggtctccttcccgccctctctccacacagagaggaacctctgctccttagctcttacagcaggactgtggcatctagtcacttcaatactagttcttgctcttcacagaggtagatttttctttaccctacagcactgttgggcatccctcccatcacatgggtctgtgggtgagatatgttatgctgttcctccctcgggaaggttggtattgaggggtgccttgctccagaggcgccagcccagcatctgtggtgagttggctaagatccagagtgacctgctcagagctccccagaggccttcactctttggggcagtctctctagggtcactttctgaatgtaccttctacctaaagtatacaaacacaaagagccagctgagctggttctagtgtgaaagccgtaagtgccacccagcaggcgtttgaaaacaagaaatcattcttctgtggaaggagaatgtgccatctcagctaccctcagtccgccagggagcccagtctgtgtattcatatgaagttgtgaaaaccatgagtgtgtgccatggccatcgtgtctacacacagccactattgttcctgtgggctagtctccagcaaattaaaacactggcatggcctaggaagggcgttgcgagctcctaaatggaaagcttctctgggggtagggagatgaagagccaagatgctggtgaagcaggtgcagtgaggatccaaggcaaggaattgccctgagggaggtggctgcatatggagaaaggcagttctctgtgggcaaggccagcttgcttcaggctgtagagggaatttggtctgaagcaacagggcatgaactgtgactttgagctgccaggttgtcttcatctcagaactttcctatcctggcactctcgttacctttcttctataccttggcctctgtaactgcagtccaaaacaagttacagctgccttaatccactgagattctctatgaggatgtacagaaaagttttcctgtaataattttgcttatatgctaactcttttcatgttagcaaagaatattctatgaattagaatgttactgtggtagatctaaaggagaatgaacagaaggtgctggaggacctgttaaacaatctctggctattaaaaaacatcaagatgagaattaaaggcatatcctgatatacttgcctgcttgcacatgaggctgggagatcccatgcctgttgaagttaactctagccctgacctctattgatcttttgggaatgagggctgatttgaaggtgctgttgcaggatttcatttagctgctgccagttcaagtgacctgtccccagggctgcagctgtatccacctgattgcagtaggtgagggctaacagcagaatttaaagtggaccctgggctgtggagcaaagtgactatccatttggacttttggataatgtggcaggagtcccagctgtttaatttctagtcacattttccagaaagttgttctaagttgagattactgacaagatttctcaagggcaggaccagatatgtgagagacttctagttcagagctgacccctctaagcctctgacacttaaacacgagtcctgctgtccccagcacacaactgcactgaagccttgttcctctcggctggtgtagagctcatctgcatgttgtgtgcagataccagtagcctccctgcttgaataggcctctcctaggctaggcaggtgttcagaggcatgaaggtctgggcaggggaagggcgtcttctgaaatgggagttaccaggtttttaaatgctgctattgttttatttaccatttaaggtcttttctattatatctgagtaactagtcagtttttcttacagtgctcatagcagttgtatttgaattgtattttcagtgaaatttgttttacattgccatttaaaattggcctttaacagcttcccaactggcttatatttttttttaatgaaaacataacccatgaggctcagatgctgttgaagaaataaatggtatgttgctgctgacagtagtgcttgcctattgtaacagcattggttctgctgtagcctcggtgaccatttaagttgaataaatctgtcattttcacccacaaacagttgttgagcccctggatttgggttgtcactgtggttctcctgccagtgctataatccagtgtcgtaggtgcagggtatgaatcagctcagcctcttaggagagaggggctctcagcgaggagggggcggggggggggtcactatttatcttccagaggcagggttcatggattcctgatgtttagaggcggaagggaccttaggtcacctacttccacggttttcatactgttctctggggcctcgtggagagggagcctccaggcccattcaaagctttattagatttaaaagtaagatctggtatgaagaaaggttttgtttgtttcttaaaataaaaagtctgaaaatcactaatccaatctcctcctttttcattgaggaaactgagactcagagagggccaaagacatccagattaccaatgagttaacagcaaaatttgaataaaagtcattcttggccaggcacagtggttcatgcctgtaatcccagcactttgggaggccgaggtgggaggatcacttgagcccaagagttcaagaccagcctgggcaatatgttgagacccatctctacgaaaaatataaataaacctgtctctacaaaaaatatgaataaactagtcaggaatggtggtgcacacctgtagtcccagctacttgggagcctaaggtgggaggatctcttgagcctaggagtttcaggctgtggtgagccatgatcacgccactgcactccagcctgggcaacagagggagaccctgtcccataaaaaaaggaaaatactttcccgactcctaaccctcttcttgtgctcttgggcctccagaaagcctgatgtaaatagctgtattggttctcgttgaaatctcagcgaggagcttaggcaattgccatcacaaggcttgaattatgagcccttctctccctcttaaccaaaatcaaaatgttgtgatagtctaatccagtgtttttgtttttaacttttcaaatacataaaaacaaatgatatgttattagcatgaatcatcacagtttaagtcataacatcttaaaatcagtgggcttggggagggagcatttttcattagtgcagatgataggttcactgtgaactgtcccagcatccaatttctggattttgttttagttgttatataatatgggggagtttaattttaaaaaatttgagttttataggtaagcggttgcaaatggtagtagtcacagcttgcctgcaatctcttgttgacaaaactgaagtacatgcctgaaaaaagggattaatagaagaatatccaaaacctgctttcagtctttatcatccatatatcagatgagagacacccaaagatttataagcactaaaattactttatgctcagggccaccaggtctgagttggccctgggcctaatgatcacagcactaagctggtgccctcccagtcagtgacccctgcaaaggccacacacacacacacagcaatacagactgtacagtgaagtctcaagcagcctcactgaatgtgttttaaacctttgggtgtatatagtttaaaagacggttattaatatttatcaggacattatttattaatatcaggacaaattctcctgaggcagtgccacaaaagttggtttgaaaatcaccagtttggtggaaagcccctgtgttttagagcccacagacctggggtgggatcctagccctgcagcaccagctgagttgctcatgggtgtatgaggaactcggagacatttcctcatctgtagcagagcacatggcatataaatggagtgggaaggtgggggcctagcaaatgctgtcctccccactgtcccatgaaatgagatagatagatgatagcatttctgtctctggcttctagcaggcatttggaacaatcaatcagagccaggcagcacttctattccactgtgtgttgaaactagaccctgctctcgcttccaccttacaggggaaaacatttgactttgaagcattccaatctgagttttgcactaagttacaaatgaatcactagctgaagaagacaaactaaagttcatatatgtgttttagttttatttattttgagacagagtctcactttgttacccaggctggagtgcagtggcgcgatctcgactcgctgcaacctccgcttcccagattcaagtgattctcccgcctcagcctcttgagtagctggaattacaggcacccaccatcatgcccagctaatttttgtatttttgtagagatagggtttcaccatgttggccaggctggttgaactcctgacgtcaggtgaaatgcccgcctcagcctcccaaagtgctaggattacaggcgtgagccaccgtgcctggccttatatatgtgttttgtttttaaattaacattttgtaaacagatggtggtctgcatgtgcaccgatgctttaagagtgtatggagccaatgggaagggagtgtggagagaaactgcttgttggggttgaggcagcatctaagaacgcctgagtcctgccatggcaacaatcctgcaaagacagacaggacctcactttgttaaactgatgagtttaagttgttcaagactaaagacgaagccagaagatgcagactagcttcgcaggctgagaagtggggaaggtggagccaggtggacctcgcctctgcatcacagaggcctgggtccaggctatggtgctcttagcatctctttaagaataaatcccagagcccaaggttggaagaggaagtggaggccttgcgttcagatggccctccccaccctctccaatgacagaggagcccaaggttgcccaacatatttaaggccatgtcatccgagttcaaatagacatgagtttgtagtaagtggttgctgcactttgccagctggaagatcaagccttagaactggaggttctttcaagtcccccagaaagtgctggcatacaatgtgtaccagggcagctccctctttagaagtccctgtcagcccttgggacataaactgcatcccctggccccttgggggtggtctgattctttctgttctctttcatctgattcagtaataagctagctagctagctgctgccttattaccgcctaactagagactcctagttttggaaagacagtaagatgtcagcttgccagcctctattactgggatgaggagacggaaatggaaaccatgagaatggtgtgcctctcgacagttgccactgacccctggagaggagtcctagttgggttgggaggaagggggttgggcttgaactctccctgcccccttacttttggagcagcagcatccccccgaggagctgagaggtcactccctgggtcaagcagcctgagctagtccctctccacggacaggatgattcacagcccagaaaagggagcagccacctctggaaaccgtgtacatcctaagagcccctcctgcagcacctttcttaggttgattcagggagggaagctgtgggaggagtcggggaaaggcctgggagcagtgcttcctctctccctgctgcaccaacatcttggaagcttggtggaggtggggacacaactcttaccagtagtgctgctcttcctcctctcccacacccccactttctcttcccctttccaaatacccaaaggttttaatgtgatctcctggcattggagaccctgggcaccactgcacattcaggccagtgagcaggtcaggcccatgtagccaccggaggtggcaatgcccgagaggccatcctgcaggcactagctggagatgccagtgctgagtgactccaaggagattgttttccttctgaaaaagcagcacatggctgggcgcagtggctcatgcctgtaatcccagcactttgggaggccgaggcgggtgggttgcctcagctcaggagttcgaaaccagcctgggcaacacggtgaaactccatctctactaaaatacaaaagctgtagctaggcatggcagctgctcaggaggctgaggcaggagaattgcttgaacctgggaggcggaggttgcagtgagctgagattgtgccactacactccagcctgggcgacagagcgagactccatctcaaaaaaaaaaaaaaaaaagacaccattccttttgctgaagtgggcacaggccaggcccctaggaactgagcgcttgcagtgctgcaggaagtgctctcctggcactcccttgtcctgccaagaagtggggactgcaggggactttgagcaacccagtacatgaacctcttcatttacagaagcattttggaggcttttttcactacacaaaaggttctactatagaattttccaattgtattttgcattttaaaatatactgttcattaacataaaaatatacacaatgccgggcacagtggctcacgcctgtaatcccagcactttgggaggccaagggaggcggatcacttgaggtcaggaatttaagaccagcctggccaacatggcgaaaccctatctttacaaaaacttagccgggcctggtggcacgcgcctatagttccagctactcgggaggctgaggcaggagaatcttttgaacctgggaggcagaggttgcagtgagccaaggtcgcgttactgcactccagcctggttgacggagcaagacaccgtctccagaaaaaaaaaaagtgtacacaattacaagtgaaattcccacttgctagaggtaactgactcaccacctttagtgagttgtcttggttttgttttttaaaaatactctgcaacaaagctttacttgtttttgttgtctgttacagagtaaaccgtggtgtagattcttctgccagaaattctcacacttttggagttagagaacagaaatggttcagtaagtgacaaaatgacagccagaatagatggtctagggctttgtcccacatccaccatggccttagcctttttctttcaaccttgtttggctggctccttcctctatccctaaagctgtccagtcctccagcctgcaaagcaaattctttcaagtcagagcaaattctttcaagtctctgcctccagcaagtatcctgtcttgctccttcccttcactgtgaaacgaatagaaagagtggccagctctatatcgtctttgctccaccaccccttcctcttcctcctgcttctgctgccccccaccaccccaacactgggtgtccccaaggactagccacacactctagacccactccaaagcattctttcttgcaaccattctgcaacctgccaccttgctaaccctcctgccagttcttctgcctctgtagttggcctgtgagactttgcaggcagccctctcacctacttccttggcattactgctctgaggctcagctctctgccctccttccacgcatgcttccttggacatgcagaaattaaagtgctgaaaatggaggcctgttatataccacagttctaagtctctagaggcctccttcaggcacctggggagactgcgagagcatcaggtgtccccatctggacgtgtctatgtggccatgcttcacctgcacccccacgcagttcgatggcattaacctggggactagttctgggcctgaaaactgagctcagccttgtcagccagagatgcctcggggcttcccctgaactgagaggccacgacgtctgctcttcgcttttatcctctgttgcaggatgcagtcagcacctagtgcaggggtgaacgccgatgccaagtttgccctcctatccttcaaccccaagtaggaagttcacctcttattttcatattgtaattgaattccgacaccccaccaacccttcctgggactgggggaagccccatcgtcagtctatttatgacactcagtcgtaggaagctttgaccctggttggacaggaatgagctagagcacccaaagccactgggcatggtttctgtgtgctgccctaggcaagggcagaggggctctgcctctccttacctgggcctaccagaacacccttgccagtcacatgtcttccgggtcaccctgctgccctccaaggcacctcatgccctcagagggccctgctgatgcctgaaaagcccagatcaagctgagaacaagggcctggctgtctgttcaggaaccctctgccctgttctgcctcggtactctgtcacccctcattgctgaggaccctaaccaatgcatgcacagagagtcttggcttctgacagctctggatatgctctgtggcgccttcatgtagtaagtcattgaaggctaagtctctgtgcaggcttcactggtgactcacacatgtccccacccctaccattccatgagatgacatgggacttctgtctcaggcactgtttgctctcaagaatatgctgcctgttagggaagatgatcaggcagataaatatattcataccctcatccaaaaagaacaggacctgaaaaagcctcttagaggcaacccattgaaaatggagaccagtgtttcatacagcacatagtgaaaaaggtttgatccgaatttaatcttgtaaaatgaaactattattgaaataagtatcttttttgaatcgacaaaattatatataatatacagtatgttttgaaatatgtatacattgtgtaatggttaaatcgatctaattaacatatgcgttacctcacatacttatttttttgtgatgagagacacttaaaatctaccctcttagagattttcaagaatacaatgcattgttattaactaagtcaccttgtggtgcaatagagctctttaacctaatcctatttaactgaaatttatcctttaaccagtatctcccactgttttgtttaaaagtatgttttaacaaaaggtaattgcaactataggctaattctttgttgttgttgtcgttattgagagagggtcagtctcgctctgttgcccaggctggagtgcagtggcacgatcttggctcactacaacctccgcctcctgggttcaagagattctcgtgcctcagcttcctgagtagcagggattataggcatgcaccagtacacccagctaatttttgtagttttagtagaggtggggttttgccatgttggcttggctggtctcaaacttctgaccttaagtgatccacctgccttgacctcccaaagtgctgggattacaggcgtgagccaccactcccgaccaggctaattcttaaaaataatattttaggtgtatttccctccccaaattatatgattgcacaataggacattatttcatgtttgattttctaatgtaatcaatcacaggatcattttaggaaaagttagtcaagggcttcctcaatttccctcttaaatcctttagtctttgatattcacatcatccccctaggaaacacctaattggttagacatgtcaccttccccttcatttgttaatggacctactctctgcgatccttatttccaatggctacactcatctgagcagtttgccaacacattcaccaactatgtgaaattctgca

SEQ ID NO: 1363 - DNA, 2288 bp, Homo sapiens
gcgcgctctgtgtggccgctgccgccatgttgttgtggttgtgagaaggcggcggcggcggcggagtagcagccggacgagacgtcccagcggctcaggcgctgcccagcgccggccctggcagggagcctggtggggtggcggagggggagactgtgccgtggagggcctcgccatgtcctgctgcccgacttccttgtgaaacctcctagtagaaaaagttcttgggacaaacttcatttggatgaagagactcggcacagccttgagtgcatccaggccaatcagatctttcccaggaagcagctgatccgggaggatgagaatcttcaggttcctttccttgaacttcatggagagagcacagagtttgtgggccgtgccgaggatgccatcattgccctttccaattacagacttcacatcaagttcaaggagtctcttgttaatgttccattacagcttatagaaagtgttgaatgccgagatatatttcagcttcatttgacttgcaaagactgcaaagttatcaggtgtcagttttcaacctttgagcagtgtcaagagtggctgaagagactgaacaacgcaatccgaccacctgctaaaatagaagatctcttctcatttgcataccatgcttggtgcatggaggtctatgccagtgaaaaagagcaacatggagacctgtgcagaccaggggagcatgtaacttcaaggtttaaaaacgaggtggagaggatgggttttgatatgaacaacgcctggaggatttccaacatcaatgagaagtacaaattatgtggtagctatcctcaagagctcatagtgcctgcctggatcactgacaaagaactggaaagtgtatcaagtttcaggtcctggaagcgcatccctgccgtcatctacaggcaccagagcaatggagctgtcattgcccgctgtggacagccagaggttagctggtggggctggcgaaatgcagatgatgagcatctggtacagtcagtagccaaagcttgtgcctctgactcccgatcgagtggcagcaagctgtcaactaggaacacttctcgagactttcccaatgggggagacctttctgacgtggagttcgattcttctctgtcaaatgcttcaggagcagagagtttagccatccaaccgcagaagcttttgatcttggatgcacgctcctatgcagctgctgtggcaaaccgagccaaaggaggaggctgcgaatgcccagagtattacccaaactgtgaagttgtgtttatggggatggcaaacattcattctattcggaggagttttcagtctctgcggttgctgtgcactcagatgccagatccgggaaattggctatcagctcttgaaagcacaaaatggctccatcacttgtctgtgcttctgaaatcagcgcttctggtagtgcatgctgtggatcaggatcagcggccggtgctagtacactgctcagatggctgggaccgcaccccccagattgtggcattggctaagctcttgctggacccttattaccgaaccatagagggtttccaggtcctcgtggaaatggagtggctggattttggccataaatttgctgaccggtgtggtcatggggagaactcggatgatctgaatgaacgttgcccagtgtttctgcagtggcttgactgtgttcatcagcttcagaggcaatttccttgctcttttgagttcaatgaagcattccttgtgaaactggtgcagcatacctattcctgcctgtttggaacattcctgtgcaacaacgccaaggagagaggggaaaagcatactcaggaacggacatgttccgtgtggtcacttcttcgggcaggcaacaaggctttcaaaaacctactgtattcctctcagtcagaagccgtatgtatccttcagcctttccactgtggtcagcagaaggaatttggggttggttacatatgagagcctttttgagtagtgactgtttttgtgaagacatctctactgtctctggatggactggttccatttttcccccatgattctgtcctgaggaaggcctgcttctgatggtgctctgatctgtttctgatgactacttgctgagggtggtttggtttaacacagatctctactttgccaccctagacatgaatcttttttggcactgcctccagagcttatttctagcatattctgtcttacgggagaggcacttaagttgcttcctgatgcactgatagctcagaatgagctgccaccaggcccccagc

SEQ ID NO: 1364 - protein, 438 aa, Homo sapiens
MEVYASEKEQHGDLCRPGEHVTSRFKNEVERMGFDMNNAWRISNINEKYKLCGSYPQELIVPAWITDKELESVSSFRSWKRIPAVIYRHQSNGAVIARCGQPEVSWWGWRNADDEHLVQSVAKACASDSRSSGSKLSTRNTSRDFPNGGDLSDVEFDSSLSNASGAESLAIQPQKLLILDARSYAAAVANRAKGGGCECPEYYPNCEVVFMGMANIHSIRRSFQSLRLLCTQMPDPGNWLSALESTKWLHHLSVLLKSALLVVHAVDQDQRPVLVHCSDGWDRTPQIVAKLLLDPYYRTIEGFQVLVEMEWLDFGHKFADRCGHGENSDDLNERCPVFLQWLDCVHQLQRQFPCSFEFNEAFLVKLVQHTYSCLFGTFLCNNAKERGEKHTQERTCSVWSLLRAGNKAFKNLKSQSEAVCILQPFHCGQQKEFGVGYI

SEQ ID NO: 1365 - DNA, 6186 bp, Homo sapiens
gcgcgctctgtgtggccgctgccgccatgttgttgtggttgtgagaaggcggcggcggcggcggagtagcagccggacgagacgtcccagcggctcaggcgctgcccagcgccggccctggcagggagcctggtggggtggcggagggggagactgtgccgtggagggcctcgccatgtcctgctgcccgacttccttgtgaaacctcctagtagaaaaagttcttgggacaaacttcatttgacttcaccataagggaaagaagagagccttgttggacactgaagaagggacggggatttctcctcctaatctgggcctcttgtcatggatgaagagactcggcacagccttgagtgcatccaggccaatcagatctttcccaggaagcagctgatccgggaggatgagaatcttcaggttcctttccttgaacttcatggagagagcacagagtttgtgggccgtgccgaggatgccatcattgccctttccaattacagacttcacatcaagttcaaggagtctcttgttaatgttccattacagcttatagaaagtgttgaatgccgagatatatttcagcttcatttgacttgcaaagactgcaaagttatcaggtgtcagttttcaacctttgagcagtgtcaagagtggctgaagagactgaacaacgcaatccgaccacctgctaaaatagaagatctcttctcatttgcataccatgcttggtgcatggaggtctatgccagtgaaaaagagcaacatggagacctgtgcagaccaggggagcatgtaacttcaaggtttaaaaacgaggtggagaggatgggttttgatatgaacaacgcctggaggatttccaacatcaatgagaagtacaaattatgtggtagctatcctcaagagctcatagtgcctgcctggatcactgacaaagaactggaaagtgtatcaagtttcaggtcctggaagcgcatccctgccgtcatctacaggcaccagagcaatggagctgtcattgcccgctgtggacagccagaggttagctggtggggctggcgaaatgcagatgatgagcatctggtacagtcagtagccaaagcttgtgcctctgactcccgatcgagtggcagcaagctgtcaactaggaacacttctcgagactttcccaatgggggagacctttctgacgtggagttcgattcttctctgtcaaatgcttcaggagcagagagtttagccatccaaccgcagaagcttttgatcttggatgcacgctcctatgcagctgctgtggcaaaccgagccaaaggaggaggctgcgaatgcccagagtattacccaaactgtgaagttgtgtttatggggatggcaaacattcattctattcggaggagttttcagtctctgcggttgctgtgcactcagatgccagatccgggaaattggctatcagctcttgaaagcacaaaatggctccatcacttgtctgtgcttctgaaatcagcgcttctggtagtgcatgctgtggatcaggatcagcggccggtgctagtacactgctcagatggctgggaccgcaccccccagattgtggcattggctaagctcttgctggacccttattaccgaaccatagagggtttccaggtcctcgtggaaatggagtggctggattttggccataaatttgctgaccggtgtggtcatggggagaactcggatgatctgaatgaacgttgcccagtgtttctgcagtggcttgactgtgttcatcagcttcagaggcaatttccttgctcttttgagttcaatgaagcattccttgtgaaactggtgcagcatacctattcctgcctgtttggaacattcctgtgcaacaacgccaaggagagaggggaaaagcatactcaggaacggacatgttccgtgtggtcacttcttcgggcaggcaacaaggctttcaaaaacctactgtattcctctcagtcagaagccgtgctgtaccctgtgtgccatgtgcgtaacctgatgctgtggagtgcagtgtacctgccctgcccatccccaaccacccctgtggacgacagctgtgcaccatacccagccccaggcaccagccctgatgatccccccctgagccggctaccaaagactagatcatacgacaatctgaccacagcctgtgacaacacagtgcctctggccagccggcgctgcagcgaccccagcctgaacgagaagtggcaggagcaccggcgctcactagagctgagcagcctggctggccctggagaggatcccctttctgccgacagcctagggaagcccaccagagtgccggggggtgccgagctttctgttgcagccggagtagctgaggggcagatggagaacatcttgcaggaggccaccaaagaggagagtggagtagaggaacctgcccacagggcaggcattgagatacaggagggtaaagaggaccctctcttagaaaaggagagcaggaggaagacacctgaggcctcagccattggacttcaccaagacccagaactgggtgatgctgctctgaggagccatctggatatgagctggcctctgttctcacagggcatttctgaacagcagagtgggctcagtgttctcctcagttctctccaggtcccccccaggggagaggattccctggaggtccctgtggagcagtttcgaatagaagagattgcagagggtagggaggaagcagttcttccaatcccagtagatgcaaaagttggctatggtacctcacagtcatgttctctgctaccttcccaagtcccttttgagaccagaggaccaaacgtggacagttctacagacatgttagtggaagataaggtgaagtcagtaagtgggccccaaggtcatcatagatcttgccttgtaaatagtggcaaggacaggcttcctcagaccatggaacccagcccttcagagacaagcctggtcgagaggccccaagtggggtctgtggtgcataggacttcccttggcagcactctcagcctgacacgttccccttgtgccttgcctttagccgaatgtaaagaggggcttgtgtgcaatggtgccccagagactgaaaacagggcctcagagcagcccccaggtcttagcaccctccagatgtaccccacacccaatgggcattgcgccaatggggaggctggtaggagcaaggactcactgagccgtcagctgtctgctatgagctgcagctctgcccacttacactcaaggaacttgcaccacaagtggctgcatagccactcaggaaggccatctgcaaccagcagccccgaccagccttcccgcagccacctggacgatgatggcatgtcagtgtacacagacacgatccaacagcgcctgcgtcagattgagtcaggccaccagcaggaagtagaaactttgaagaaacaagtccaggagctgaagagtcgcctggagagccagtacctgaccagctccctacactttaatggagactttggggatgaggtgacttcaatccccgactcggaaagcaatctggatcagaactgtttgtctcgctgcagcacagagattttctctgaagccagctgggagcaggtggataaacaggacacagagatgacccgttggcttcctgaccacctggccgcccactgctatgcgtgcgacagtgccttctggcttgccagcaggaagcaccactgcaggaattgtgggaacgtattctgctccagttgttgtaaccagaaggttccagttcccagccagcagctctttgaacccagtcgagtatgcaagtcttgctatagcagcctacatcccacaagctccagcattgaccttgaactggataagcccattgctgccacttccaactgaagctcagtgacctgggtgggcagtggccaagctgctgttcctatgacaggcccactcaacctgggcagaccgagaggcccgtgcactttggaatgggagcgtggaaccacctgtacagagtgacagatttgggatgcaccactggattgtagattgatttttctttcctgtccccctactccctccctaccttttccatcctcctcctctgccttcaaaaaaggaaactttcccttggttgtcttaattttttttttttttgatggaagaccaagggttgccaggcccactgtaactgccgagctgcctgctgtcaggtgacactgagggatggcttgtttcttccgggtgggaggatggtggtcagagccaggagtatggagatctgagaccgtgagcagggaagaaagccagtgctaacatgcaaccattcctcacgccaccgccacatcagagctggttgggaaccctttgctgctggggaggctggaagcatattccccaagagcactgccctgggcatcatctccctcctgcgaggagctgagccagtcccctcacagatggataaatgaggctgatgtttggagggagaggcacacggtaaatggcatccccttaggcgcctctttgggaaaggaaagtggatgctcctttgaggcaggcgaggggctgggagtgggtagccgtcatgttgtcccccgtgggatcccatttttaacttgacccagattgtcttgggctccttttactttcagggggctgctttcctgggccaggctgtgtagcacttcccaccctcaggcatgagtacagactggtcaaaatgtttatgcagtcaaggccaaagcctgccctgagcccagacacacctgggtccccattctggggcctggtcccctaaacaatctcttcctcagccagcacagggaaatccagactcagggttccagaaatcccccgttcccaaaccaaaccaatcatggatcttccctttaaggggtagaatcagcctttagagttacaagcccctggaaaagggagcaggtcccatacaatcagcctttctcctcttctcttcttgggacaggaataactgctgagcagtccccctttgccactcctggctgtctgagtgggcacttgtctggctgctggccagcagtgaagggccacttggtgacttcgtagggttccttagagaagtgacatggccttgaggagattcagggcacctttcctcagtgagctttgatatggtccaaaaacagccttaaatcaagaatatttgtggaggtaggtgtggggaaggttggagaagagttaggtttgtgctttgtaatcttggcatccatgttttgtgcctgccctccctcttggggaggccatgcttgactctgctgaaagctgctaactggtgacagggtggatcatggtgaggactaggggtaaggtcagggaatgcttaagctctggccctgccctgtattcctcttccccttggtagcagttccctgaccaagggcaaggtgtgtctcaggaaggtggttctgtgcatgcctgggtgtggttaaggcgtggcccagaaggcttccctggtgctctcagtccaggcaaagcccagagcatctgagcacgtctctgacttccagtggcaacacagtttgaacgtggtgaaacagggtgtagttcttttccacattctgtgtcatctagtcgtgcaggtagggaaaaagttggtctaattgaagattgtgcatttcctagtgacaggtgccaagaggttatgatacgggtttcttgggtctgatgtacagtgtgaataaatgcttgcagctcttagctcttttttgatcgatgaagcacttttttattaatattttcctttgttaaaggaggaaccgtaactctccatagctgtacatataacccttttctcctaaagaggagtcagtcagtgctcctatatttttcattttttgtcaaagcaagaagtaaatactttagaattgttaaatatataaataaagcaaataaagttgagtgttccacatggtagcatttgctaacacttcctaattctttgccctgtggtttatcccctcttcgtcccttttccctctcacacagaagtgtttgagggcctgctgggaaactgacctttggcaaaggaaagctacagatagccttccgactctagaccttggcaaggagcctcaccatgatgttcaagcactgaacgcatttcctcagtgattttgc

SEQ ID NO: 1366 - protein, 1192 aa, Homo sapiens
MDEETRHSLECIQANQIFPRKQLIREDENLQVPFLELHGESTEFVGRAEDAIIALSNYRLHIKFKESLVNVPLQLIESVECRDIFQLHLTCKDCKVIRCQFSTFEQCQEWLKRLNNAIRPPAKIEDLFSFAYHAWCMEVYASEKEQHGDLCRPGEHVTSRFKNEVERMGFDMNNAWRISNINEKYKLCGSYPQELIVPAWITDKELESVSSFRSWKRIPAVIYRHQSNGAVIARCGQPEVSWWGWRNADDEHLVQSVAKACASDSRSSGSKLSTRNTSRDFPNGGDLSDVEFDSSLSNASGAESLAIQPQKLLILDARSYAAAVANRAKGGGCECPEYYPNCEVVFMGMANIHSIRRSFQSLRLLCTQMPDPGNWLSALESTKWLHHLSVLLKSALLVVHAVDQDQRPVLVHCSDGWDRTPQIVAKLLLDPYYRTIEGFQVLVEMEWLDFGHKFADRCGHGENSDDLNERCPVFLQWLDCVHQLQRQFPCSFEFNEAFLVKLVQHTYSCLFGTFLCNNAKERGEKHTQERTCSVWSLLRAGNKAFKNLKSQSEAVLYPVCHVRNLMLWSAVYLPCPSPTTPVDDSCAPYPAPGTSPDDPPLSRLPKTRSYDNLTTACDNTVPLASRRCSDPSLNEKWQEHRRSLELSSLAGPGEDPLSADSLGKPTRVPGGAELSVAAGVAEGQMENILQEATKEESGVEEPAHRAGIEIQEGKEDPLLEKESRRKTPEASAIGLHQDPELGDAALRSHLDMSWPLFSQGISEQQSGLSVLLSSLQVPPRGEDSLEVPVEQFRIEEIAEGREEAVLPIPVDAKVGYGTSQSCSLLPSQVPFETRGPNVDSSTDMLVEDKVKSVSGPQGHHRSCLVNSGKDRLPQTMEPSPSETSLVERPQVGSVVHRTSLGSTLSLTRSPCALPLAECKEGLVCNGAPETENRASEQPPGLSTLQMYPTPNGHCANGEAGRSKDSLSRQLSAMSCSSAHLHSRNLHHKWLHSHSGRPSATSSPDQPSRSHLDDDGMSVYTDTIQQRLRQIESGHQQEVETLKKQVQELKSRLESQYLTSSLHFNGDFGDEVTSIPDSESNLDQNCLSRCSTEIFSEASWEQVDKQDTEMTRWLPDHLAAHCYACDSAFWLASRKHHCRNCGNVFCSSCCNQKVPVPSQQLFEPSRVCKSCSLHPTSSSIDLELDKPIAATSN

SEQ ID NO: 1367 - DNA, 5349 bp, Homo sapiens
gcgcgctctgtgtggccgctgccgccatgttgttgtggttgtgagaaggcggcggcggcggcggagtagcagccggacgagacgtcccagcggctcaggcgctgcccagcgccggccctggcagggagcctggtggggtggcggagggggagactgtgccgtggagggcctcgccatgtcctgctgcccgacttccttgtgaaacctcctagtagaaaaagttcttgggacaaacttcatttgacttcaccataagggaaagaagagagccttgttggacactgaagaagggacggggatttctcctcctaatctgggcctcttgtcatggatgaagagactcggcacagccttgagtgcatccaggccaatcagatctttcccaggaagcagctgatccgggaggatgagaatcttcaggttcctttccttgaacttcatggagagagcacagagtttgtgggccgtgccgaggatgccatcattgccctttccaattacagacttcacatcaagttcaaggagtctcttgttaatgttccattacagcttatagaaagtgttgaatgccgagatatatttcagcttcatttgacttgcaaagactgcaaagttatcaggtgtcagttttcaacctttgagcagtgtcaagagtggctgaagagactgaacaacgcaatccgaccacctgctaaaatagaagatctcttctcatttgcataccatgcttggtgcatggaggtctatgccagtgaaaaagagcaacatggagacctgtgcagaccaggggagcatgtaacttcaaggtttaaaaacgaggtggagaggatgggttttgatatgaacaacgcctggaggatttccaacatcaatgagaagtacaaattatgtggtagctatcctcaagagctcatagtgcctgcctggatcactgacaaagaactggaaagtgtatcaagtttcaggtcctggaagcgcatccctgccgtcatctacaggcaccagagcaatggagctgtcattgcccgctgtggacagccagaggttagctggtggggctggcgaaatgcagatgatgagcatctggtacagtcagtagccaaagcttgtgcctctgactcccgatcgagtggcagcaagctgtcaactaggaacacttctcgagactttcccaatgggggagacctttctgacgtggagttcgattcttctctgtcaaatgcttcaggagcagagagtttagccatccaaccgcagaagcttttgatcttggatgcacgctcctatgcagctgctgtggcaaaccgagccaaaggaggaggctgcgaatgcccagagtattacccaaactgtgaagttgtgtttatggggatggcaaacattcattctattcggaggagttttcagtctctgcggttgctgtgcactcagatgccagatccgggaaattggctatcagctcttgaaagcacaaaatggctccatcacttgtctgtgcttctgaaatcagcgcttctggtagtgcatgctgtggatcaggatcagcggccggtgctagtacactgctcagatggctgggaccgcaccccccagattgtggcattggctaagctcttgctggacccttattaccgaaccatagagggtttccaggtcctcgtggaaatggagtggctggattttggccataaatttgctgaccggtgtggtcatggggagaactcggatgatctgaatgaacgttgcccagtgtttctgcagtggcttgactgtgttcatcagcttcagaggcaatttccttgctcttttgagttcaatgaagcattccttgtgaaactggtgcagcatacctattcctgcctgtttggaacattcctgtgcaacaacgccaaggagagaggggaaaagcatactcaggaacggacatgttccgtgtggtcacttcttcgggcaggcaacaaggctttcaaaaacctactgtattcctctcagtcagaagccgtgctgtaccctgtgtgccatgtgcgtaacctgatgctgtggagtgcagtgtacctgccctgcccatccccaaccacccctgtggacgacagctgtgcaccatacccagccccaggcaccagccctgatgatccccccctgagccggctaccaaagactagatcatacgacaatctgaccacagcctgtgacaacacagtgcctctggccagccggcgctgcagcgaccccagcctgaacgagaagtggcaggagcaccggcgctcactagagctgagcagcctggctggccctggagaggatcccctttctgccgacagcctagggaagcccaccagagtgccggggggtgccgagctttctgttgcagccggagtagctgaggggcagatggagaacatcttgcaggaggccaccaaagaggagagtggagtagaggaacctgcccacagggcaggcattgagatacaggagggtaaagaggaccctctcttagaaaaggagagcaggaggaagacacctgaggcctcagccattggacttcaccaagacccagaactgggtgatgctgctctgaggagccatctggatatgagctggcctctgttctcacagggcatttctgaacagcagagtgggctcagtgttctcctcagttctctccaggtcccccccaggggagaggattccctggaggtccctgtggagcagtttcgaatagaagagattgcagagggtagggaggaagcagttcttccaatcccagtagatgcaaaagttggctatggtacctcacagtcatgttctctgctaccttcccaagtcccttttgagaccagaggaccaaacgtggacagttctacagacatgttagtggaagataaggtgaagtcagtaagtgggccccaaggtcatcatagatcttgccttgtaaatagtggcaaggacaggcttcctcagaccatggaacccagcccttcagagacaagcctggtcgagaggccccaagtggggtctgtggtgcataggacttcccttggcagcactctcagcctgacacgttccccttgtgccttgcctttagccgaatgtaaagaggggcttgtgtgcaatggtgccccagagactgaaaacagggcctcagagcagcccccaggtcttagcaccctccagatgtaccccacacccaatgggcattgcgccaatggggaggctggtaggagcaaggactcactgagccgtcagctgtctgctatgagctgcagctctgcccacttacactcaaggaacttgcaccacaagtggctgcatagccactcaggaaggccatctgcaaccagcagccccgaccagccttcccgcagccacctggacgatgatggcatgtcagtgtacacagacacgatccaacagcgcctgcgtcagattgagtcaggccaccagcaggaagtagaaactttgaagaaacaagtccaggagctgaagagtcgcctggagagccagtacctgaccagctccctacactttaatggagactttggggatgaggtgatgacccgttggcttcctgaccacctggccgcccactgctatgcgtgcgacagtgccttctggcttgccagcaggaagcaccactgcaggaattgtgggaacgtattctgctccagttgttgtaaccagaaggttccagttcccagccagcagctctttgaacccagtcgagtatgcaagtcttgctatagcagcctacatcccacaagctccagcattgaccttgaactggataagcccattgctgccacttccaactgaagctcagtgacctgggtgggcagtggccaagctgctgttcctatgacaggcccactcaacctgggcagaccgagaggcccgtgcactttggaatgggagcgtggaaccacctgtacagagtgacagatttgggatgcaccactggattgtagattgatttttctttcctgtccccctactccctccctaccttttccatcctcctcctctgccttcaaaaaaggaaactttcccttggttgtcttaattttttttttttttgatggaagaccaagggttgccaggcccactgtaactgccgagctgcctgctgtcaggtgacactgagggatggcttgtttcttccgggtgggaggatggtggtcagagccaggagtatggagatctgagaccgtgagcagggaagaaagccagtgctaacatgcaaccattcctcacgccaccggccacttggtgacttcgtagggttccttagagaagtgacatggccttgaggagattcagggcacctttcctcagtgagctttgatatggtccaaaaacagccttaaatcaagaatatttgtggaggtaggtgtggggaaggttggagaagagttaggtttgtgctttgtaatcttggcatccatgttttgtgcctgccctccctcttggggaggccatgcttgactctgctgaaagctgctaactggtgacagggtggatcatggtgaggactaggggtaaggtcagggaatgcttaagctctggccctgccctgtattcctcttccccttggtagcagttccctgaccaagggcaaggtgtgtctcaggaaggtggttctgtgcatgcctgggtgtggttaaggcgtggcccagaaggcttccctggtgctctcagtccaggcaaagcccagagcatctgagcacgtctctgacttccagtggcaacacagtttgaacgtggtgaaacagggtgtagttcttttccacattctgtgtcatctagtcgtgcaggtagggaaaaagttggtctaattgaagattgtgcatttcctagtgacaggtgccaagaggttatgatacgggtttcttgggtctgatgtacagtgtgaataaatgcttgcagctcttagctcttttttgatcgatgaagcacttttttattaatattttcctttgttaaaggaggaaccgtaactctccatagctgtacatataacccttttctcctaaagaggagtcagtcagtgctcctatatttttcattttttgtcaaagcaagaagtaaatactttagaattgttaaatatataaataaagcaaataaagttgagtgttccacatggtagcatttgctaacacttcctaattctttgccctgtggtttatcccctcttcgtcccttttccctctcacacagaagtgtttgagggcctgctgggaaactgacctttggcaaaggaaagctacagatagccttccgactctagaccttggcaaggagcctcaccatgatgttcaagcactgaacgcatttcctcagtgattttgc

SEQ ID NO: 1368 - protein, 1155 aa, Homo sapiens
MDEETRHSLECIQANQIFPRKQLIREDENLQVPFLELHGESTEFVGRAEDAIIALSNYRLHIKFKESLVNVPLQLIESVECRDIFQLHLTCKDCKVIRCQFSTFEQCQEWLKRLNNAIRPPAKIEDLFSFAYHAWCMEVYASEKEQHGDLCRPGEHVTSRFKNEVERMGFDMNNAWRISNINEKYKLCGSYPQELIVPAWITDKELESVSSFRSWKRIPAVIYRHQSNGAVIARCGQPEVSWWGWRNADDEHLVQSVAKACASDSRSSGSKLSTRNTSRDFPNGGDLSDVEFDSSLSNASGAESLAIQPQKLLILDARSYAAAVANRAKGGGCECPEYYPNCEVVFMGMANIHSIRRSFQSLRLLCTQMPDPGNWLSALESTKWLHHLSVLLKSALLVVHAVDQDQRPVLVHCSDGWDRTPQIVAKLLLDPYYRTIEGFQVLVEMEWLDFGHKFADRCGHGENSDDLNERCPVFLQWLDCVHQLQRQFPCSFEFNEAFLVKLVQHTYSCLFGTFLCNNAKERGEKHTQERTCSVWSLLRAGNKAFKNLKSQSEAVLYPVCHVRNLMLWSAVYLPCPSPTTPVDDSCAPYPAPGTSPDDPPLSRLPKTRSYDNLTTACDNTVPLASRRCSDPSLNEKWQEHRRSLELSSLAGPGEDPLSADSLGKPTRVPGGAELSVAAGVAEGQMENILQEATKEESGVEEPAHRAGIEIQEGKEDPLLEKESRRKTPEASAIGLHQDPELGDAALRSHLDMSWPLFSQGISEQQSGLSVLLSSLQVPPRGEDSLEVPVEQFRIEEIAEGREEAVLPIPVDAKVGYGTSQSCSLLPSQVPFETRGPNVDSSTDMLVEDKVKSVSGPQGHHRSCLVNSGKDRLPQTMEPSPSETSLVERPQVGSVVHRTSLGSTLSLTRSPCALPLAECKEGLVCNGAPETENRASEQPPGLSTLQMYPTPNGHCANGEAGRSKDSLSRQLSAMSCSSAHLHSRNLHHKWLHSHSGRPSATSSPDQPSRSHLDDDGMSVYTDTIQQRLRQIESGHQQEVETLKKQVQELKSRLESQYLTSSLHFNGDFGDEVMTRWLPDHLAAHCYACDSAFWLASRKHHCRNCGNVFCSSCCNQKVPVPSQQLFEPSRVCKSCSLHPTSSSIDLELDKPIAATSN

SEQ ID NO: 1369 - DNA, 5373 bp, Homo sapiens
gcgcgctctgtgtggccgctgccgccatgttgttgtggttgtgagaaggcggcggcggcggcggagtagcagccggacgagacgtcccagcggctcaggcgctgcccagcgccggccctggcagggagcctggtggggtggcggagggggagactgtgccgtggagggcctcgccatgtcctgctgcccgacttccttgtgaaacctcctagtagaaaaagttcttgggacaaacttcatttggatgaagagactcggcacagccttgagtgcatccaggccaatcagatctttcccaggaagcagctgatccgggaggatgagaatcttcaggttcctttccttgaacttcatggagagagcacagagtttgtgggccgtgccgaggatgccatcattgccctttccaattacagacttcacatcaagttcaaggagtctcttgttaatgttccattacagcttatagaaagtgttgaatgccgagatatatttcagcttcatttgacttgcaaagactgcaaagttatcaggtgtcagttttcaacctttgagcagtgtcaagagtggctgaagagactgaacaacgcaatccgaccacctgctaaaatagaagatctcttctcatttgcataccatgcttggtgcatggaggtctatgccagtgaaaaagagcaacatggagacctgtgcagaccaggggagcatgtaacttcaaggtttaaaaacgaggtggagaggatgggttttgatatgaacaacgcctggaggatttccaacatcaatgagaagtacaaattatgtggtagctatcctcaagagctcatagtgcctgcctggatcactgacaaagaactggaaagtgtatcaagtttcaggtcctggaagcgcatccctgccgtcatctacaggcaccagagcaatggagctgtcattgcccgctgtggacagccagaggttagctggtggggctggcgaaatgcagatgatgagcatctggtacagtcagtagccaaagcttgtgcctctgactcccgatcgagtggcagcaagctgtcaactaggaacacttctcgagactttcccaatgggggagacctttctgacgtggagttcgattcttctctgtcaaatgcttcaggagcagagagtttagccatccaaccgcagaagcttttgatcttggatgcacgctcctatgcagctgctgtggcaaaccgagccaaaggaggaggctgcgaatgcccagagtattacccaaactgtgaagttgtgtttatggggatggcaaacattcattctattcggaggagttttcagtctctgcggttgctgtgcactcagatgccagatccgggaaattggctatcagctcttgaaagcacaaaatggctccatcacttgtctgtgcttctgaaatcagcgcttctggtagtgcatgctgtggatcaggatcagcggccggtgctagtacactgctcagatggctgggaccgcaccccccagattgtggcattggctaagctcttgctggacccttattaccgaaccatagagggtttccaggtcctcgtggaaatggagtggctggattttggccataaatttgctgaccggtgtggtcatggggagaactcggatgatctgaatgaacgttgcccagtgtttctgcagtggcttgactgtgttcatcagcttcagaggcaatttccttgctcttttgagttcaatgaagcattccttgtgaaactggtgcagcatacctattcctgcctgtttggaacattcctgtgcaacaacgccaaggagagaggggaaaagcatactcaggaacggacatgttccgtgtggtcacttcttcgggcaggcaacaaggctttcaaaaacctactgtattcctctcagtcagaagccgtgctgtaccctgtgtgccatgtgcgtaacctgatgctgtggagtgcagtgtacctgccctgcccatccccaaccacccctgtggacgacagctgtgcaccatacccagccccaggcaccagccctgatgatccccccctgagccggctaccaaagactagatcatacgacaatctgaccacagcctgtgacaacacagtgcctctggccagccggcgctgcagcgaccccagcctgaacgagaagtggcaggagcaccggcgctcactagagctgagcagcctggctggccctggagaggatcccctttctgccgacagcctagggaagcccaccagagtgccggggggtgccgagctttctgttgcagccggagtagctgaggggcagatggagaacatcttgcaggaggccaccaaagaggagagtggagtagaggaacctgcccacagggcaggcattgagatacaggagggtaaagaggaccctctcttagaaaaggagagcaggaggaagacacctgaggcctcagccattggacttcaccaagacccagaactgggtgatgctgctctgaggagccatctggatatgagctggcctctgttctcacagggcatttctgaacagcagagtgggctcagtgttctcctcagttctctccaggtcccccccaggggagaggattccctggaggtccctgtggagcagtttcgaatagaagagattgcagagggtagggaggaagcagttcttccaatcccagtagatgcaaaagttggctatggtacctcacagtcatgttctctgctaccttcccaagtcccttttgagaccagaggaccaaacgtggacagttctacagacatgttagtggaagataaggtgaagtcagtaagtgggccccaaggtcatcatagatcttgccttgtaaatagtggcaaggacaggcttcctcagaccatggaacccagcccttcagagacaagcctggtcgagaggccccaagtggggtctgtggtgcataggacttcccttggcagcactctcagcctgacacgttccccttgtgccttgcctttagccgaatgtaaagaggggcttgtgtgcaatggtgccccagagactgaaaacagggcctcagagcagcccccaggtcttagcaccctccagatgtaccccacacccaatgggcattgcgccaatggggaggctggtaggagcaaggactcactgagccgtcagctgtctgctatgagctgcagctctgcccacttacactcaaggaacttgcaccacaagtggctgcatagccactcaggaaggccatctgcaaccagcagccccgaccagccttcccgcagccacctggacgatgatggcatgtcagtgtacacagacacgatccaacagcgcctgcgtcagattgagtcaggccaccagcaggaagtagaaactttgaagaaacaagtccaggagctgaagagtcgcctggagagccagtacctgaccagctccctacactttaatggagactttggggatgaggtgacttcaatccccgactcggaaagcaatctggatcagaactgtttgtctcgctgcagcacagagattttctctgaagccagctgggagcaggtggataaacaggacacagagatgacccgttggcttcctgaccacctggccgcccactgctatgcgtgcgacagtgccttctggcttgccagcaggaagcaccactgcaggaattgtgggaacgtattctgctccagttgttgtaaccagaaggttccagttcccagccagcagctctttgaacccagtcgagtatgcaagtcttgctatagcagcctacatcccacaagctccagcattgaccttgaactggataagcccattgctgccacttccaactgaagctcagtgacctgggtgggcagtggccaagctgctgttcctatgacaggcccactcaacctgggcagaccgagaggcccgtgcactttggaatgggagcgtggaaccacctgtacagagtgacagatttgggatgcaccactggattgtagattgatttttctttcctgtccccctactccctccctaccttttccatcctcctcctctgccttcaaaaaaggaaactttcccttggttgtcttaattttttttttttttgatggaagaccaagggttgccaggcccactgtaactgccgagctgcctgctgtcaggtgacactgagggatggcttgtttcttccgggtgggaggatggtggtcagagccaggagtatggagatctgagaccgtgagcagggaagaaagccagtgctaacatgcaaccattcctcacgccaccggccacttggtgacttcgtagggttccttagagaagtgacatggccttgaggagattcagggcacctttcctcagtgagctttgatatggtccaaaaacagccttaaatcaagaatatttgtggaggtaggtgtggggaaggttggagaagagttaggtttgtgctttgtaatcttggcatccatgttttgtgcctgccctccctcttggggaggccatgcttgactctgctgaaagctgctaactggtgacagggtggatcatggtgaggactaggggtaaggtcagggaatgcttaagctctggccctgccctgtattcctcttccccttggtagcagttccctgaccaagggcaaggtgtgtctcaggaaggtggttctgtgcatgcctgggtgtggttaaggcgtggcccagaaggcttccctggtgctctcagtccaggcaaagcccagagcatctgagcacgtctctgacttccagtggcaacacagtttgaacgtggtgaaacagggtgtagttcttttccacattctgtgtcatctagtcgtgcaggtagggaaaaagttggtctaattgaagattgtgcatttcctagtgacaggtgccaagaggttatgatacgggtttcttgggtctgatgtacagtgtgaataaatgcttgcagctcttagctcttttttgatcgatgaagcacttttttattaatattttcctttgttaaaggaggaaccgtaactctccatagctgtacatataacccttttctcctaaagaggagtcagtcagtgctcctatatttttcattttttgtcaaagcaagaagtaaatactttagaattgttaaatatataaataaagcaaataaagttgagtgttccacatggtagcatttgctaacacttcctaattctttgccctgtggtttatcccctcttcgtcccttttccctctcacacagaagtgtttgagggcctgctgggaaactgacctttggcaaaggaaagctacagatagccttccgactctagaccttggcaaggagcctcaccatgatgttcaagcactgaacgcatttcctcagtgattttgc

SEQ ID NO: 1370 - protein, 1056 aa, Homo sapiens
MEVYASEKEQHGDLCRPGEHVTSRFKNEVERMGFDMNNAWRISNINEKYKLCGSYPQELIVPAWITDKELESVSSFRSWKRIPAVIYRHQSNGAVIARCGQPEVSWWGWRNADDEHLVQSVAKACASDSRSSGSKLSTRNTSRDFPNGGDLSDVEFDSSLSNASGAESLAIQPQKLLILDARSYAAAVANRAKGGGCECPEYYPNCEVVFMGMANIHSIRRSFQSLRLLCTQMPDPGNWLSALESTKWLHHLSVLLKSALLVVHAVDQDQRPVLVHCSDGWDRTPQIVAKLLLDPYYRTIEGFQVLVEMEWLDFGHKFADRCGHGENSDDLNERCPVFLQWLDCVHQLQRQFPCSFEFNEAFLVKLVQHTYSCLFGTFLCNNAKERGEKHTQERTCSVWSLLRAGNKAFKNLKSQSEAVLYPVCHVRNLMLWSAVYLPCPSPTTPVDDSCAPYPAPGTSPDDPPLSRLPKTRSYDNLTTACDNTVPLASRRCSDPSLNEKWQEHRRSLELSSLAGPGEDPLSADSLGKPTRVPGGAELSVAAGVAEGQMENILQEATKEESGVEEPAHRAGIEIQEGKEDPLLEKESRRKTPEASAIGLHQDPELGDAALRSHLDMSWPLFSQGISEQQSGLSVLLSSLQVPPRGEDSLEVPVEQFRIEEIAEGREEAVLPIPVDAKVGYGTSQSCSLLPSQVPFETRGPNVDSSTDMLVEDKVKSVSGPQGHHRSCLVNSGKDRLPQTMEPSPSETSLVERPQVGSVVHRTSLGSTLSLTRSPCALPLAECKEGLVCNGAPETENRASEQPPGLSTLQMYPTPNGHCANGEAGRSKDSLSRQLSAMSCSSAHLHSRNLHHKWLHSHSGRPSATSSPDQPSRSHLDDDGMSVYTDTIQQRLRQIESGHQQEVETLKKQVQELKSRLESQYLTSSLHFNGDFGDEVTSIPDSESNLDQNCLSRCSTEIFSEASWEQVDKQDTEMTRWLPDHLAAHCYACDSAFWLASRKHHCRNCGNVFCSSCCNQKVPVPSQQLFEPSRVCKSCSLHPTSSSIDLELDKPIAATSN

SEQ ID NO: 1371 - DNA, 5289 bp, Homo sapiens
gcgcgctctgtgtggccgctgccgccatgttgttgtggttgtgagaaggcggcggcggcggcggagtagcagccggacgagacgtcccagcggctcaggcgctgcccagcgccggccctggcagggagcctggtggggtggcggagggggagactgtgccgtggagggcctcgccatgtcctgctgcccgacttccttgtgaaacctcctagtagaaaaagttcttgggacaaacttcatttggatgaagagactcggcacagccttgagtgcatccaggccaatcagatctttcccaggaagcagctgatccgggaggatgagaatcttcaggttcctttccttgaacttcatggagagagcacagagtttgtgggccgtgccgaggatgccatcattgccctttccaattacagacttcacatcaagttcaaggagtctcttgttaatgttccattacagcttatagaaagtgttgaatgccgagatatatttcagcttcatttgacttgcaaagactgcaaagttatcaggtgtcagttttcaacctttgagcagtgtcaagagtggctgaagagactgaacaacgcaatccgaccacctgctaaaatagaagatctcttctcatttgcataccatgcttggtgcatggaggtctatgccagtgaaaaagagcaacatggagacctgtgcagaccaggggagcatgtaacttcaaggtttaaaaacgaggtggagaggatgggttttgatatgaacaacgcctggaggatttccaacatcaatgagaagtacaaattatgtggtagctatcctcaagagctcatagtgcctgcctggatcactgacaaagaactggaaagtgtatcaagtttcaggtcctggaagcgcatccctgccgtcatctacaggcaccagagcaatggagctgtcattgcccgctgtggacagccagaggttagctggtggggctggcgaaatgcagatgatgagcatctggtacagtcagtagccaaagcttgtgcctctgactcccgatcgagtggcagcaagctgtcaactaggaacacttctcgagactttcccaatgggggagacctttctgacgtggagttcgattcttctctgtcaaatgcttcaggagcagagagtttagccatccaaccgcagaagcttttgatcttggatgcacgctcctatgcagctgctgtggcaaaccgagccaaaggaggaggctgcgaatgcccagagtattacccaaactgtgaagttgtgtttatggggatggcaaacattcattctattcggaggagttttcagtctctgcggttgctgtgcactcagatgccagatccgggaaattggctatcagctcttgaaagcacaaaatggctccatcacttgtctgtgcttctgaaatcagcgcttctggtagtgcatgctgtggatcaggatcagcggccggtgctagtacactgctcagatggctgggaccgcaccccccagattgtggcattggctaagctcttgctggacccttattaccgaaccatagagggtttccaggtcctcgtggaaatggagtggctggattttggccataaatttgctgaccggtgtggtcatggggagaactcggatgatctgaatgaacgttgcccagtgtttctgcagtggcttgactgtgttcatcagcttcagaggcaatttccttgctcttttgagttcaatgaagcattccttgtgaaactggtgcagcatacctattcctgcctgtttggaacattcctgtgcaacaacgccaaggagagaggggaaaagcatactcaggaacggacatgttccgtgtggtcacttcttcgggcaggcaacaaggctttcaaaaacctactgtattcctctcagtcagaagccgtgctgtaccctgtgtgccatgtgcgtaacctgatgctgtggagtgcagtgtacctgccctgcccatccccaaccacccctgtggacgacagctgtgcaccatacccagccccaggcaccagccctgatgatccccccctgagccggctaccaaagactagatcatacgacaatctgaccacagcctgtgacaacacagtgcctctggccagccggcgctgcagcgaccccagcctgaacgagaagtggcaggagcaccggcgctcactagagctgagcagcctggctggccctggagaggatcccctttctgccgacagcctagggaagcccaccagagtgccggggggtgccgagctttctgttgcagccggagtagctgaggggcagatggagaacatcttgcaggaggccaccaaagaggagagtggagtagaggaacctgcccacagggcaggcattgagatacaggagggtaaagaggaccctctcttagaaaaggagagcaggaggaagacacctgaggcctcagccattggacttcaccaagacccagaactgggtgatgctgctctgaggagccatctggatatgagctggcctctgttctcacagggcatttctgaacagcagagtgggctcagtgttctcctcagttctctccaggtcccccccaggggagaggattccctggaggtccctgtggagcagtttcgaatagaagagattgcagagggtagggaggaagcagttcttccaatcccagtagatgcaaaagttggctatggtacctcacagtcatgttctctgctaccttcccaagtcccttttgagaccagaggaccaaacgtggacagttctacagacatgttagtggaagataaggtgaagtcagtaagtgggccccaaggtcatcatagatcttgccttgtaaatagtggcaaggacaggcttcctcagaccatggaacccagcccttcagagacaagcctggtcgagaggccccaagtggggtctgtggtgcataggacttcccttggcagcactctcagcctgacacgttccccttgtgccttgcctttagccgaatgtaaagaggggcttgtgtgcaatggtgccccagagactgaaaacagggcctcagagcagcccccaggtcttagcaccctccagatgtaccccacacccaatgggcattgcgccaatggggaggctggtaggagcaaggactcactgagccgtcagctgtctgctatgagctgcagctctgcccacttacactcaaggaacttgcaccacaagtggctgcatagccactcaggaaggccatctgcaaccagcagccccgaccagccttcccgcagccacctggacgatgatggcatgtcagtgtacacagacacgatccaacagcgcctgcgtcagattgagtcaggccaccagcaggaagtagaaactttgaagaaacaagtccaggagctgaagagtcgcctggagagccagtacctgaccagctccctacactttaatggagactttggggatgaggtgatgacccgttggcttcctgaccacctggccgcccactgctatgcgtgcgacagtgccttctggcttgccagcaggaagcaccactgcagggacactgaccgtgttgatcaaacgtggaattgtgggaacgtattctgctccagttgttgtaaccagaaggttccagttcccagccagcagctctttgaacccagtcgagtatgcaagtcttgctatagcagcctacatcccacaagctccagcattgaccttgaactggataagcccattgctgccacttccaactgaagctcagtgacctgggtgggcagtggccaagctgctgttcctatgacaggcccactcaacctgggcagaccgagaggcccgtgcactttggaatgggagcgtggaaccacctgtacagagtgacagatttgggatgcaccactggattgtagattgatttttctttcctgtccccctactccctccctaccttttccatcctcctcctctgccttcaaaaaaggaaactttcccttggttgtcttaattttttttttttttgatggaagaccaagggttgccaggcccactgtaactgccgagctgcctgctgtcaggtgacactgagggatggcttgtttcttccgggtgggaggatggtggtcagagccaggagtatggagatctgagaccgtgagcagggaagaaagccagtgctaacatgcaaccattcctcacgccaccggccacttggtgacttcgtagggttccttagagaagtgacatggccttgaggagattcagggcacctttcctcagtgagctttgatatggtccaaaaacagccttaaatcaagaatatttgtggaggtaggtgtggggaaggttggagaagagttaggtttgtgctttgtaatcttggcatccatgttttgtgcctgccctccctcttggggaggccatgcttgactctgctgaaagctgctaactggtgacagggtggatcatggtgaggactaggggtaaggtcagggaatgcttaagctctggccctgccctgtattcctcttccccttggtagcagttccctgaccaagggcaaggtgtgtctcaggaaggtggttctgtgcatgcctgggtgtggttaaggcgtggcccagaaggcttccctggtgctctcagtccaggcaaagcccagagcatctgagcacgtctctgacttccagtggcaacacagtttgaacgtggtgaaacagggtgtagttcttttccacattctgtgtcatctagtcgtgcaggtagggaaaaagttggtctaattgaagattgtgcatttcctagtgacaggtgccaagaggttatgatacgggtttcttgggtctgatgtacagtgtgaataaatgcttgcagctcttagctcttttttgatcgatgaagcacttttttattaatattttcctttgttaaaggaggaaccgtaactctccatagctgtacatataacccttttctcctaaagaggagtcagtcagtgctcctatatttttcattttttgtcaaagcaagaagtaaatactttagaattgttaaatatataaataaagcaaataaagttgagtgttccacatggtagcatttgctaacacttcctaattctttgccctgtggtttatcccctcttcgtcccttttccctctcacacagaagtgtttgagggcctgctgggaaactgacctttggcaaaggaaagctacagatagccttccgactctagaccttggcaaggagcctcaccatgatgttcaagcactgaacgcatttcctcagtgattttgc

SEQ ID NO: 1372 - protein, 1028 aa, Homo sapiens
MEVYASEKEQHGDLCRPGEHVTSRFKNEVERMGFDMNNAWRISNINEKYKLCGSYPQELIVPAWITDKELESVSSFRSWKRIPAVIYRHQSNGAVIARCGQPEVSWWGWRNADDEHLVQSVAKACASDSRSSGSKLSTRNTSRDFPNGGDLSDVEFDSSLSNASGAESLAIQPQKLLILDARSYAAAVANRAKGGGCECPEYYPNCEVVFMGMANIHSIRRSFQSLRLLCTQMPDPGNWLSALESTKWLHHLSVLLKSALLVVHAVDQDQRPVLVHCSDGWDRTPQIVAKLLLDPYYRTIEGFQVLVEMEWLDFGHKFADRCGHGENSDDLNERCPVFLQWLDCVHQLQRQFPCSFEFNEAFLVKLVQHTYSCLFGTFLCNNAKERGEKHTQERTCSVWSLLRAGNKAFKNLKSQSEAVLYPVCHVRNLMLWSAVYLPCPSPTTPVDDSCAPYPAPGTSPDDPPLSRLPKTRSYDNLTTACDNTVPLASRRCSDPSLNEKWQEHRRSLELSSLAGPGEDPLSADSLGKPTRVPGGAELSVAAGVAEGQMENILQEATKEESGVEEPAHRAGIEIQEGKEDPLLEKESRRKTPEASAIGLHQDPELGDAALRSHLDMSWPLFSQGISEQQSGLSVLLSSLQVPPRGEDSLEVPVEQFRIEEIAEGREEAVLPIPVDAKVGYGTSQSCSLLPSQVPFETRGPNVDSSTDMLVEDKVKSVSGPQGHHRSCLVNSGKDRLPQTMEPSPSETSLVERPQVGSVVHRTSLGSTLSLTRSPCALPLAECKEGLVCNGAPETENRASEQPPGLSTLQMYPTPNGHCANGEAGRSKDSLSRQLSAMSCSSAHLHSRNLHHKWLHSHSGRPSATSSPDQPSRSHLDDDGMSVYTDTIQQRLRQIESGHQQEVETLKKQVQELKSRLESQYLTSSLHFNGDFGDEVMTRWLPDHLAAHCYACDSAFWLASRKHHCRDTDRVDQTWNCGNVFCSSCCNQKVPVPSQQLFEPSRVCKSCSLHPTSSSIDLELDKPIAATSN

SEQ ID NO: 1373 - DNA, 96898 bp, Mus musculus
  misc_feature (1)...(96898): n = A,T,C or G
aacccatgactaaagaggtcttagaccttgtggcatcgtaacataagatggctgcttagatcaatggacatagtatctgtttatacccacagagacacgattgattctctctgtctcaaatggagaaacctttccttgcagagaactgaggtaaatgcaaagacccggggttgcacaagacactgagaataaaggactgttgagggctcagccttggatgacacatttaggccacctctttaaggtatagggaacagtgcatggaaagagacgggaagaccagaaaaggccagagaaggggggaaaggttacaaagtacaattttctaagcacgatacagccatgacagccaagaactcatagcagctgtgtatactagaattgggtctatggaagctgggctgtctaacaatcagtctggagagggggaaattcttgtgaccctagcacagagtctgctggtctattagaaatcagagattctgagagaggaaaacatgctatctagttgtatgcctactgcaaggccaggctctgatgtttggttccaaactcaggatgatacaaatgtccctgattaaacccatggaacactaaacaaaaccaacacatcgaaaaagggaaagagatctgtaggagagagttagctgggaggggaatcacatacatagggtccatatatgaaattgtaaaagaatacaatgtactaataaataaggagtgcctaccctcatcaaggtgtcacacaacccatgacattgatagcaagagcagaacacatggaagaagagggtaacgtttctctctctactttagctgtgacacctgtcttctgtccttagatggcagagcttctcattctggaactttcttactcagactgtctcagtgatctcctatttccaggcccctcagaactgaggctacatgtacatttaagcaactctcttgttatgtgaataacataatattgctgagaatattattttggggtgaaactttttaataaatgatatgttcttaatgttcctgttcatattgctaaagctgtgtgcttcttattatttcctgtcacataatgttatatttctgctcataatgttatttcctgtccagacacctcttctgaacgtgaagctcatatactgaaaggccaagcggatatttactctcagataagaagagaacatcggaaatttaattcccaaagtgaatgcttagtgtcttccatctctcctgagccaaagctggtctcataggccatgttctgttactccataactaaatcttccacctttgggttacatacccaagaagcccatctctgtggttttcccctttccctgaagcttcctggtatgtgtgtgcacatgcctatatgtatatgtatatgtatgtgtatgtgtatgtgtatgtgtatgtgtatgtgtgtgtgtgtgtgtgtgtgnnnnnnnnnnnnnnnnnnnnnnnnnnnnnnnnnnnnnnnnnnnnnnnnnnnnnnnnnnnnnnnnnnnnnnnnnnnnnnnnnnnnnnnnnnnnnnnnnnnnnnnnnnnnnnnnnnnnnnnnnnnnnnnnnnnnnnnnnnnnnnnnnnnnnnnnnnnnnnnnnnnnnnnnnnnnnnnnnnnnnnnnnnnnnnnnnnnnnnnnnnnnnnnnnnnnnnnnnnnnnnnnnnnnnnnnnnnnnnnnnnnnnnnnnnnnnnnnnnnnnnnnnnnnnnnnnnnnnnnnnnnnnnnnnnnnnnnnnnnnnnnnnnnnnnnnnnnnnnnnnnnnnnnnnnnnnnnnnnnnnnnnnnnnnnnnnnnnnnnnnnnnnnnnnnnnnnnnnnnnnnnnnnnnnnnnnnnnnnnnnnnnnnnnnnnnnnnnnnnnnnnnnnnnnnnnnnnnnnnnnnnnnnnnnnnnnnnnnnnnnnnnnnnnnnnnnnnnnnnnnnnnnnnnnnnnnnnnnnnnnnnnnnnnnnnnnnnnnnnnnnnnnnnnnnnnnnnnnnnnnnnnnnnnnnnnnnnnnnnnnnnnnnnnnnnnnnnnnnnnnnnnnnnnnnnnnnnnnnnnnnnnnnnnnnnnnnnnnnnnnnnnnnnnnnnnnnnnnnnnnnnnnnnnnnnnnnnnnnnnnnnnnnnnnnnnnnnnnnnnnnnnnnnnnnnnnnnnnnnnnnnnnnnnnnnnnnnnnnnnnnnnnnnnnnnnnnnnnnnnnnnnnnnnnnnnnnnnnnnnnnnnnnnnnnnnnnnnnnnnnnnnnnnnnnnnnnnnnnnnnnnnnnnnnnnnnnnnnnnnnnnnnnnnnnnnnnnnnnnnnnnnnnnnnnnnnnnnnnnnnnnnnnnnnnnnnnnnnnnnnnnnnnnnnnnnnnnnnnnnnnnnnnnnnnnnnnnnnnnnnnnnnnnnnnnnnnnnnnnnnnnnnnnnnnnnnnnnnnnnnnnnnnnnnnnnnnnnnnnnnnnnnnnnnnnnnnnnnnnnnnnnnnnnnnnnnnnnnnnnnnnnnnnnnnnnnnnnnnnnnnnnnnnnnnnnnnnnnnnnnnnnnnnnnnnnnnnnnnnnnnnnnnnnnnnnnnnnnnnnnnnnnnnnnnnnnnnnnnnnnnnnnnnnnnnnnnnnnnnnnnnnnnnnnnnnnnnnnnnnnnnnnnnnnnnnnnnnnnnnnnnnnnnnnnnnnnnnnnnnnnnnnnnnnnnnnnnnnnnnnnnnnnnnnnnnnnnnnnnnnnnnnnnnnnnnnnnnnnnnnnnnnnnnnnnnnnnnnnnnnnnnnnnnnnnnnnnnnnnnnnnnnnnnnnnnnnnnnnnnnnnnnnnnnnnnnnnnnnnnnnnnnnnnnnnnnnnnnnnnnnnnnnnnnnnnnnnnnnnnnnnnnnnnnnnnnnnnnnnnnnnnnnnnnnnnnnnnnnnnnnnnnnnnnnnnnnnnnnnnnnnnnnnnnnnnnnnnnnnnnnnnnnnnnnnnnnnnnnnnnnnnnnnnnnnnnnnnnnnnnnnnnnnnnnnnnnnnnnnnnnnnnnnnnnnnnnnnnnnnnnnnnnnnnnnnnnnnnnnnnnnnnnnnnnnnnnnnnnnnnnnnnnnnnnnnnnnnnnnnnnnnnnnnnnnnnnnnnnnnnnnnnnnnnnnnnnnnnnnnnnnnnnnnnnnnnnnnnnnnnnnnnnnnnnnnnnnnnnnnnnnnnnnnnnnnnnnnnnnnnnnnnnnnnnnnnnnnnnnnnnnnnnnnnnnnnnnnnnnnnnnnnnnnnnnnnnnnnnnnnnnnnnnnnnnnnnnnnnnnnnnnnnnnnnnnnnnnnnnnnnnnnnnnnnnnnnnnnnnnnnnnnnnnnnnnnnnnnnnnnnnnnnnnnnnnnnnnnnnnnnnnnnnnnnnnnnnnnnnnnnnnnnnnnnnnnnnnnnnnnnnnnnnnnnnnnnnnnnnnnnnnnnnnnnnnnnnnnnnnnnnnnnnnnnnnnnnnnnnnnnnnnnnnnnnnnnnnnnnnnnnnnnnnnnnnnnnnnnnnnnnnnnnnnnnnnnnnnnnnnnnnnnnnnnnnnnnnnnnnnnnnnnnnnnnnnnnnnnnnnnnnnnnnnnnnnnnnnnnnnnnnnnnnnnnnnnnnnnnnnnnnnnnnnnnnnnnnnnnnnnnnnnnnnnnnnnnnnnnnnnnnnnnnnnnnnnnnnnnnnnnnnnnnnnnnnnnnnnnnnnnnnnnnnnnnnnnnnnnnnnnnnnnnnnnnnnnnnnnnnnnnnnnnnnnnnnnnnnnnnnnnnnnnnnnnnnnnnnnnnnnnnnnnnnnnnnnnnnnnnnnnnnnnnnnnnnnnnnnnnnnnnnnnnnnnnnnnnnnnnnnnnnnnnnnnnnnnnnnnnnnnnnnnnnnnnnnnnnnnnnnnnnnnnnnnnnnnnnnnnnnnnnnnnnnnnnnnnnnnnnnnnnnnnnnnnnnnnnnnnnnnnnnnnnnnnnnnnnnnnnnnnnnnnnnnnnnnnnnnnnnnnnnnnnnnnnnnnnnnnnnnnnnnnnnnnnnnnnnnnnnnnnnnnnnnnnnnnnnnnnnnnnnnnnnnnnnnnnnnnnnnnnnnnnnnnnnnnnnnnnnnnnnnnnnnnnnnnnnnnnnnnnnnnnnnnnnnnnnnnnnnnnnnnnnnnnnnnnnnnnnnnnnnnnnnnnnnnnnnnnnnnnnnnnnnnnnnnnnnnnnnnnnnnnnnnnnnnnnnnnnnnnnnnnnnnnnnnnnnnnnnnnnnnnnnnnnnnnnnnnnnnnnnnnnnnnnnnnnnnnnnnnnnnnnnnnnnnnnnnnnnnnnnnnnnnnnnnnnnnnnnnnnnnnnnnnnnnnnnnnnnnnnnnnnnnnaaaaaaaaaaacaaaaaacaaaaaacaaaaaacaaaaacaaaaacaaaacaaaaaatcaataaatatttttttaaagtggcctgtttggctttcaacagatagtgcttcccatacctgtgaatcatgtctagatattatataatacagtgtgaacagttgttagtactctatagtagccagaatttgctattttgtgggttctttttcttctacccttcttcaccctttccccaccatttcagctcccgaatactagacaagatagaaaaaaggatagaagggaaaggggcaaccataggtcaacatactacctctaactgattagctgggttgagctccttggggaaagtttgatctttgccctcaggatatctaatttcttcctgttgtttcttctttgtacatgaataaactgtgaactatcaaaaccaaccaacaaacaacaacctaccctaccagcagagccctaacatgtacataccttctgaaaagtccccacaattccaaatgtcacacaatcctagaaactatctgccgctagcaaaaatcacacttctgcttaaaacaggaagcaaaccttagctgctgtgaacaagctgatagcctatatctaagattaaaacaaaaacatattcttataatatttctgtgttattttaaagaaaccaaaattctaaaattgccactagacttgctgttgaggtttgatcttttgataagttttgtaatgataaatactcgcctccaaggcctggttgctcctgggaagcagagaatccacacgtgcaatgtgaccttgctccctaacttaaaactattggttaaataatggtgccgacaaccaatagctgggcagaagagacataggcagggtttggggtttctgggcttggggtctgaggagaccacgaggagagaaaggaagttgaagagaggggagatggggtaagaatgtaaaaataatggccacaaggagtgggtaattggagctacgagcagcccagacaaaacacagtaaatcatataggggggttattgacaggaaaataaacataatagcatagaggatagacatctgctcagctctagtgctgattaaggcttgttataaattaaagacccggagtgtcgtttattcaagaactcaatactcaaaggtggctagaagctcccgattgacattaagtgtttttcacagtactatactgttcaggataacggcaagaagaagcacgtgcttgctcagtgagatgtaatattaaaaacatttctgacacacagcaaattcacagttgaggatcctctactcatatatgggaccttgcatctagcaaacagagcatccctgaaatctaacccctttacatcatagtcaagtataagtgaaagaaagaggaagagactgcggccccaatatcccattcatgttatcagtgaccaaggttcaggtagatccaacccttaagcttccaccgcctccaaataacaccatttatgatgtgggactgtggggggaatggggggggtgtctggggctcgtcccatgtcctctgggtcactccagatccaaactacctgtcagtcatcacatcaacagttttgaaatctcccaggttgattcacttaagcatttattataagaagaagaacagaagaaaacccaatactgaattcccagttataattaatagcaaaatgttaggagcattcctttcaatgtcaataggaccaggttacttgctaactgcttctaatcaatattgtcccaaagtaaaggtttttcaatattctttaggagtaagaattttcggggtcaggtgcctgagtaatctgaaattttaggtgttctggtagccacatcttaaaaagtaaaaagtgtatcactattacaaaggagtgaaaacagagactttttttcccttcttcatatataatagttttcaattatagttcaattatagttttacactagcattgtttttgacggggaaaggcttcagtttataaacaatctattttagcttgtaaaatagattgagcagttatttgttcaacagcagtggctgctgtgtgtgagagccccacagccagatgtatctgggtcccccataaagaccagaagaaagtcaaattggcacactctgagaaggtatgactgttgacctggaaatccacctaaattaataaacatgatattaaaactttaaagataagtgccaggacaagggttgccctataacatgctgactcaaccctatctgttaatcataaacagttcctttctctgactaccaaccacaaagacatattcacatgcccatgagaatcctgaattccatgtctcacaaacgcttgtcctggaacattctgtagaccaggctagcctcaaactctgagatccttctgcctccacttgccaagtgctgggattaaaggtgtgttccaccactacccagcttttttcttattttaatttttatttatttcaaaactgctcacccatagttagcaagatgcttctcaaagcttccctctagtttctagcttctgtagtttgaagtactagtaagaaaaaaaaaatccaatctgtctatcttttatggctagctgaaaaagcaaatcgtttaggaaatccttctgctccaatatcatgaaagtcatgcgtcttggtttcttttagaagcttgcccctacaggtcagaatggagtgaggagagaatccagctttgtgtccttccaagtagagcacagttgtggtggcatctagcaccccacccgttccattttggtctgcaatgtgcacctgtcaattttccacactggggccttttttttcaccccttctggaatctttattctgcttaagtacacacaaggctatttgcactcccatgctctttcgtctctgaacttcactggtctttcttgggcttctgcttttccatttctatttcagagtgaaacatgtgttggatttttattacagtggcgctgagtctgttcacctgttagagaagaattcaagtatttataaccctggctgatcctactccaagctggcttatttccatttagtctcatcttcccttgtgtctccccagaacccggcagagcttttgccggctcttgttagatccgttcctcttggtttgcttctgttgtaaacactgatctgtctgcttcgatgttatgcaaaaactgtgagttccccctcccaggcgctgaaaacagatcccggtacaagatctgggacctgctggcctgacctcagtggctttccctgtcaccccatgtctttccctttctaatcttaaaaaaaaaaaaaatcttacatctatgtattctcattcttgcccgtccaacctgcaatttactccctgagaaatgtcaataagaatttctacacatgagcctgagacacacccacacactactttaaagctcagaaggctcactttcaccaagcacgatccccctgtgatgcctaggtgtccccaaccttttcccaggctatgccatcacctgccttattttgttgactgatttctttttttttaatagaatcattcaggctggcaagagggctcagcaggtaagagcactgactgctcttccaaaggtcctgagtccaaatcccagcaaccacaactacatagtggctcacgaccatctgtaatgagatctgactccctcttctggtgtgtgtctgaagacagcgacagtgtacttatttataataataaataaatcttttaaaaaagaagaagaaaaaagaaacattttatataatttggaggtagtacttccgtatatgtctgcattgaatagtatttaaattaggttaaacatgcctatgtcctcaaatgtctgtctgcggctgtgtgatcttcagtaagtaccccaatctctctgaggtgttattttcccatctgtaaattggtgctggagactccttttcctcataagaatatgggcatattgtttcggcttcatgacagccttccccacctcactgaggctttctctagttttctaggttatctggaaggtgtgtgtgtgtgtgtgtgtgtgtgtgtgtgtgtatgtgtgtgtgtgtgttgcaaggggaggtgttgtcagcctcctgctcattcaacaaggctccctccccaacccctggtgatggtcccagttgctggggtgctccatctgtgcagatagacctaatctccttacctcctccactgtgcatatggctgctgtttgcaatggtagtggagggagctgcctgtgcctgtgctctgtgcattctactgtcctggaagccacttccactgtctcaaaggtgcctttgaagagatcctgctggggccacatcatggagaattcctgactttggactgtactcctgactcaactctgaacaatgttgtgtgtatattatatatgcatctgtgtttgtgtatatgtcagtatatgtatatgcctggatacatgtgcattttatgtgtgcatatacatgagcacagtgactgcatgcatacatttgtgttgatgtatgtacagacatgcattcacatttgtgtgtacctgtgtgtgtgtttcctgtgtgcgtgtgtgtgcctttctgcatatgtgtgctctatgtacatgagtgtgttcattatctgttcataggtgtgtgtcctctgtgcatgggtgggtaccttctatgcatgtgtgtgtgctctctacatgtgtttattgactatccatgtgtgtgctctctgcatatggatgtgtctctattaatgtgtgtgtgtactctgcatgtgtgtgccatctgtttgtgtgtgccccatgtacacaagtgtgtaccctctatgcatatgtgtgtgctgtttgtgtgtgtatactttttgtacatgtgtctgctctctttgcatgtatgtatactatgttcatgtgtgtgtgcactctgtacatggatatgacatctataaacgtgtgggtaccctctatgcatatgtgtgcactctctgtttatgtgtatatgttttctgtacataatctgctctctctgcatgtgtgaatactcggtatgtctatgtgtgctgtacacatgtgtgtgttcattctctatacatgtgtgcattctctgtacataacacgttttctgtcagtgtttgtatgtattctctgtgcatgtatgcctctggttctgatagaggcttctgcatggtgttgctgtttaaagtcagcccttcttccacccttccttctctgtatggccaaagcctttgttctagattcacctggtaatgtgtaccctttcaaaagaaaacaaatttagacccgtaagccccactgattagcagaatgcatggtctgccttttctcattcctatccagtgggtaaaagtgtatagagcccaacatggtttggatggtgattggccaaaggaaccagtattgtattttgaaggagttgagtgagatttaggtttggcattctcagtccctcacagcccctgtatcagaattccagtggatggaatccctgcggatggatgaagcagggcctgagccaggattcgcccctagaatgaaacctgggttttgagttgccaggagccattaggagccctggtctttagtctgggttccacacagtgacagggaacccaggacccacttctgggcctctctccaggccccattgttccctctgctctgctgggctccatcctgtggagcaggaggcatacagggagagggagccgaagctctgggtaaataatgcagagaaagctgctgattggcttcgggaggcggacactttgtctacataaatggcaatcgcatcctctgtgtcttttaactgtcaccaaggagagagagagagcaagagagcgaatagagaggaggcgactccagctgcctgtgagtacatctctttgtctacatggctcagggtcagaccccagcacccactgctggtagacaacgaccctggggctggagtgggcgtctgtggttgattttggtcatgatgtctttctaaggatagagatactgctggttgagaaggctaagcatccaacatgcacaggtgacagggctgctaagggaacttcctgagaaattcggtaccagtctctgcctgtctgttttgagtaatttctataggagtgcagcagagaattaggaacttctgatggctttttaacccttgctatttgaactatcgtggcaacataaccaagtgagtggactggctttcgggagactcctgcagctgtgagatagaaagcaagaggcagctttgggactgcacacctaggtgtgcctttacaggtgacggatgactaacagcatcctctgacacattgtagtaatctcattcctaaagggctgggcacacaatggatattcagtatctgggagctctgttataaacaagcaaggcagctacaagtagaaaggtgcactcttccctccacatcctcttagctccagtttccaaggtaactttagtcaaatgacctgggttttcttcttagttgtttttttttttttttttttttcttcttcaaagacttccagttcagttccttgtacacaatttcttgttaggaaacactatgtttctcctccaaaaacaggatcaaagtaaaggtgacaatctcaggaaagctggcctcctttagaactttgaggggtgccagagagaaacagactttgctctggctcaccgcaagcgcagtcagagcctgcagtatcctagatcagtgtatcccaggacaatgaagaactagcagggacagggaatttgaatgtctgcagagaaataagaccttgccatctctgacagcatccttttcttttccctggacacatggtgtgtgggcctctacacatggattgtactaatgagataaggaaatttacattctcctttaaaacttcacatagccaaagaagtgtccagggatctaattctgtttgttttcctctcttggggctgttgattatcgtgaagacttctccctgaacttttgcaaactcatcttctgtctggtgttaggtttgagaaagtgtccaggaaatgattgctcattggtattttagaacagtcttaagtttcttttcttgttcctaggcattctggcaggaaggccctcaggaggcacagatgtacctcataggcaagtagagcaggtttatagggaaggttaaaatcccactgactgagtggcatgaggtggtaaggaagtaggtttgcctttctgctgggacaggcccgtgtatatataccacttttgatatatgcaagcgtatgcaagccaactgttgcttcctgtctactctcttccttctgaagggagctctgctctgcggagctgatgtgcaaatggagggaacagaggacagcaggctagcccagcctgttcccatggagatgcacctaaggtagtaggcagcctggtgtcttagtcctcctcctgaagctactcttctgtcctcctgtgagttaggagtggcagaaacctagtggcaagggctggaccactgcaactgtactcggggttgcagctaacatctccatcagtcctggcaggagagctgttggggtccacctgtgcctctcaggctacagagacagggtgggatacccaggtcaagggctgatttcgaaaaggctggcttcagaaggagagaagactgcgcccatccacacttgctggctctgtgactcgggtcatctgtaataataatccttatctcaccttacacggttagataagtaagatactgtgaataccatgtgcttaacagaaggttaggaaatacctatttgtttggtttcttggacaatataatgtgacaaccaaatgtcaatgtattctcagaactgaatgtggaagagtctgaaatacagggttcttagcaacacagtgacagaccagcaactgtgctgacgaattgagaagtcagtgtttaccattgacctcattcttgagagaaaattgagactatcagaagcgggtaccaaagggcaccaaataaacccacagtgccaggtgtcagtgtttgcaaagacaataaaccaatatgagactattacggagaggcagtcactagaacacagactgagggggtctctagcctacaggaaaggcaagtgaactgtgagacttggtaaactattggctatgctctgatttttcagataggcatatggagaaagtcaaatacaaacagaaaaaaaaaaaaaagaaaagaaaagtgatctctcagtcccaaatgttatctttttttcttttaacgtcacaaatgtcatgattttttttctagttttctatagcttgggtcacagcatggtgatatgattagaaatagtatttccccaggagaacagagctgaaaatcattacttaaactctatacactgtcagccaagaaaatatttagatgcttcatggttacaaaagaggaaataggaaggaatcagtggcccctttctcatctgcagaagggcaagggtagggagaactggcacactgtgagcatcctgagcatcattacagttctgtgtggagtgtggagtgtggaactgtgggtatctcacatgttggaaatggagttcaaaggactgtggtttctatacttccaagctcatatgtcccattttactacaggacatggtggttataggaagtgagaccttgtgggtgctttgctctggaagatgggaatgcggtgaaccctcattcctttctccatggacactgcaagaagccaatagtgtgagcctgggataggcacctcgcctgaaagccaatgtgatttcagaatcctagcgcctgcaactttataaaaccattgtttgtggggtgtaagccacctggtttgccatgtcttctgccgtggcataaatgggctaatgtgaaagactggctatggttacatctcaacaagtgctgtctaggcttcttgttttccttcgtaatgaacgtggcctcttaccaacgaatgtgcctcagaagccagtatattatatgccctgggaggcatttgggcatcatgactgtgcctgaggctcaggggatgatcaggcctcaagttctgatgccgctttaggacacttttctagcggttgtcaggcaatgggcatttgcaacatctgttaagatgcttagagctcatgctagttcagtggtagtaggagccagagcctgaattccgctaaaacgggaccttgctaacagggtactctggttcagtggagtggttcggttatactgttattgacaggtgacaagacatctagtggaaggtccttaggtcactaggatgtccctgagaaggagaccgtgggatcctgatctttttttttctctttctttcctgcctgaccagtggccagaaacacatgctacccaaagataaacccaaatcagacatgagcatacacttgagctctgagtgctgtctccatattccctggctctgacttttagaagatctgtagttagtgcaggctacttctcaagactgaaaaggaaatggtgggtagttacagaccggcggcaggctttccacttgataaagggaagcttgtgaaccatagggcagaaatgcagcaagatcatgtgagggagtggcctctacagccagaaaaaaaaaaaaaaaaaaaaaacccatgtgctgctgctgctgttgctcagtgaatttcccctcttacttaaaacactaaaacacccaaatttgagtctggtgtagagcagactagtctgtggtttgtaaacatgggaagtggaagcaggaagaataggagtacaagaccattctgagcctcaatctagcctgggatgcaggaggcaaagcagagagagaaaaggggagcagtgggaaggggaggggannnnnnnnnnnnnnnnnnnnnnnnnnnnnnnnnnnnnnnnnnnnnnnnnnnnnnnnnnnnnnnnnnnnnnnnnnnnnnnnnnnnnnnnnnnnnnnnnnnnnttctcacatcccacccccctcccctgcacaatacttccctgctgcctaataaaagtttttcctgagtgcgactgggctgcaggcactcagcatgtagcctcttttcatcctaccgatggcactcctgggggtgttttcatgcctgtttgcctttgcaaaaattgacaggaaaccttagaaaggttgaaggttgaagtctccatggtaattgaagatgaacccttgaccttggatcacctgacactggcacataccaagcccctcttgagtcaattttgactattcctgtgcttcacagttaacagtgggggaaaaaacgctggccagaaaattcatttaaaagcatttcattagccagcatcttcagagtctaaaaaggcttaggggactttggagtttgttgttgttgagatgaagtttcagatagtctttcttcaaattattagcaatttctcatggctagaaacatttcttatggtttcggatggaagcatggaaatgtgaaatggtaggcaggaccatgcatgggtgtttggaacttctccgtccttccctcggcccacaagaccttacaccctgacacatgccacagtaggatgtacatgtcccttcagtgaagcaggcttcagatccacaaccggaagtcttcaccaaggtcccacagaagtagaattactgtactacctcccattcgatttgtaagaatgtaagtaggggcctagattggactctaggaaactggctatggcagaggagtccaagaagagaaattgcagagagtaaaaactatagcctgggcatggttagaatgatctgatcacagagcagatgagggtgtggttgtgggtgtctctacagtagctatgactctaccagggatgtgataagcagctttttgagacatcataaaagcacggttggatccaatatacaatagagcagaaataaaatatttacaaggctgaacggattcattcatttatttattcacttattctcggttaccaaaggacaacagtggaacagaaagctacaacaataataacttcataactgagggttgattgggggttcttatcttcctaaagcccatgagtatagaactgtgctgaccgtcgctcctatgataaagcatccagggaggtgcctggctccccacacgagcaccaaccatgacaggggttccgtgcaaaatctatgcagtgcagctgctgccgagacaaatcaggttgtgtcaacagaaacccttttagggtctggagaagtgtaggccgttggccttatcaccgtctacatcttccagctaatatttgcccagctcggagccatgaatatcagacagctccaaaatgagcgtgagagtctcttgaggctttgctctaagtaccttctgcaaaggcttcagtggaaaataatcttcaaataaatgacaggagggtttgaaaagaataagcaggtattatgttactgtttgactaggaatatttccttccatagcgggctgctgcatgcttatttgtttttccctggcacatcctgctttgtccataaagctgtgttattcccaggagacagacaccactgctgggctgggaggctgagggcctctctcagctttgtagaacgttcagatacttcagcttcctataaaaagggattgcaaaaatggttacttttaaaggcatagaaatcacacgtgaggttcaaatcataagggggaacttgtgagattttgacacatagaaattaaatctcctgcaaaagctcttcattctgagtcttaaaagtcagaataaaatcatcccacattaggtcagacaaaaatgaggaaaacatcacaaaacataaacaagcagatatgagggtagaagtttttttgtaatgtgttaggatccttgcaattaaataaaaaactgctggtatttagtggaagatgcagtgaataagcaattcataaatgaagaaatccagacgtgaaagcaacatctgagcactggttgatttcaatagtcagaggtaaaagagaaccattcatgcttaggagacaggttaagtttaaaattaacctctgtgactgtgtagcactccccatcaaaggagaagcctgataaaacagtgtgctcagagaaatttagcagtataatgtaaaaacactaaagccatatatctctagaaaaattggtcctaaagaagtgatcaaatgttttccacttttcggactttttcagttttttttttagtgtgaaacaaaaacctgcagaacaggtaagaggcttgctttagagtaattatcaaaagctgctagaatacttgcctgtaattcatagggagctacagttcaagacctacagaggctccctgaagctaagggcagaaatgtaccctacgcatatgtacctgggcggaagcttatttcacaagtaagacacagaaagaagttaacgatagcgaatatgcaacgggaaagttattgcgttagtacaaggcttacttggacaaagaactgctgtgttgggacgactaacaggcaggtagtatatacaggggagaaacactgaactaaaggatgatttatgtacagggtgacacagaacaggaaggcacagatgccattatgctattcagatgagtgcacaacttaaaaattgcaagccctatattttccattcaacgtttttgggttgcagctgactgcaagtaacttaactgaaacctcagaagaagaaaaccgagacaatggggagctactctaactgacaattcttagtagcactgtccaaagctattcctatgcatctattcaatacaataaattgattgtggcgggactctcattaccaaaacaaaaatcttgattttttattttcagttaaggaaaacgagggttaatatggtagcaatttgagaagtatgttggtgtatagccactaaacatgagtcagggtctgtacgaataggtcatctcttgaccctgaacctcagctctgcattttgccgttccccccacccccgcccaccttttcccacaaacagagctggaaacagataatgatggtaatactcagcaaaggaggggcaccgcctgactgtagccaggtcccagtgcgtatgtagtatgtcatcgtgagaaggcacaggacagaatgcatttatcaatatggtttccctcccgcctcctgttgggctgtaatttatagcttaccttatgtatcaccattgtctcctaagcactcttggctgaaatgtgcacccaaatggtaactctgaaatggaggctgggtcatctttaaatcatgcctgtgtgtagtccctttagtggagaacactggaggaaggaaaaacctgatcaggtacgttgtccttggataccaactatctcctagctcaacattagtcagcttaaacccagtttgacaaagaagccctgcctgcaaagcggatattgctagcatctaatcacatgtatctcatctccttccacccttggtatctatctgatccagcttgctacttcccaaccccgagactaactcctatgctctcagtcatttttcttactcactgggtttagtgggtgctatcatcgttgcccttggttgtttggttagagtgagagacacctaggaaattgataaggcacatgtcttggtgcgtatgggacaatattaccagaaactcttggagggtggtcagtgaactgacagaagaactagctttgcatctgagcagcaccaatagactgggtcagatgaatcaaaaggccgaaggaggaagttccactgccctgccctagcaggtatctgttttttgctgctgtcctgactggtggacatcagactctggcttcttccgtctctcaataaataccaacacccagtgactccctgtggtacctcgagggctttgatttctggttgaccattggtggatcctgtacggagacttccggtttcttggacttaagtgccaacttgtttctagtcctccagcttgctgacagccattgtgggaagaaacagcctctgagcatgtgagtcaacccaaaaaaccgccttttgtagttagaagtatatgtatatggtgggcttcactcctccggaaagccctgagtaatccccctttggctacagctccccatctgtccctggtgtttcaaagttgagggcaaacttttttcccctatgcagtactcttgaataaaaatctgtcttcccattttaaaaaagtgtctgatgaatcattttgaacgcatttaacatcacaaaatctgtccagcccccctcccatcccagacaatggggagcatggggcagtgctgggaacaggacatgaaggtcagctccaatgctaatcacaatggatttgactcatccccagtacttactctgatggaaaatccatcttcaattacaaagctctggactaagggagggatttagaaatgtatcctttgtttagctttcaattgtctctcacaaatttagcaactattcaggaaagacatgttacaaatggggaggacaggattctagcaggttgtctatctttcttgttttgcaaatacatttgatttttaccaaacataagttcgagacactcagtttctccagcatgctaacttgtatctgaatcctcacttaaggctcactatgccttcctgaccaagcacagagccagggaactccgtgaatcatcagaagctcacaatccctctgcggttgaaccaggcgcttctctgccttgtgttttgagctcttgtgatgtaaattaagggtcctttcgccccctaatctgttttgacctcatcttttatattgttactgtttttcttgtgattttactgtttaaaacgactcgcaaagaaatgtactgcaaaaagatttgtctcatgatctgcagcccaagtaagccgcagtaagtgcctggtagaaaaatgactgtatgtcagcttcactcagacttttggaatgttgaagaagataacgaacacaaactctgatagctgcctgtgtgtctgacttgggtaatataaagaaagtaccatcctgataagcagattataggcaaaggtgcaggtcaccaggagatgggattccaggaaaagacatatatctctagctttggacagagctgtgctgtcttaggctctcggctgagcctccagagattgtggtcctacccttacccattcttcaggggctgccgtggccgtcttcatttctcagctgaaaagtggggctcgaagtgcaaggctctcattcagatggctaacaaagggtacatacaggcagaatgtgggccagaatgggaaccagtatttgtcattaaagtcggaaggatccataactgtgtgcttcttgcattttactgtgatatttttatttttaaatgagggtgctgttctgtcttctgctgactgtcttgtgagatgtggagtggtcattgtgcagcactgtgtggatccagtggcatgtctatctcatccagacatagaaggtggcaagggatgctgggttggggactgagggtctttatgatatagaatctctgctccctggacttgctcacccccctgcccagttcagagttataatgttttattggttgatttctattctctctgtcggcagttttcaacatggattcccgtgaattccggaggagaggcaaggagatggtggattatatagctgactatctggatggcattgagggtcgtccagtgtaccctgatgtggagcctggctatcttcggcccctgatccctgccactgccccccaggagccagaaacatacgaggacataatcaaagacatcgagaagataatcatgccaggggtaagtgagtatggatttgaggtcaaataacagctgggcttatgcctataaagcaccccctgaaagctgtacttccagtgtcatggggtcaccacaacacgtaagctaaagagaaactactaacctctgttttgctttcagcggagacagcttaggtttagagaagttaggtggtccatgaagctctcatgggagagtaaaggatagagccaaactacataggcagtgcaagggctttctccaaggcctccaagaccagtatttgcatcaccatacagggttcctagagggttattctttgatagcacgaaaaaataagctcctagtggtcgattgcaagcagtttaattaattaccctaaataaaggtacttgcatcgttcttagatctgccaaaggctaacgttcatgtacccagaaaatgtttgctccattttgtttgggcatggacagttgtgcacaggttctgcctaagggcacagaatagctgagctatccctgatagtcagagggatcaaagggttgcagtgaatctcagtgccccgtctccagagtactactttacccagcaagcaatttacctaaaagcctatcctttaacatggccttgaacaaatgggtgtgaccctgatcattaattcctgaacgaagtctgggcctggtgctggtaacactggcggattgcacacacccctactggggcttactagttgtgactttaaggtgaccgaggagtaggcaggaggggatctgacagagtggacagtctgctcttgttttcacagagaacacagaggctctggggaggcgcatagtcagccaaagtcctgggcttcagaggcagctcctcggttccagaacatctctcatagccctcgtcaagtttcatcttaaggagatttcccatggcatttgttctttgaatataactcaaaattctggctctggcttgggagttgagcaaataaactaagccgttcagcataaagccagtacagggaggcctagtcaaatgtcaggccaagtaggaatacaggagcgcagtgctggaaaaatgtgcggtcctcccgcaggagtctgtgttctataggagtatttactgtgcagagcaaagctggaaaatgcagaggctctggcattagctccccaagttacagatccagccagccccctgctagctgtggttaaccagaagttaggtgaagagtctgtgctgtgcagagccagtgtagaactatccaccccacacattctgtggctattcacagagaggagagcaggggagtgcgctttccagtcaggattcaccctgggagggcggcagacagtgtggagcctccaggtacctgaaagaaactgaggccctgggccccatctgtgccctctggccctctgcctttgtgcagtctttggcctcttcctctatggggctttgcaattacactttataaaggcatttccgcaaagacaagcgagttaccactacagatgttttggtttttatctgaacattctttttttttccctaaagcctcatgggcctcactcctgctctgctgaacacatcactcagcccgtgaagttctccagagcctccgagactcactgtcagcccctccctcccccctcccttcctccctccctccctccccctttcctgttcttcattaccctgattttcttccactctcacttttttttccccctctggctctgtcccactcccaggcctggagacagacttgcaatgagccttgctggaatcttccagcttttaatgagctatcctagttggctatcttcttaatcggggcttgctcgtgccacataaaggcctagtgtggttttactgagaaaagacatgtttatatctttgcaaagactatgaaaaaaaaaaaaaaaaagcaatgtgttagtcagctttctgaccctgtaacacagctggaatgacaaacttacatggggacaaggttcattttgacatgtagttttggaggttcagctgcaggactccttggtcttgttgcttttagctggttgtgagccagtacatcatggctgaagcacacagcagaggaaatcgactcacttcagggctggaaagcattgggggggggggcggggagcgggggggggggcggggatcgccatcacagcctcctttgagggcacatcagcaaaggcctcttagtatctcccactagtgccaccttggggtgtgagcctcaaacttaaggagctttaggaattcttaagagccacgccatagcaagatgttataataaagaatgtagacgtggcagcttcgacatgtctcaagtttgtggaggttgggttcagataagggcttcttaagttacagagagcagctttgtaccccacagtggtagggagctagctctggtctcctcctcctcctcccccaccaccacacttaacgtctcccctctaatagctccttctatgcctgacacccaatgctcctcacatcctgcagacccctactttcatctttacttgaatgtttacatggagtgatttgagctcgcagcttctataatgacaggatctaggcccctcctgctctcagggatcgtctttccttgtactctggcgaagaatgaatgcttcttttccatctctgcccgcagttcactttgtgaaatctcttccccaggacaggcatatcctttaaaaatatatatatatatatataccagcctaagactgtgcctcatcacagaaatttgtactttgtacagaggagagtttctgagtacatgttccttacactggaaaatatatcctgatttcagagatcttaaaaccctcagagttttgtcttataatcactgaaaaagaaacatttatttgactagaatctggaggagaaaagtcagaaatagtctcacctggctagcgatgcagaaagaaacatagtttctggttttgggaaatcaggagtggaccatttttccagaatcttttgatcagaaccatataagcattctgaacttttcagagagaaatgtttccttagcctgctacaaaccaccacacagaagatcaactttcaatatttcaaaagtggaattttttatttaatgaaattcggtggtggggtgggatttgtgttcaaactttccaaatggatacagtccgtgccctctataaattctggaattgttagtctatgatcagtctcatatctccttatacgagcccaaatcccatcacaaagccccactctcatgatctacgtaccttgccaaagccctgtctcctaatactgccatttggggctggagatgttgtttcaacttacacattgcaagggaaagactgctcatgtagccaatattggtctgtgtgtccttaccactatcctggttcccaccatcttagggattccaaagatcaccacctatgaggctcttttccctgtcagtctgagcttttccactgtacctaagtcagggttggcacggagtaggttgttttcctcttctgtgctagaggaagcaggggagattgtggctattatgagaaaccgaggtagcaacagctcttcttaaaggaactgattgttagatggaccagattgtacaagacagtggaaagggacaatacccaaaaaaaaaaaaaaaaaattgtttttaaaaattgggtattaaaaaaaaaaaccaaaatagacaaaagcaactgaatttgctagggcagctttgagaaaaccaagccttttgcactaggatctcggttgtgtggtgcagtgctttccctgtccagagaacccaggaagaacccaaagaggtattgctgtcgctcctacctagagacttcacgtgttatgaaaaaaatataataattcctacattatcttctgaagacagcatttccttcttgactagcaaagatattgaagcacaaacaggaagtctgtttactgtaatgataatggggtgaaattcagacagaaagtataggatgattgaacttgagaaactctgcccaagttgccttctacaggtaccttgaggaattcaccactttgtcctagagtaactgtcctcctccccacaggtgacacactggcacagtccctatttcttcgcttacttccccacggctagctcatacccagctatgcttgcagacatgctgtgtggtgctattggctgcattggtttctcctgggtgagtatctccaagacactgtggtggggtctattcttgcatgagacggtgatccctttgcacacaggacagaaacaggtggctctgtcacctgtaggtagcagggctactttgcagaaagcagagcttgggtcccagggaggaagtttctaagggaagagaaattctgagtggaatatgggagagggaggaaggagaaggagaaagatagaggggagagggaggaaaggagaagaagcaaggagagaggaaaggaatggaggagaagggggaagnnnnnnnnnnnnnnnnnnnnnnnnnnnnnnnnnnnnnnnnnnnnnnnnnnnnnnnnnnnnnnnnnnnnnnnnnnnnnnnnnnnnnnnnnnnaagagaagagaagagaagagaagagaagagaagagaagagaagagaagagaagagaagagcaagagtaaggaagagcagagcagagcagagcagagcagagcagagcagagcagagcagagcagagaagagaagagaagagaagagaagagaagagaagagaagagaagagaagagaagagaagagaagagaagaggattcagcatagtactgttttttggtttctatttgtttggttttgtttttttttttttgttgttgttgtttttaataaccacttgatttgaatcaaaatcccagttcaaggttgtgaagcttccattcccccaagaccagaagattgctatgcactctgactttggagacggttcctacccttgactcattcatcggcctcccaccagcctactgtccagcctatctgatgggcaaggaggcagagcaaaagtgctaaaaataggcccatgcctgcctacaggctactcacccctccctgtgtgaggtcctcttctacatggagtaaagacttagaaagttccctactgaaggcatctggcctaggtctcccagagctctgtgtcccagctgtgtgcttcaggcaagatttgaagcagatgtcattggctctcaggttctgagcctgctcactccatgaagaattcctcaaagcctagaactgtcttgggctctctagatagagagtgagtgtctctcatatttgtgccttagattcttgtgcttatgaattctcagcagccatcagggcccagctgagctgactgctttaccacatggcacctgattttcttccagctgggatactgaggggctgggctagtgggagtcacagctcatgggaagagctgagatggccttcttgctgaactgttgccattgctcttaggtcaggcacttggggccttcttctatagaccaagcctaggatgagtgtatccttttctttcattaaatgttgttgtggcaggtttcattggtgtcattctgctgctccaaaagccactgcatatatttgtctggagacccaaaatcaacctctgacttatctgcttttctaggatggtcttggttgaggaagagcctgacacagaggttgtgttgcttgatagctgtggttcataacatggaatgttggctcctatactgagaattagcattagcttggctgcagtagcacccagcaggatggggataaccatctaaccagcagggggaaagtcctcagttcctcttgtcatcaatgtgtcataattccagaatgcacaagagcagcctggtcaccatgttgtgccccttaggtaaagacccaaaataaatggaggctcaagtcacttttgcctggacctgagagtacccagctagctactttctgtgtgcaatgagaggagagaagccagacaccaaatcactggggaattaaaagactacatgagatgagtggcttatctgatgttgcctagcagaagaaagtaggcagtacctgttttcttggctccatcctgccctataaaatttgctcctggccatggaggagggtcttctagtagacctttttatattgttctgttatatgatcaagcacaccgagcacaagcaggcaggcatggtgccatcccccttacaccaatctggatgaatgaaagaagctatatctgagactgagttcaggcatttgaggcccacctgagattgaaagagtttaaatttgggttttagccaggcattggccctaaactcctcaggaactgggctgctgtttcagcattagctcttaaagaaccatggctgtgtatgtggtgggctggggaagatgatgcatccagggaacgctctcagcttataccctgtgacctgtcatggggagatgatacaattggtggggtaactcaaaaggggcccatagaggtctaccctcatggatccctgatggatctcatctggaaggagatgaggaagagagagaaatgtcttccttgtaaagctctgtcagtgttgtcaggcccaggctctgcttccaggcctcctggcagagccaacccctgaggcgccctgggatctctgggaaatgagaacatagcattgtctcgatccattttcagggggagaacaaaatgctgtagcctgaatcctttataaacattagaagtctactcgagggtgtgaagaacatgctactggcatctggcagcaaggcctgctgtgtgatcgcagcagagaatatgcagcgggcagcaggcatgcgtgaaacagacaagaacttctgttcttggagtgaacttccttgtttccatctaatccactcccgagacgacccactttccatcagttcacgagcaaggagccacacaggctggctgacccgtaaactcccccacctcttaatattctcatcgtgggttcaggtttcaacatatgaatgtgggagacacactcaaatcccagaaaccaagggattaattccccaccaagggtggatttggggggcaaaaatgtgaactttttgttaaattgatcaaataaaaaccaccaaagaaacaatgctttcctgtgtcactcctttgtgcggaggccagctgccttgtggcttagctgctcactttctcccccaacccccactgcaggctgcaagcccagcgtgcacagagctggagaccgtgatgatggactggctggggaagatgctggagctgccagaggcctttttggctggaagagctggggaagggggaggagtgatccaggtaaggcggggaaagcgggaaggcagacttttgggagtatgggctccacaaaggaccacagctgcaaacagaaagcggcgcccacgttgcttttggccgtgcctttaggtttcttccagagaacaggaaagccggggaagtatgctcttggagagttgatggaatctggatttagatcctggtgctgtttcccatgagcactcatctccactggctcttctggtatatagaactaaagctaaagcataggtagatgttggcgtacccattgctgacctccatgtctaggcactttccagacacactgacttctcactgtgaattaggcactccatttgacaatcaaggaaactgaggcccaaaacaactaataacataccactcagcttcttgcttgggagttacagaccttgtgtctgtgtattctagaacctaaggtcttgcggccaccacagaatcctatctttaccacaagtgacagctgtggccatgcttcgatggctgtatgtgctacttggctgtatgtgttatttgtctgtttgccaacagcttacctaaggcttctgctatgtctatgcatacatttaattcattctctgtattcatcaggaacaactgtagagcttacaagagggcacacaacagatgcaaatgacagccgtggtgaattttccattccaccaggatcttcagagtgaatgattggaatttatgctttttttttttttttttttttttttttttttaagacaaggtctgactatgtagtcctggcctggaactcactatgtggagcaggctggccttgagctctgaggtccacctgctctgcctcccaaatgctgggattaaaagaatgtcccatcatgccctggcaaatgtgaatctttacaaaacattttgtaacacagacaatgaactccattaactcagcagccctccttatgttgtttttctcatgtcaagttcatggttttaacactgagaaagtattactaaccttagaatcaagaagtttgtgtgtgtgtgtgtgtgtgtgtgtgtgtgtgtaacatatagttttttcagaagctctgataagcagtgatagctccacatatcttatggatgagagcactgaggctgacaaaagaatgcctttgtggaagatcacatgtctgctatggacaaagtaaactaggaagcaagacccttgtcttgttgtcctgggactatttgttttaacttcccatgtattttaacctccaatgtatggtctctttcttaagggtgctacatgcaacttagtggctttaaatacatttcttatcctatggttctgaaagtctggcctaggttttagtgaactaaaatcaagactgtcatcttaaaagcccaaggggaaaatccatttcccccacctcctcaagttttctaaagccttctggaattccttggcctgctactcccatctccacctcccaaagcagctgcattccatctcgctgacctttctctcactgtcatgttctgactgcagatgtgaaatcgggtctccacttttaaggacccatgtgataggattgggtccactccgataatccaaggtaatctttccaagtcaaggttcttaatgtaatcacattagcaaagtcccctttcccctgaaaggtaaacagtctctgtctgggaaagaggcctggcatcttggtgatgggagatgcagcgcgtgttgcatgcagtctgcagaagctcccagagaggatttgttctcaatggcttcctagcctctgcccctagagagccaagctcagcagggctccagtgggcctgagaatgtaattcttgttcattctaatgcattagagtgggcaagccagcagtccctgtggctcaaaccattcttttttaaagtctttgaatatgtccctttgtcataactaggtcactgtaagtagggaagctgataaaaatgaactactagagttagggaggctgagagtcacctgtaataccaacagttgagaggaggaagcaggaggatcgggggttcatggccgtccttggtgaattcacgccaaataattctgggtcatgcctctgaagacggatctgctggcttctttatccctgaatggctgcagactctctctggacactctgacttgattgtccttgttaaggacgacaagcatgcccctgggacgataagcatgcaccagggttaaggttagggttagggttaggccattagaccctattaaataaataaataaataaataaatacatacatacatacatacatacatacatacatacataaataaatattaccatatggattttatactataacatactagtacacacatacacatgtatgtaataagtaagtgtacacatatgctgtaccataactgaagtatgaatggatactatgaaccagacttctcaaaatgacagctggaatgttctcgggaagtcccagtataatttcacagaacttcttttttcttttcaaaggttgtgtggcatggtcagacttccttgggtaatgttacaaaaaggcatggcacagatgctgttctggcttgaaaaggggctgcagcacacgtccccaaaatacacagtcagagatgtttcttctaggtgaagcgctggtggctttccaggtgttgacgctggaatcctgattttccaggggcatgcttgtcgtccttaacaaggacaatcaagtcagagtgtccagagagagtctgcagccattcagagctacagaatccagcagatctgtcttcagaggcatggcccagaattatggtttatttatttctgggcaagtatctcactcttcagagtaggcctgactctagagcagattttttactataactccacatcttggctgagattttagctttgttaaaccctgctacctcatgaacaatacagctttctatctaccttgggatatttcctcttttctatgttagtgaggaggccatttcaacccttttcagggacttgagtttccatagactcagtaccattttcttaagctctctctctaagctctctctctctctctctctctctctctctctctctctctctgaatagcttcttttccccccctcttttcagtcattttctcctctatattttcggtgaattgctcatggttttctgtgtatcactgtaattttccacattgccaatttactatctcccatgtcaattttgattacactttcttacttttaaaaatgattgtgccctctgtatttatggataatgggcactcactgtaaaatgggaaaatgcagtaactattttagagcataattctctctagtcttagtctagtatctctgtatgtgtggttacataaattgagatgattcaatacatatatacaatgttttcttatattttcactgtttaaatactttaatttcttttttttttttttttggttttagaccaggctggcctcgaactcagaaatcctcctgcctctgcctcccgagtgctgggattaaaggcgtgtgccaccacgcccggcaatactttaatttcttactactattactgctgtgtgtgtacacggtaggtgtgcacggatactcatgccatgactctcacagggaggtcactttgtgaagtgagctctttctttataccttcttgtgggtcaccagacttaaaggataatctctcttcctattcagccatctcactggccctcggctgttttaaactttttcttaatttattttttcagttagtaaacaaagcaacgggcttcatcatagcactttcacacacacatgtgaaatgtttttcacaaatattttattcttatctaccttctttctccagcgctctccctcacacttcttgttactctgtattggtcctccccgtgccccgtcttgtccaaatatttttttgagaatattattgctgtacaatttttaggatgtactacaatttatgtaaataacacataaaatattcatgccatattacacttttcagtcctgtgagtaagaattcagaggacagcctttaggacaagaggcaactgtcttccatcagcttcctccccatggcacataagtgcgccaccaagaccagaatagcaccacaggagagagcacttttgggtcgcttgtcatacggtgaaaacaatttcattttcgagtctttatatccaaagacgaatcttctagttttggtacttctcaaagaattttacaagtaacaaaatttattgaataactattacaaaaccgactgtgttctagcctatttattgtgctttatataatcaattttcatcctcaaaatacttatgaggattagttgcattatcaaccttagttttcatagcaaagagattgaggctcagacaagttcagtggcagaaactaaaggcagtgtgtaaagccggtgttaagtattatcaccagcttgcccaggctctctgcgtgggatagagtctggaggtttgaatgctaccattgggttaaaccaccttttcagcgaagacaatctcattttgagaagtcccagccttaggttaggactaattctggcatctctcagcccaggcttcaacaaagccctggtgagctcaacccacttagtttgggttagtagaaagcagacttccttgtgtttactgcagggagctggctggcccttttcagctcatgaggctgattgactgtaatttgtgaggccttaaagagcactgagcccagtgacagcccgcaaggcagtctgccttatcgatcccctcagagctgtaatcacagcttagcatccgcgcagcagtgggtgtctgagcccaacggcacaccatcattgtgaggccggacaaatgagacctgcaaaatgggtctcttaattgggtttgaaagctcttgtagaagaaaagctgccaatttcttaccctgtgtgaggtgacatttgtaaaacctagaagatgaaaggacctttcggctcagggcatcagcagccctgagcatcgactctccaaaaggtccctcccacctcagagcaggctcgccatggcaacctttgtctgcctgaagcaaaggcattggcgagccacacaaagacgtgggggtaaaccggttccaggtaaacgaaggagcaagtgtgtgggcttagctcggttgcagctcggggctgttcaacccccaagtttctcagtttctcagccacgaagcacaataatcagcgtgggctcttcacctctctctctctctctctctctctctctctctctctctctctctctctctccctctctctccctctctctctctctctctctctctctctctctctctctctctctctctctcacacacacacacacacacacacacaaacttcttggtataaaagaaagaaatttctgtcagaatatggagagcgcccttcaagtccataatgagctactcagaataataaaggtgtccagggctccgaagagagggcagacagagtctcactatttagccctagctgttctggaactcgctatgtagatcaggctggcctcaaacgttgagatcagcctaactctgtccccttctgagtgcagggattaaaagtgtgtgctactacaaccacaatccacgttttgttttgttttgttttgttttgttttgttttttgagacagggttactgtgtgaaacagagccctggctgtcctgatcttactttgtagaccaggtaggcctcgaactcacagagattctcctgcctctgcctctgcctccgcctccgcctctgcctcctgagtgctaggattaaagacatgtaccaccacaccatgctcccacaatctactttttgtttgtttgtttgttttgttttgttttgttttgttttttgtttttttgagacagggtttctctgtatagccctggctgtcttggaactcactttgtagacctggctggtctcgaactcagaaatccgcctgcctctgcctcccaagtgctgggattaaaggcatgtaccaccacgcccggccacaatctacttcttaatagacagaccttgaaaaacagaatgtggccagagtgtctgaaataagcaagccaggagagaaaaacaatgggatgcacaggggaagtgggagacgcagcgtctgttttcacagacttgaatttcctgaaatggctgccagtcttgtcggccttctttaacgtggtctgaaactatgcaggacgactgttggaagtacagcccagaaggaaatgtgtgagtcactcagatgctgagtgaagaccatggtctgtttatctgaattcatgcattacagctacagaaataggaatatgtgtacctagcttgaaagctcaccccactcctcagggagtaggacttgattcaaaaaaaaaaaggtaaaagcagtagatgggaaaaatcaaagtgggagattgtgattgatgaagggggcaaaatattaataagaaaaattttcacctctacacaattcactgtatatttatctggaaaacttcatgtcttaaaaactttcagagtcagcaaaaatctgatgggtttttcctgagacttgtctcccagcgaagctgagcgcaaatgctaggaagtaccaagaaaaaccagacggagcctcattttttttttttttagatgtatttatttattatatgtaagtacactgtgctgtcttcagacactccagaagagggaatcagatcttgttacggatggttgtgagccaccatgtggttgctgggatttgaactccagaccttcggaagagcagtcgggtgcccttacccactaagccatctcaccagccccggagcctcatttttaaccatacccaagtcttactgcaaatctggtgggatgttacagaggcccatctgaagatgaaagacattaaaaaaaataggattcttttacaaattatatgggataagtgatacagtgggctctgaacccatttctttactctcaagttcaaaagatgaatcacattcaatatttctccactttgctgaagcatactgttgggatttcttgcactggttcaccaggcctgctataacaaagaacggagcaaaaatgactgaaacagcatatttgttgctcccgagtcccccatgaaggctgaaggccaagaccaaggtgtcagcaggattgcttttcctgaggtttaatcttgagttgctcacttctgccttctcaaagtctcacctctatgtatgtcatgtctgctgcctaattccttattctcaggacaccattcagattggttttgggtctaccttaaagatttaattattacttaaaggtcccctttgtctctcctcccctccttactgcttcctaatattcttgcttcttaccttcttttcttatgtgtattttgagaccttctcaaactgtagccctaactggcttagtacacgttatatacccaagttggccctgaactcacagttatccttagcactaagactacaagcatgtagtgtaaaacggtgtttggcttaaaaggtcctatttctataaagtgtaggacattctgagatgctgaggtctagggattcagtatgtggattgcagggagggagggaaggagcacagttcagcccattacattaaggactgggagaaactttccaagtcaacctctgcgtgtcaaggaaaatgcattcctatgttataagcaaatacaaattgttctgtccacatgcataggaacacagagcagggattgggcaggttgccctggatcagtctcttcctctgatggaagtggagacagtatgtcccagacggcttaaggaacccatgagagaacacctgcagagtcttgtatatgctacaggatcagagtgctagctcactgggacataatatgggtaaaacaatgtcaaactaattacaagagctaaaccagcccctgcagatgtgagatgcaaaaatgagtgaattttgcaatttctggctcaacttttaaaggaaactatggacataaataatatgtcttccaaaagtttagactgggacttctttgcaacatttcaaatttcatttggcctttttctcttggattcagggaagtgccagtgaagccaccttggtggccctactggctgctcggactaaagttatccgccagctgcaggcagcctccccagagttcacacaagctgctatcatggaaaagctggttgcttacacatctgatcaggtgagtgtgctggtgtgggcattggcccaacaccggacagcccccacctcccacccccatcctccaccgcagagctgaatccaaggaacagttagcatcacgtcaaatccaaaagctggtccttcgggatcacaaggcagagaaactcctcagtctatcgtgggagcttgatagatctagtcagaaataaaatacacatactgagagcctccgcaactggctggaaaccatttctgtagtgtggaactgctcagtgcccctgtggcctgcctttaaggctccactgtggaaaaattggaagggagactcaacccaatgccaaatcctagctttgtaaatcatgtacattctcaaagcctactttttttttttttttccaaaagggataaaaaaaaaacatcatgcctgctgtgagcactcagcccagcctgtggcttgagaggactgacttcgagttcactataatgctcataaaaccctacaaatagaagaaaataaaaatttagtacttttagctcacttattgtatttacttgactttttgatcgatcgactgtttctatcgtttctttttctttattttatcttgttagttttttttttttttttttttttttttttttgaagggtaggtggggtcaggggttgaaatgggttttctctgtgtagccctggctgtcctggaactttctagaccaagctggcctcaaactcagagatctgcctacctctgcctctgaagcgctgggattaaaggagtgtgatgccaccatccagtatattcttttatccctcagccctgttcgtctcctttggtgtgcaaattgctatatccttgaatctacatgtattcaaaatcacacaagtgaatgaaaaacttaatcgatgtagaaccgatactcactctggcagtatttgattcgttagactggaaagcaaggttctaggatggaaacaagtccaggaaaggagtgctttcaaaaaggaggaggggaagatatcaattctaccaccttcttggggcatcaagagcccaaaacaagtgctctgtagaacctgtgactcagattccattcgtgacttactactcactcttgttgcaggcgcattcctctgtagaaagagctgggttaattggtggaataaagctaaaagcagtcccttcggatggcaacttttccatgagagcttctgcccttcgggaagccctggagcgggacaaggcagctggcctgattccattctttgtaagttcaatgctcaatggagatggcactgtggggtcctctgggtcttgtctgggcctagggtagagtttgaggggtgtgtgttctgggaagaggtagtcactgtcttctcttgtagtgacttgaatgagaaatgtcccccattagtgctagttaggcatttgaccacttggtccctaggtgttggcactatttggggagcttaaggtggtacagcctttcactaggagtgagctttgagggaaaaaaaaaaaagtcctacaccattttcaattcactctttcatcacactcagcactcaggatgtgaattcttaccttcctgcccctcctgcaaagcccgttgcctgctgtcatgcagcccctgccatttaggacaccaaccttctgcaacaggaagtcagatacactcttccttctttgtcttggtcacgccaacagaaaagtaactaagattctcctctccaaatgatgcctcaaaacttatagtcacacaggcagccctggtcaaaatcagtgggtcacatgacaaaacaaaatgactgtaagaaagacttgtaaagaggaaggtgagatgtcaagggtagaaaggagataggagggaatggggtgtgagagtaaccagaatggttataatgtgtatgaaaatgacaaggaataaaattatagttttaaaaagaataactgcaggctttcctgcccgggtttgttgctcttagcagatgctaagaaggttggttcatttgtgtgaggcttatgagcaagcaataaattttccctccaaggtaaaaatatctaacaagccaaatggcatgcaggctcttttgtgtctagatatgcattctagtgggggatgcacctggagtctgggaattgtcatgtttctgacatagccacagcagtatgttctgcctgggactaatatgtcatgtttgaagcaattagagtgtcatgactgtggctctgtggatattctgtctggctacacagtattacccaagggagctttaggaatgcggactctgggcccctttcctgtagaattttggaagcctgaccactggtagaaccaggcacattaaatagcaagagtctagtgtgcatctgggtttgaaaaagatgttttaaaaaaatctcttttaacctttttatttttcagtgttggggatggaacccagggctcacaggaggagccttaacaccttgtgtaggatacctgcatccaaacctttctagtagtagtagtagtagtagtaatagtagtagtagtagtagtagtagtagtagtattggtggtggtaaacttataggataacaactttccatgtggattttaaaaacactccccaaagcctggtctacaaagtgagttccaggatagccagggctacacagagaaaccctgtctcaaaaaaacaaaacaaaaacaaacaaacaaacaaacaaacaaaacaaaaaacaaacccaaccactccccagtgtcaagttatccctcccatccctccctcagctcctgctttacccacacaccctttctctccccaccatggaattcttcctgttccattattctatccacctttgcagcacatgtattctactatcctctcattcttaagatccttatttctccctctctcctttagtggtccctttctaccattctagcttcaaggtaaacacaaaaatctaaagatggcagctatggtccacatagggatgattaaatgtggtgttagtcgttctgggtctgagttatctgactgcatccacttgactgcaaattttgtttttcattaaagtggaataaaattctatcgtgtgtataaaccacatcttcattgtccatgtgatagcaaatagatagcttattttatttcctcgctattgtgaatagagcagccatgaacatggatgagcagttatctctgtgtgtgtgtgtatatgaatatatattctctttaaatacaatactatatattatatatgtatacataaaactatatattatatttgtatatataacaaatatatattctctatatagaagactatattatatatatatatacatatatatatataaaagaatatacatctgtgtatatataagactctgcagctataataggctatagctacagtcctttgggtatatgtcctagaatgatatagctaggtcacaagggaattctcctcgttttagagtaagcttcacactgatttccatggtggctgcaccagtctgtactccaatcaacagtgagtgttcctattttctcactccctcaaaagcatctatggtcatttgttttcttgatcttggccattgtgactgggttaaggtaaaataccaatgtagttttaatttgcatttccctggtggctaaggatatttcttggacatttgtatctcttcatttgagaactctctgttcagtgttcagcccacttttaataggttgtgttttcttgataattgggttttttagtcccttttatattctagacactggtcctctgtcagatgcatagctggcaaggactttctcatattctctatgctgccccttcactcgggttccagtggagcatggaatctttttaatttcatgcttgccggcttgtcgactgttggctgtgtttcctgtacatctgagtctatatcctgaactgtgcctctcattgtcccctctagatattttgggtacagcattgagatcttcggtgcattgaaaatcgatctttttggaaggtctaaagtaagaataaaatttgctagataagacggtactcgtagccatctgatttttggcaaagattacaaagataaaacctaccctggagaaaagaccacatcttcaacaaatggtgctggaatacccagaagtctcagttcttgatgagggtggcttgcggttaggaaatgctctatttttctctagccctttatgtttatctaagaacaccccaggtaagcagttcatgacttgctctttttaattttttttttaagatttagttttaaacccactgtaacaattgttacccaagttttccatttacacccaagctaattgctcataattttaaatgttatctaccatctaggtatttattttctgtttggcccacttcttatattttttttcttatacttgatttttttaaagtcggttttatatttttccaccatcctcattttatcttgttattttttttattacaggtccccaacaccttttgtgtaattatttcatttaaatctacatgtatttaaagtctactaggtattgcaatgttacaagagcaacataagtctagacaactctacaatatctgtttcattaacattcactttatatatatatatatatatatatatatttcttattttcttctatgtgaaaatatttagaatttatcttagtgaatagacagggtggtctgctagttttatttctatgagaatatctttattttccgtttactttggaaagacattttccagacctaaagacagaaaggtgcttttgtttttttgtttgcttgtttgtttgtttttaagattttcattttattttgcattttgcttcatatggtctcagcatcatttgcttgtagtgtccctggaggccaaggtcatctgttccagatggttgtgagtcttcttgtgggtggtaggaatcaaaccccagagctctaggagaatggtcattgctcttaaagatgtagccatctctcaagcccccgcttgttttatattttgagctcgcagttcaagtgcaatgcatcaagagtaatgactgcatgcacactcaagttcagattggcttctccacgtttggcagctcagatgtcctttgagggatatggtcttgcctacaattacagtgagttagcacaatcaagacaaccccccacaggcattcccagaagcccatcttgcaggtgattccagatcctatcaagttgaagatcaacactaaatatcacagctgagcataaatgctaagggggaagcagatacctgttcaccgactttcctctatgatttctggtgagatgtcagttgtcagtgttgttgtttgcattgagataatgaggaaagtgactttcttcttcccaattgcttacagtatttgtctttcctctttacttttgggcagtttcaccatgacacaaaggtttttgttgttgttgttgttgttttggtttttttgttttgtttttgttgttgttgttgttttcgagacaaggtttctctgtatagccctggctgtactggaactcactttgtagaccaggctggccttgaactcagaaatccgcctgcctctgcctcccaattgttgggattaaaggtgtgcgccaccacgcctggctgacacagttttttatacttactctatttccaatccatgggaataaggtggaatctaatatcagtcttgggaaatacccattgtctttttctcgtagtttagttcaatctgtttcctctcccctttctttctggggctatggttacatgcagttacatctttctactgaatgtcagggacctcatagactcatctccatgctttgtgtctttaaaaacgaaatatatagttcagtctgacctacccatatttttccaatgttctctttagcttgcctagttaactcatgaaaactgtcattttaattataaatattaaatttttaacttttaactttgaaacaattgtgggttcattaaaatttgcaggggctggagaactggcacattgattaagaacatgtactgctcttgtagaagacacaagtttagttcccaacacctgtgtcaggtggctcatagctgcttataactccaggaaaatcgaatggctctggcctctgtgagtacctgcactcatatgcacatacccatacacagacacaagcacattatttaaaataataaaagaaaaaatttcttaagattacaaaattaaaacaaaggcatcctagacacttccactttcacacccaagtgttagggtatgtaatgttaggaccaggaaattggcactggcttactgtgcttgtacagtcctgtctttatagttatcgaatcctctaactaccctctgagttaaaacgctgaaatgttttggatgaaatgaaaggatccacttttctgctgctccttcctttaatctcaccttgtctcccattatcctcacaatctgttctgtgttctaagtttccgttgatactggggatgttatgcaaatgggtcatatagtccatgaaaagctcagaaggacatcttttcactcacttttgtgcctttaccatctgtctaggtcctttcagctgctctaccacagatttgataccaagctgtgtagctcactacttgttcatccaccacctagtgagaaatactttagttgctcccattttccacccatgcacagacagcatctgtgaacattaatgcacagatatttgattagagaagtacttccatttctttgggatactttttataagaaattaatagactgccttgtcgtcccactattcttattctattcatttattcttggttgtagttctatggataggggtataataacatctcctagggacataataatcacttctctggtgactaacaatgttaaatatcttttcatgtggatattcgccatccacacgtttttagtaaaatgtgaaattattttttaagtgtgtgcacgtgtatgtgtgcgtgagcaggtgccttcaaagtccagaagaaggtactggattcctttagagctacagttagttacaagtggctgtgagctgccccatgatggttcctagaaactgaaattggagcctctgcaaaaacagtatgtgctcttagatactggccatctttccagctcctgtgttgattcttaattttttaaaaaattttaaatatattgtttttatgaattcactgaggattttgtacaatgcattttgataatattcaccccaattcctctccctaattattttcggaaattactcacgtctccctacccactcacaagcctgtgtctgtttatattattattattttattattattattattttaaataacccactgagtctgttttgcattgtccagatactcatgggggtaagaccgtccagtggagcacagttgacatattaggggccgcactcttaaggaaagccgactctcctcccccggcagtcatcagtgtcaaccctgggttgatttttttttttttttttttttttttgtaacagattgattttgttagagcagttttaggttgctgccttgacagaatacctaacagaaataattcaaggaggaaggaattattctggctcctggtttaaggaacacaggctatcaaatggcagcaggggctgtttggagggcagttggaatgtgaggcagctgttaaatcacattagcagtcaaaaaccagagagctgaggctagaagggagccagccaggaacccgtaaggcctgccccacaatgacccacttcccctagctaggccccatgtcccaaatagcctgccaccttctaaagccacccgccatctgcgtgagtgttgaaatacatgagcctgtgagggacattccacattcaagtcacagggcaggctcgcagattaaaaaatagaacagaaagtttccatgctgacttgcatgtttcccagatgtcttctcacaggctgtagcctgttgttctagtctctgaatttgggtcttttgtctttggtgagacagatatctaattttagtgaggtacaatttatccattccttccacagaccagacctttggtgttacacataaaagtttattagccagtacaacgtaaaaagacctttccctccttggagtagtgctaaatactattaagacacaacacaacacaacacaacacaacacaacacaacacaacactatcagtgttaacaaaacagtctttaagtactctttgttatgtcccttttctcataatcaaacatgcagaagaatggcccaatttgattccctaattagcagtgttagattctctcttgctgccttagctgcaacagaattgtcaaatcaaaaagtcaactccccttatgccagtgccaaccattgagaacaattagttcacagacaccctgagaaaactaaagactgccatagttgattgccccaactaactggagaatatagcttcagtcagtcagtgctgtttgaaacagtccatgccagcctatttgctctcccaggcttccttccataaactatatctctataactctgttaccatttccacgtaggacaaaacgaaaccaccacactggcctagcaaagaaactgctctgactggtggtaaagagacaaggttgtgattgatccaaaaacaggtctcagtgggtgattggtgctaagaagcaaggtcgtattgcttcaaaacaaatggcagtttctgccttaatgcctcttctcgggttgtactctccggcttcccagctcactaagtctatcagcctcgatgctttgtactgtgctgccttccctggtgtggccacattaggcctaagaaagggctctctccagtgggctttccttttagtagtgaggctgagcaacagaaagagcagagctgccaggatggccaaggcggccgagtggcagaggcagcgacagctgagcaagttggcaggctgggcggtgagggaggcaaggcagctgcttgacagcggaagaagaatcggatgaacggtctgagagctgctagggtgggacacgaaggactgaagaagagagacaattttagtgaggtgcaatttatccatttcttccacagatcagacctttggtgttacacataaaagtttattagccattacagtgcaaaggacctttccctcctcggagtggtgctaaacactattaaaacaaaacaaaacagaaaacaacgctctcagtgttaatgaaacagtctttaagtactctttgtgatgtagtgggcagctgagaccaaaaaagaagaaaagggcataaggtgtcagaaaagaaaaactgcaggccctgcttgccagaggaattccagaggactgtcaggtcgttaggaccaagggtctcagaggccccggggctagcatggaaacactggccagagtgtggggttcaggaatcccaacttccttggctacacaagatttgtgacactggtggctgtcaagagctgagaaatccttatactcctgctgcccacaaacttcaaccctaattacaagcaagggctgaaaaatgccagctttctaggtttacacaagagctgtagcacgtacagggctcagagtcccaatatgcaaggcatgcatgaagactgtaacactagaaggtaccacctgctgctgctcccacctgctcgctgccatcactcaaggctgcaaaacaccgagggaaacaaaggggcccacaatttgaaggttgtctccttggctacacattatttctgtataaacagaacaaaaggactccagccaactgattcaacaccatgaccagatagattttcctcagtgttacattttaggcgctttgtagtttcctacggtatacttaaatctataatctattttcagccgagtcttgtgaaaggagtgaaatatgtttagagtcctttgagggtgtgcatatgtgagtcttgtgatgggccattgttccagaatggtctgttgaaagactatacttccttcattaaacaaccatttctcctcctttagccactgcctggcttacatgtagacctatttctggaccattggtctgttgttgtttttttcctgtttctttctttgtttctttttaaagatttatttgttttatgtatataagtacactgtccctgtcttcagacacaccagaagggggcatcagattccattacagatggttgtgagccagtatgtggtttnnnnnnnnnnnnnnnnnnnnnnnnnnnnnnnnnnnnnnnnnnnnnnnnnnnnnnnnnnnnnnnnnnnnnnnnnnnnnnnnnnnnnnnnnnnnnnnnnnnnnnnnnnnnnnnnnnnnnnnnnnnnnnnnnnnnnnnnnnnnnnnnnnnnnnnnnnnnnnnnnnnntatatgatgatacatttttaaaagatttattaattatatgtaagtacactgtagctgtcttcagacacaccagaagagggcgtcagatctcattacagatggttgtgagccaccacgtggttgctggggagtaaagggtttatttaacttacacagcccagttacagtccatcacggaggaagtcaagggcagggctggagagatggctcagtggttaagatctctggctgttcttcctgagcaactggttcaattcccagaacccacctcaggcagatcacaggaaacctgacaccccctctggtctctgacacacacatatccacatatctatgtgtaattaaaagtaaaaaaataaaaaagccttcaaaaaaaaaatggctctgtgcctatgaaaggaagtcagggaaggagctcaagtcagacacttggaggcagggagtgaagcaaaggccacgagcagtcctccttcctggctcattcccatggtttgctcagttttcttaaacaatccagaccatctgcccagaggtagtatttcccacagtgagcttagccctctcacatcacacattaatcaagaaaatgccctcacagacttgcttacaggccaatttgatggaggccttttctcagttgaggttccctattcccacaggacactcccttgtgtcaagttgacaaaaaactaaccagcaccctctcaagtttcctgcattactgtgttcagtttaattttttttgtaatgaaatgtttacattcaatatatacattgggcttgtggaaaatgtgcagaaatgagaggtttgtgagcacagttgtttctcactatccacaggatattgtttccaggaggcctgtggatgctcaagagccttagaagaaagcccatggcatttgcatataaccttggtaccttcctacatactttaagtatttctaatttctaaaacaatgtccacacatcatattattaaaggattcagcacatggtactctatgcccagcagattaaagtgggttcactggaagtttctggaattttcccctaatattttaaagttttcacttttaattgaaaatagagttatttttgtatgatatattcaaatcacagcttcccatctctcatctccacccaaatcctccacctctccaccctgccaattccacacattctttttttctgtctcaagaaaacaaacaggcaaataaaaaaagacaagaaagaataaaatgaaatgaacaaactaacaagtaagaaagaaagaccataagaaatgcacacacacacacactcagaacacacacacatacaacacataacacactcatctaccttaaaaacacaaaatcacaagccataatataaaaacaagaggccagtaagacttaaaaaaaaaaagtccaaacaaagcagtattagacaaaaaaccaaaacaaaacaaaaccaaaaagaaagaacgaacaaacgaaagaaagaaaagagaaacaaagacagatcacaaaaattgtatacatacacatacacacattcacatacagaccacacacatagtcacacacataccacacacaccactacaccacacacacacccctaccttaaaaacacaaaatcagctgggcatggtggcgcatgcctttaattccaacacttgggagttcgaggccagcctggtctacagagtgagttccaagacagatctatacagagaaaacctgtcttgaaaaaccaaaccacaaacaaacaaacaaacaaacaaaaacacaaaatcagaagccgtatacaagcaaaaagaccagtaaggcttaaaaaaaaaaaaaaaaaagtccaaacaaagcaataggagaaaaaaacccaaaaaaacaaaaacaaaaaaaaccctccaaaaatacctttgagttcatttttatttgccatctgctgttaggcatggggcctgccctgaagtgtgtttcatatattcagtgagactcctttggagaaactaatttttcctttgcaagcaattttttaagtggagatagatctttggccagagatgggagccacccctccatctcagctctggcatcttgtctggtttggatctgtgcagaccgtgtgcgtgctgctgcggtctccatcggttcatgtgtgtatcagtcctgttttgtctggaagacactgttcctttggtatcgttcaacccccctggctcctacaatctttttgcctcctctgccatatagttccctgagccctgagggcaggaatttgatgaatacctcccttttaggactgagcagtctcttattctcttcacactgtcccattatgggtctgtgcattagttcccatctactacaggaggaggcttctctaatgatggttgagcaagacagtgatctatgagtatagcagaatgtcattaagagtcgttttattgctccattcctatagctgaacagtagtgttcagttttcccctaagtctgtggtctcagattcttggccacccaagcagtgtcaaaagtgggttctatcttgtggagagtgaatttttcctagtattttgatttgaggttgttggaacccaacctaaaatcaaacctcatatacagagggtcaactgtattcatgtgctcaactgaagaaattggctgaggggaaacgcaggaacattaagtgaacactgcacagctcattcaaataaagtcctgtatttattcaggaggggagagagaaacactattccattttttgaattctgctttaaagacccaaattgcaaaaaaatatattagaggatactgttgctgttttgcagacagaaaccacagatatcaccagtctgatgcgttggcgtaaagagaaaggtcacagttcattcatgcattcatacatttaacaaatgcttgtgtctcagtgtaccttgtaccaactctgaggatatctgaccagtcacagtctatttcctcttggaatggtttcttgcagtaaagatacagatatgcctagtctttgcaccatttcatgataactacatttacagatgaaagtagaagatgcaatcagctttgaagaggatcaataataatgcctgttgctaagcaactctatactagaggttggacaggcagggactcatggtgccttgcatttttgattagagaataaggactgataacattcgtcagggttaaaaaacacagcctttttggaacagtacaaatggtttgttatttcaacatgcagcttgggactatccaactgggatacaccctcctgccccagatggggaaggggtagtagctaggccttgtcttagttttctaatgcttcttagtggtcataagtatttggtgtgtgcatgtgtaatggccacatgcgccctcctgggataagggtgtgtagccttcactatacctcaagaatttcaggcttctcgagctggagacccacccccaagaataagaggcatacttggcagagtttgagcaagaaagctgactctgtccttccagggactagcttgagttttatgataaagtttttatctttctattttcttcatgatagttggcttctccaataagccaacttaataacatcagcaaagggcaatgcctgcgaggcatatatgtgaggagaaagggctggtggggttcggacaacaggggaggaggtcacacaggctctgtcaccagcaggaaggctgcaggctctcaagatagaggcttgctctgcctcctgccccctcctgctacacaaatgtgattagggctctgcagagcacactgaaatcaggttagtggcactgagtgatgctgagctggggtaatcagagcctggagcagagcaggtgctagctttaatatggcttctgagaatgaggacaagctgacttgtagctccacagcacgtggacaggccattagaacactgcccgtgcagcccacttcactgtccttccttcctgccctccaaaggtgtagctattggtatcgctgttattctgtccctgcctgtgtgctcttggacaataagatactctggcaccttcctcaagttaagtatgaagcagggattgtaagcctatctaaggtcattgtgatgaggtctccagaaacagccagcaatcggccctacaccaacaaagcactaaaaccagccactcatttttagtctccatcaaggctccttgcagaacgaggcagaaagctattgtttatgcacagttgtttcgagctcattacaaagaaatcaataattgcttgcaaatttaagaatcaacgtttatgtttgaccacaagctcatctcaggcgataagcagtaatcatatttggcagacgtccccctctaaactctgtgcactcagtaatagataacagctgattttaacaagcaaatgtttaacatgtatgaatttagcagcagaaattgttgttcttaggccaattagtgtttagaggagaaaatgagatggagcgaaacgattgctgcactgcagatatatcatttctaagagacacaaaatggagacaataatgcagtattaatatttcaggccaaactgtgtttactgagactgcatcattttacccggaataacacaaagtgttttaagagtcatatgatgaatcaacccagttagccggatacctaaagcaatgcattttaatattcagttaaatatcaggatcaaattacagataccagagaaaaatcaccgaggccctgaggcccacgacatgactcatcttgtgcaaatgaggcaagtgtggaaaatgttgatgcatgaagtgaaaaaactgattgagatataggggaacccgaggctccagggaagcctggagcctgagagtctggaagcccactggtacctctcgtaccaggattatcttggtatgtctcccaaggcaatacaactgagcttcacatctaaggcttttatattctcctctctctctctctctctctctctctctctctctctctctctccctcacaaacacacacacacacacacacacacacacacacacacacacacacacacacacacttgttttttgttcttatgggacagggtcttctttttttgaaaatatattacatttatttattgtgccctggaaatcaaagccaggtcatcaggctggtggcaagaggctttatgtgctgagccttcttgcctgccctgagatgctcttcctacatagtctaaactgacatagtccaaacctgaggtccagctgccttcactcctgagagctacaagggcagacccatgtcacctctcctggtcctcattgtctacttttctgatgttctgacatcgttgggcgaagatgtcccaagagggcttacctattatgaatcaagactaggtggcaaatccaccactcatatgcctctgtgagattctcgtgtcagggggctgtctccctgacatatttaccttggaaccagccaggtaccaaatcattacaggcagtctaagccactaaagttacccaaaggtgccaagaacctcccacaaacacagacttctagataagcagcaggactctggcagtcaggtgagatacccacagatgccaggttacctggaaagagagctatgatctcactgggaggtcggtttgcctttcagggcaaactataggtggtcatctgtaaaaggaagccagaaaggcctggagatatgaatttgggtcctgcagtgtagtcaacattattggagagggggacttgacacaagggtgaaaacattgttcaaagagtgtggtgtagcaccacttctggggagacttgaacaatcacgcacccttggcatttggcatgcacttgacataagggtgtatgaaattacatgtttccatcaagcctgaggagaacactcactatcctaacagcatgatctctgcgaacccgttttcataaacaagattgtttttctgatcacctggtgtcagctcagcaaatacatttctgcaacagctccatgtccaacaaagtgcaaattacagagcaaggacattgaagcacacacctgagcaatgttctggtgtgtcttaactgaccctaccggtggctctccgagaactattctactcacgcttgcatacatcttatgtgacctcagtgcatgtcctctctggtgtgcttgctctgtgttttatacacattcaccgccaccaccaccaaactggggagggctggggggtctaaattctttattctatggaaactatgttcttagtgccgacagatacagctgacaaaggaatatatatagtataggaataactacccatgtgactgaattacctctttttgacccaaagcaccgtactctggaaatcttttgtaagtccagtatgggcgaccatccatgaaaaccagcagttcctagcctcacagctcagagctcagatttgtgtatatttatggtgtgtgtatgtgtgtaactatttctgaggagacttgaacacgaatgtacccaccccagagtgggaacacatgacagattaaagcaagaccaccatcaaagtccaatatagtgaacccatgagttttactgagtaagtatactactcacaagaatatgggtgaggggttggttacaggaatagaaattactcaaggcaactgtatcaccaaagcctcccccagcttaaatgacagctggaatcctggtgcatagggaaagcaataggctggagtgtccttttcaggtagttcgttggtctgagcctcttcctggcagctcatcttgtctgagagttctcttagaagtcctttctgtttatatatgcgtggagatggaggagcctattgaatctggccagttttaaggacttcctgaagcaattgagttgtttacttcctgagcttaaagagcttgtctgcagggtgatatgtttgacttcgccttaaaacttcctgtgtcttaaggagcatccctccaagatggatagttttatcttggagaaaattgctgcacagcagcgtgtgtgtnnnnnnnnnnnnnnnnnnnnnnnnnnnnnnnnnnnnnnnnnnnnnnnnnnnnnnnnnnnnnnnnnnnnnnnnnnnnnnnnnnnnnnnnnnnnnnnnnnnnnnnnnnnnnnnnnnnnnnnnnnnnnnnnnnnnnnnnnnnnnnnnnnnnnnnnnnncacacagacacacacacccacacacacattatgggtatgagtgtttggcttgtatttatgtatgtgtaccatgtttgtgcctgctacccacggaggtgagaaggaagcattggatccctgaaattggagttattgacagtcttgagcagccatgtgaactctgggaagcaaatctgggtcttctatgagagcattaagtggtcttagctgctaagccatctctccagcccttctactactcttttaggcaggatctctcactgaacctgaagctcactgttttggctaaaccaattgaccagaaagtccctagcatccaccagtgtctgcccctcccgtgctgggtgacaagcttgtgacaccgtgcctgggttttatgtaggtgctggggatgtgaactcaggtgcttttgatttcacagaaagcactctgacccagtgggccatctccccaggccacagttcagacttctgttcataggtttcttctctttatcccgttcggtatcaaacgattaaacacacattcatgggtttccatctccatgtaaacattcattagcattgtacctgggctaaccactggctgcgttacaacaacagcaacatgggaaataaaagggttgtttgttttttacctcctaggtggtcgctacactggggaccacatcctgctgttcttttgacaatctcctggaagtgggtcccatctgtaagtatctaattcactcttctttttgaaaagtattcttgacatggagtggaaaacaaaacaaaaacaaaaacaaagctgggcggtgggggcgcacgcctttaatcccagcacttgggaggcagaggcaggcggatttctgagttcgaggccagcctggtctacagagtgagttccaggacagccagggctacacagagaaaccctgtctcaaaaaaccaaaaaaaaaaaaaaaaaaaaaaaccaaaaaactaaaaacaagacatggagtggggagtttatccaacctttcactttgagggatgttcatcatcaataattctaaccatcatgattggcatatctcgtgttatatttacaacaatgtaaccccattggcttaaattcacaaactcagagtttgagttaactaaacaacggctaagcttaacaacaccaatatattatgaaagggagaaagtgtccaagcactttgtgctaatataatgtttaggatatggtggccatattaaggaaactaagctcttcaacatttggaacaactacccccacttgaaggtcctgttgcatgcgtgacatacacacagcatgaattgtttgtgcttgaatccagtctttagtcacacccactttaaagtatctttgtttttttaaaagaaaataaattactgtaagccagaaaatgttgatgcatgtctttaatcccagcacttgaaaagcagaggcaggcggatttctgagtttgaggtcagcctggtctacagagtgagtcccaggacagtcagagttgtgtttcaaaagaaacaaaggaaagatagacaggcataatttattgtgctgtgctatgcagtgtgacattttcagtgagggtaaacaccagttagaatgccatgtgttacttctgagatgtgtacaagcaaaacaaagctttcccaatgactgccttgtggaatgataaatttctcagacatgcccatcagtaaggagcacatagctgttcatattgatttagcaaatcaatgctttcaagctaaacttctacaaagaacactcagtttcagataatttcctgggcctcatgcttgcctccttcctccctagatgaggacattttgtctttctcatcgagactagaattctgttttagctgcaaaatgaagaaatgcctgtgtttccaaagtttcacctttgatgcgagctctgggaactcagcaggccttggaactgtttctaaggcaccaaggatatatcagcccatgaaactcacccttctctgttcctcagggatgtaaaggctcgggtggagctgtccctagcaagctctctgacctcagcccttcgacttgtgccagacatcacgccacctgcttggcatttggcttcattgtcacttcgtgtgggccaagcacgtttcccacctctcctaacccctgatttacttgtggtctcttcttcggaaagacttcttctcccttgggtcattgttccctggccagcaggagacaatggtggatgtgggggctggccatgaccttaagcggcagggaagcttagagcttacagctgcatgtcttaaattctgaccttcattttcccctatcaaaaaattggaaagaaaaacggttctcataatggtaaaacagtatttccttcacagtgcagctcaggggagttcttgcagacaataggctgtaggaaaggcatgtactgcgtgtagtacatgcttgtactgccaggaccgtgaggctaatcaccaaccgtgagaagtggggtggacacagccttgccattcactcaggatttggctccacctgttatgagctatggcacagctgtgattattactggctaacggcagccacacacagcaggctgagaacacactgaactagctggccatccgcagtatggctgtactgtgggcctcgttagctgcagaccttcacaagctcagccaagcaagtcgaagtcctctgactcagatgtcaggccaaggactgaatgtcctggccaacagccggctgatgtcattccccagggctatcagatttaaagcaccgaagtcttctgccagatagagactacacggctgctatccctgaactcaatctggctccccacaggagcaggaagatgacagccagcaggtggcccctgccattaatgctcacagtgctggatgagcacagctcaggctgccctgctgtcctgcagctccctctggcaggcggttcgggtgctgtgggcagagcccgatatgcactttgcagtttgagttcaaacccagggattgctcttaggacagtgttgggggtgctaacaggccaacacctacccctttcatgcatggccagtgttcatcagggcaataatactaactggtggtagcgtcttatagttaagcctttgtaacccaccgtctctaagccaatgccttttgtttgctgggggtggaaggcgatcagcgtttattaaagagagaataagttatagcagatggataggtggcagccttaggtacacacatggggacactgaggaaggggaataggtatactatggcctgccacagcttcatcccaagggacagaggggcttgcaaggaggttgtacgccatggttaccctggcctgacttctgcataatgaggcatccttttagaaaatagattgtagtagcaacaggaggccaatggctttagaagcaaaaggtggtgggtgtggcctcagtggtaatgtgcctgacatatgtaactccctatatctggctgttgtgtgttcatgctacatccacataactcctacatgtgtatgtgtgctggagagcctggatgatggggctggtcttagccaagcatgtaagatgcagaacacagaggcattgtcagtactgtctcccttccccttaggaccaggagaagcccatacagaagcttctaaggagcatttgtgagttctttcttgttggagtttggagttgatccaagttgcagacttctcaaggcggtccttgcgactgagtacccttgtttagacactagctacaacctgaggactcttcaaactcctttagaccccataagctgctaaagactctaaaacttactgagaactgtctcacagggatggttgaagattagagattaaaatcagccaaggagacacacaggacagtcttgaagtgtgagcacacacagcttctggtgaactctgaggagtcacaagggcatgaaacactctagccgtatataatatataactatatgctctgagtaacgacattcccctagaaggcaaggctctctaaccttttgctgcttgtttttgtgtagacttggtcctactcagaccctcctggaagcccaactagaacctttagagatcaactcccccagaagtgaaaattgcctggtgtctccatcactaatcatagtatcagactgtctggggccaaagctccaggaaaaaagaggtctataggtcatctctcaagagcagaggttagattttgcacgtaaacttgattcatcgtatagaatattttcctacctactgaaccaggtttatgggtgacacattctagagtggctttagctgttccccacttagttgttgagactcagagtgaaatgtctttcatctaggtgctaagaaacaagctctgagatacctaggggtgcagccaagtggcctgttttcttttcaaaaatcatgcccttctctcaaggatggaggatatgggatgagcaacagaagggtgtgagagaaaaaagaagcctaaatagccttctagaccctattttcccatgccaaggtatgaggttttcttgtggttgacccacgaaaactctccatcttgttttgtctcaccccttcatctgatatcctgaacggaacataaacaacggcatctaaggagctatgttagaggacttcagccgaaaaagcaaattctataaatagaggtctatgtggaacccaagcagcacccatggaaaacatgacatcatcttgtttcagtccatttgggatgctccacacaacaccacagaccccagagtgtgtaaataacaggagttcactatttaaacgtcttgtgtgtagaaaggcaggagtagggcactagttgatttgttgcctggctaatgggtagcactttctatgtataatcacatggtagaggatacgagcaatctctccggtgtctcaggattccaccatgatgatctggtcacttcccaaagccaatggatccaaaggatttaacagacattcaaattacagtgtgtcttgtcttacaaaggagtataaagctctgccagtctcatggttaatctgagtgatggctgtgatgaccatccatcactcatatcctgttgctccttggggagagtcttgtgttatcctaaggctgtgtctcttgctgcatcccactgtggggcaggggagggcatgtgagcacttggtgagtctgacaccttcacccttgcttcagatgacttgggtttcttgttgtatcttagattttgatggtgttctggcagagtggtatccacaaagtttatgattcatttgaccttgacttaccaagaggtttaatttgaagaataattgaaccaaagctttggaatgtttcttacatcctttatcagcagaattcacaatgacttgtttttcctcccagcacacacattaatgatcatcatgtatggaaaatcaggggtggttgggtcattctgtatgaatacaaggacagcaggctcttcacctgtgcagggatagctgcctgctatcttctctgtagcctcaaccttcctatcttaactacctcgtgactatatttggtgcttgaactgtttctcgtggtgtgtttttcctagataagatacaaaaaagcattactcacctcagacaagaaactaattaaaggcccaaattaacaactccacaaacatccggcttgactgtacatcgactgtattgggttatttacaggcatttgggtgagaagttgctcaaaggaacagggattgctcaagggcagctccatcactgaaaaaccaagcccaacttaactgacatctcacagaagctgcaccctggagcttccagcataacttgtaggcagctcttctggacagtctcctttccttagcagccattgttattaatataactttgggaggctgggtagagtggggtgcacattttataaattttgtaaatttcagaaactaccagagatcgttgagtttgtttacttcctgagtcttccagaggcctccctctggcatggaatacttgtttcaatttatatattactataccatacatgaaaattcagggtttgttttgttttgttttgttttgtttttttgagacacagtttttatgtgtgacagccctggctgtcctgaaacttgctttttaggccaggctggcttcaaactcatagggatctctgcctctgccttccaagtgctaggattaaaggcctgtgcctttaatgctctgcttgaaaattaataattttcactgacttctaggtgatagaataggcaatttacgagtattatttaatgtatactcaaagctgtatctaccacccttaccctcagaataaagcttaggctacatgactaagggcacatatatgcttgccgaggaggctttctcatcctcaaagaatgtgagcactctatctttaaggctcttgtgtgtggtggtgtggtgggggagaaggttagtgatgattgtcaacttgataggatctggactcttgtaggagacacaccaggcacaccagtaccctaatttagattagattagctgctggccagacctttagaggattatctggattaagttaattgaggtggaaatcccaccctaaagtggtaacacaattctctgagttagagtcctgcacttcattaaaaaatagaaagctagctgagggcaaatagttgtcattttctgcttcttggtcatggattgaccaggatgacctgcttcaagctcccattgtcagaactcctctatgttgaacctcgtaaagccaagtaaaaccgctctcctttaagttgcttttgttaaggtattttatcatagcgagagcaaaagcgggaaaatttagttaggaagcgtaagtcatttatgacacaagccaacggtagtttaagataaattacctaagtttgtggtggacatggaagaggcagaacaatataagtgtatgtagggttctctagaggaatggaatctatcaaatatatgcatttatatcctatacacacatctatacacatatatgttataaaagtgggatgtattagattgtctgcaatggctgcctctatgtagagacacaatgaactcagtcactgctcagtccaggaaatgaatgctccagaggcccactctacggctgaaaacccagataactgaaaagtttctggtattgagtccgtgggggaaggccgaggaagctggagtgagatactaacagagaacagcaccaagcgataaatgcagctgattaggagataacatctgaagcaggaaggtgaccgtgtttttcctgggacctctttctatgcattggaaggtgccacccactttcagtgtgggtctgccatccttggttaaccctccttagaaacattctcacagacacgacaagacctttgcctttctgagtgattccaaatctggccaaattgaccactaagaccatcagagtatgggtcatgtgtcctaaggctgtttctgaaaggaggacttgaaaagaggtagcaaatacaatgagggagtgcactcacggtgtgtggaatgaggtggatggaacttagaagagaatgtgggtaagcacagtaggggagctatgctggcctcagtactatgttcagtggtggcttgtgtgtcccccatttgctaagcactctctgggcagctgatgtgttggccagctgttggtatctctgtcttaagttttagccccctgatgggagggtcttttggagatccagctatttgttccacaagtactattgataagctatatgtaagtggtatgtatgctagacgcacaaggttggggtatgtccagaggagaactcacctttcccttctgatgttaggcaaccaggagggtgtgtggctgcacattgacgctgcttacgcgggcagtgcctttatctgtcctgaattccggtatcttctgaatggtgtggaggtgagtaagctgttcagtgaggtcttttgtttttgcactgggaatcaaacctactggcctcctgtgtacttggctaccactgagcaacactgctacccaaggtcatcagtgaaatctccctgtgtaagatttggacaccccaactcttattgcttcggtttatttcagcaaactactttctagccagttgcaatggttattagaaatgaaatgcccccggggagccaggaactttaatcagggaataaacgtgtgtactgttgttgcagaggacctgagtttggtttccagcagctactcccataactgcaactctaggacactggatgcctctgtcccgtgcactcctgcactccatacatgtacctagactgtgtccccatacacataatttttaaaaaattaataaatacagtacctcaggataggggctgaggacattccagtcatgcagcctgacttttgaagcattcctgaggcagacagctattttccagtttgctacaaatcctgggtagagctgtgcatcataggttagacttatacatataaagccatagaaaaatatttatgagtaaaataaaattgctatgcattccagtcagacaataatttaaaacgtcaacctgtaatcctctacgatctggctcaatgagttgttcacggtcttctcatatacctgagtaagatgggcagtcacagtggccaatattccacagaaagtcaccaatgcgttctaaatgtcccgtggactcttctgaaaattgcaaagtgtatcctgtaaccccaaacgaaactctgtcatgagaagtaacaatcaaagcagttagccaagactctactctccccagagctacagagcataaaacagtgcatacttaacaaacttaacacagatgggccctgtggtccatctttccagacgtgggcagaattctactgttgggctatccacaggctaggaagctcttccacctggccactagcagattcatgtcccgaagaaccccaagaggcctcctgtagaacaagtgtgtccaagggggggagatgctaagtttgcggagtcagtgctttagccagacaagaattgctttcttcttggaagaagaggtttcccgaggcttcactttataagggaggctggatcagcaagcaggcttcacccttccagactgggatggctatgcgcccttgggcaggtcaggtatcctccatctatcataaagtagatttaccagtgatgactcctttgtgcggttagccttaggagtggctgcgttaatcacacttaaagggtttaagaagagtgtggtgcacaggaaactgagcacgcattagatgctttcattatttttcaccagggcttaaagaaagtccccctaaacctctttctgcttgcatgtcaggcttgccgatcaattttctaattactgttttgaattcacataagactgtaataacagaaaagcgactgtcaaaggtatggaatacaaattgtcccatctttgaagagaataatcccccttcttgctggtgagccagcagcattgtggtttctatgtccaccacaatcactcactctcttacgcagtcagtagtcccttactgagtatttcatacatgctaaactggaatccatccttggaggtagaaagaggtaaaaaagatcactaagtactggggtttgtgttaactcgtgggaagctctgatcctatgactgtaatgccaaacccctcactagttttgtggatgtttgggtctcggaaatgattgatggtgtgtgacgtttctaaaccaaactccaacatccagtgtgctccaaaatttgaaacttcccaagccctgagaccatgccaaagtggtaaattccatcccatgaagctttgtctcgtacatagaaatttaaaaaacacttagtaaaataacctccaagctgcgtcttgggacacttacatttcatgcttaggtttgggtcctgtggctaatactttaccctgtatgtgtaaatacttttaaacttaaagaagcatttcagataagggacaagaaacccatttgaccttcagcatagtggaggcaagaagggccacacttcgcctatgcctttcctgtagtccggcctaggctctaagtttgtgagttcagatatccggtttaagatttcctgatctaccagtgctcatcttcggcctgaactgacaactcaaaagtttcacctttcacagaggggtgctggacagtcagaccaccagggcgatgggcaccgcagccagatcctatcaacagcagacaccattcacagcactcacagggacaaggactcgctgcaatttttcctccattagtggtacagctcttccttgcctggctgagggctcggctgctccgtggtcagataagcggccgcaatatcctgctgtggcccgacccttgcagataagggccgtcctctctgtcagcgcgaggaaaatatcactgtacggtaatgaaagaagtttaaacagatcagccccagtggagggaactaataaaatccccagcaaacaatgctccgctttaaccttttgtttccttttatcaacaaatgaaacttgctgtaatttcctgtctccttctcaaaattactttttttgaaacctgggaggaaatgaatcggcacctccagcttgggtccatatggaagtttgcttcggctgactcccgtgtctatcactgacaccaatcggaccccttagggctttgctacctcctcagtgagggtccctggaattaaataaagaggagcacccgcaaagccttgggaagtttgaaaaatgtcccgttaggaaatcggggtagactgagccttgtttctatctaaattaagctctgaggccaaatccccgacactcagatggaccggtttgcctctcaacaaaaccccggggcctgcatttggaaaatggcagaaagcagcctttgtgaagctcttggatttgcgagtgcacagctgagacccaggagccttctagctgttgttggcagttgaaatctattttctccttgaaagcatggtcagcaaagctgcagttgttatctgtgaccctccagccaagaaactagcaactgttcactatacttagacctcatctttaaaattgaggaggaaaacccttaggttcatggaaagtatgatctggtgtcatgctggccaaagaacctttagttaaattgaaaaaaaagaggtgggggggacttctaattaccttagattagttatgagattttttttttcctctttcctgtcatcatgatgacatgtatatcctgggaaatttgatggttcaggacaaactatttgtgggcccaatgctcatattctggacatggtagttataaactgaatattctggatttccagtgctttgaactctcacgtgaggaatcttgcgtgatcttagagcctgggacctaaaacgtgagttcttagaatacacaaggtcttactttctccctaaagagctatgagtaaattgtcttgttttgccgttttttaaatttttttattttatttatttttttattcctttacagtttgcagattcctttaactttaatccccacaagtggcttttggtgaactttgactgctctgccatgtggtaagtttctctgttgttctggtcacctgtggtggcccctgaatatgtgtcggcagagagggaggcctgcctgccagagcacatccagggccccctgagaatggaggtagtggttacttagcctaccgtttgcctccatttcagagtgctgctggaattcttgctcaacctccctctgcctgtaaacttttatctcgagtgtattgttgcgacagattagcttgagggacgagcaggtggagacaggcgacctgccatttgacttatctctcatgagcagacaacaaatcccaggaaatttcagttcttatatttaattctcttgcttctgtgtatttattcttagatttatcatcagtctcttggtctaactctcacttaaacaatcttaatgcttaagagtacttgctgagaataaagtaccgcatctttaaaattctctggagattcttagaaacaatgcagtaatcactttggctacactaagtaagaaaattaagttttaaaatcaagtggcagagtaccacataatgacaccttaagacacaatggctgggaccaatgcagggacaaatgaaacttgtttcttaaattaaaaaaaaaaaatcagggtaagaaattgattaatcactcacgtgaccaggggaaagcttttgcttgaattttgttagtatgtaaggttaatgttttcaatatgtttactttgcaaagttgctcagtgtataatataattaaatgaatgatattttactttaaaacaggaaggggcacagctctcactcaatttagacaaatgtagtcaaatccctcagtttaccaaatcaatgtatggtgtttgtggcttatttgcagtcctttaactgatgtaaaatcaaattctttcctgtcacatcttttcaccccaaattttgataacattttactaacattatttattaatttgtggtgtgtgtgtatgtatgtgtgctgtgtagtgtgacatatgtgtgtgtggtatgtgtgtgttgtatggtatgtgtgtggtgtgagtgtgtgtatgtgtgtgagtgtgtacacgtgtgtgtgtatgtacaggcacacacaaagccgtggagtataagtcatagggcaacacttagatgttagccatttcctgccatcttgtggggtctgagaatagtgttcactttagccaggcctgaatgcaagaacctccaccctctgcattatcccactttctgttactataacaaaatactgaagagaatccacttaaaaagaagaaaagcatttgggtttacagtttcagaaactcgagtctatggtcattaggttccattccttctagtttgcagggagaaaacacatgagggagaaactgtttgcttgaggacacctagctgagacaccaaaaacgacaggaaggacctttgtccctattatcactttcaaaagcacagcttgacatcagaagatttccaattaggcctcctctctggaaggccctaccatctacaaatattgctataggttggagacaagtgtcttctgggcctttggagggaattagtcgattcgagttgctctaaaacaccaaaggctctgtcaataacaaatttatttctcacaatcttagatgttgaaaatccaagattaaggccctggtagacttgttatgtaagttagggttcattttcttgtacacaattccttctgattgtgtttacccctagtggaaggggtgagggagtcatctagtatcttttataagaaatagtcagaaattctcttaactaagactgcatcaagcagggcagtggtggcgcatgcctttaatcccagcactcgggaggcagaggcaggcggatttctgagttcgaggccagcctggtctacagagtgagttccaggacagccagggctacacagagaaaccctgtctcgaaaaagccaaaagaaaaaaaaaaaaaactctgcaccactacgacctaataaaccttgaagtccccaacttctaattacttcaggattcaaattcaacattcggatagcagctaaaagaaagttcatagttcatttgagtctgagcagtatgaacttaaaacaaacaaaaaatactttatactctagtggtcttagccacggactgccaggaaataaaataagaacagatgcaagctaagaaactagataaaatagtaggcgacagaacataaaatgcaggtgatggcggcttcagggtctatgattgggaagctgtcgggggcggggggtggggaaaggcttgggggaaagatggagagagagatttgggtgtggaatgaacagaggagaagctatgaggaggaaaggcgctcaggacgccatgaattggctctttcattcactgacaggttatttatgacagggaggtcaggaaaaggccctttggggaagtgacatttgaccagacatctgaatagggaaagaacaggccggggtgagaaagtgtgtgtgcacgtgaaggccccgcccgaggtggaacagacaatgcctacctcagagttggttgaaagaattgcaggttattcaaaaaccattggaaagtggttttgagtttgtttcaaataagctactcaatttaaaaattgctacacgtgcttattttcaaaatgctattctcatattcagcatggttcagagctgaggagccctgggcaggtcactttcagtactttcaggttcgacacagccttactaggccgcttattcagccaagcctgagactccccaaaacggaaacccctccgttgttcacagcacggcttttctttaagaaggactggtgccagggtaggtggcaacaacaaacttttgccaagagccagcacgcaactgagttctccagactcaaggacagaattctgtttttctctggtccccatgagaagtgacaaagagcttgccacaaacagacatccttatgccagacatttactgcagtgccagggtctttgcttaagaactttaccttctaagcaaatgcctgttattttttgcagcacttggaggcttatctctccctctgaatagctctgcgggtcaggattgctgccctgttttatgggtaaggaagctagagcttaaggcttaatccagaaatacgtggtggtatgcacctacagtctctaccactcaggaagttgagataagagatttacttcaggcctggagtttgagaccagcttgggcaacaaacaagattccttcagaaagacagatagagagataggtagaaagggctgggggcagaagggggagggatttttctctggtgaaagagttcagagtgatccttatcaggccgggtggactgatgtcttaaagtgctggcttgagtaaagagtaagaaagaatcctgaagtttgtgcataccacctaagagcagatacaggaagcagcttgtagctgacactcccaggcacagagatgtgctcagggaatgcagggggatcattcatcatgggcccagaagaagctgaagaaaggggttgtgttttggtgaagaggggccaaattaggcagtcattctgcttcaactttcactcaaacagttcttgactgtgttttctctctgaacactacaaaaggccctgaattctagcccagaaagtacagcctaaaggcaaaaggtcactagctagacacaacatctccatccggcatttctctgcccagctgccttcacggaggggttctgtggggcatgctggggggctgggaggctggggagggggcgggtccctctgagtgtttgcagagggctttagggggaggtggcaccttttaaggtggtggcagggagtcactcagaggatgaaatccgagaacgttttcagtgatctttctcgtactgtccggaacatctatctactgaataataattttaaaaagttctcttgctagccctcatatccttgcagtaatgtgttctgctctgtcaaaataaagcaaaaccaaagtcaggcaggcaggagatctgtaaatacaaaagctccaggtggccagcccgcagacgctgcaaaatgtgacacaaatcaacagtcccaagttaatcttttacaggtgtgttttaagatttaactaaaacaagaaacaaatatatatatatgctccctgatttttttttaaaattgtttgattggtttggaggtgtttttgtttgtttgttttgttttcctctgtcttttgttttgtaatctttgaaatagaattgtctctcttttgtttcatgagatttctccaactgtttgcccataatgtaacataaatatgttggttgacttctttaaatattaaaatggacaagataatggaagtttctgaaactggcaatcactatagcatagcaaatagtttcttaatgagttcattattttgttcataagcttttactgctcatttgatctttggacccctttgcgtggggcttaccgtccttttactgtcagagctgccgagaggatcaacaaagccagatatcactcgttgtcccatgtcccgtgtgcttagataaaggatctcaggaaagatgaataagagaaaatagctcagtgtagctcagggattgctcctcgactaacacattcaaggtcctggactcattccccagcaccaccgccgaggaagcaaataaataaggcacacactggtcatttgtagctgccgatggaaggatttggctgcagaaactttgggattgtacggcaagaggaacacggtcaagaatgtccacaactacacatacaaaaacttctttcttccaaacctgatttaaaagtaaatagaaaacccccaaactcatacatcaggcccgtaaaatattcaacgtcaattcaatcacaaatgtagtttacaggaatcagcaaaatgtcacttatgttatcaagttagtttcagaaaatcaggtgacgatcccagaaagaaaaagcataggataaccgcacaaacttagatttttgaattctcggttaataaatctcttctgtactgtctgtctgtcgtgtggtatgatctcttgcagcagtccttggccccggtctgcttgcttaagtactcttccactgcaaaaccccttcagtaaaacccagcggtgtttaacaaaatagtataatggtccagcatgagtgtattccagatgtgtgtgtgtgtgtgtgttagaatgttagaaaatgtcatttatcatgttaaagaaacagttattctcttgctgtcttttcaccccgcttccccctctctccctgtcccccttccccctctccacgtgctcatggctggcctcttctcccccccccaccccccttctgcctttctctgtctctactaccctctcaactcctctccccatgcattgaataatttgtattctatataaaaagaaagaaagaaagaaagagagagagaaagatagagagagagaaagaaagagagagaaagaaagagagagagaaagagagagaggaaggaaggaaggaaggaaggaaggaaggaaggaaggagaaaagaaacagttgtcacagtaggttcagaaaggcgttagggtaaaatacccctgctggataaaaccaaaggcatgtgccactcactatgcctggccctaagcttgaatatgtttaaaaagactttttattatttatttgtttattcatttattatttaacatgcatgagtggcacttggatgcagtgtccaatacaaagcctcttagtaaaaagtagccagtcccatcaatgatcagaaatacaaatgaggctcacagagatgggctgctgatgtggcttacttagaatgaacaaggccctgactgtgatctccagagcagaaaaacaaaaaaatacggcaaaatcaacacatagaaagccacactgaaacagtaccgattgctggaaatcaaaggcaaaaccacaaatgcaataccaaatacaaatctgaagcaacagaagccagcacagtgtaaagcccaggatggtgctatctgtccagcaaggcgtgtagtctgagtttttagggtcagagcctgggccctgtcagcactaacaagctaggcttgctcacctaccctctatgtgccaattaagagacaataatgagtaataatgataaacaacaacaaaaagtttcctcagcgtggccacgttgagaagagaaacaaagaggtccagtgttgttccacccacattttctgggtcctgacatggaaatcaggtttaaataaatagcaagggatatgcataagtaagcagtcctggtcaatgtgtggtctagcccatcacggccccagctccaccggctcctacaaaagtggtctgacaagtcctcggaactgggtgaaacctgtttctgggagacaagttaccctctggctggccctgccttccagccttttcttttcccagcttgacattcctggggaaattccaatcggggttcttaaaagtctgatagccaaagggagggggtacaggcgtctgcttagtatatctctattcccgctggggtttgcaaaccttatcttttgttctctcaaatcagggtgaagaggaggactgacttaaccggagcctttaatatggaccctgtttatctaaagcacagtcaccaggactcaggtgagcagacaaacatgcccgccggtgcactgtgattagggtttgcttcaggactgacttggaagactggagaagcccatagcaccttcctcaggactggaggggccctgtgctctcctgcctcactctcgagaaacttctatgctgtgctgagttgagggcaggggttggacttgtctggcagaggctctcgccctgcccccaatcatcaagagcctgagtgacatgtgggagtaaggacaggaggactgcagccatcagccccaggacatgtacaagcatgtcttccaagacagaaaacacttagaatagcgactgcgccagtatctttcctgaaaaagtatttccacaacatccatcaataccataaaagaaagtaaaatttaaaaaaaagaaaaggaggaaacccggggagagaaaggcaatgaagagcaagtaggaagaaaagttaggcagagctgctggatcgatgcatacttctgcatttggtgggagatctgtgtctgtgcctggagctgattacctgagagtttaggaggctcagtgtctgcacagactgcctaaggaagaggacaagtgagagggcagtgagagagaagtagtgtgtgggggaagggggagggggcacacagactcctttcagaagccatagcaggaagcccacagtaactggggtggcctctaattaagccatgtgcttcccagagaccatggcagaaagcagacacaatgaggtgtttgagccacggtgacggtataagtcagccagtcagcctcacccgcctgttactacagtgagatgcctgaggcgattaacttatggttctagaagctcaagtaaagatggggcagccccatagatgtgaacctttgttgaaagaagcacatcgtggtgggagcatgtagaaaaacaagtgctcacattacattttataagttagaggggagagaaggggaaaagaaaagctggtgggctctctctcagagtccatttttagtgcacatctccaaggacctaagaccattctaatgggccctaccttttaaggatccaagcaccttcaaataataccacagcagacctcctcctcttctttttctcccctctccctcttcccctctctctcctctctctctctcctctctctcctctctcccctctctctctnnnnnnnnnnnnnnnnnnnnnnnnnnnnnnnnnnnnnnnnnnnnnnnnnnnnnnnnnnnnnnnnnnnnnnnnnnnnnnnnnnnnnnnnnnnnnnnnnnnnnnnnnnnnnnnnnnnnnnnnnnnnnnnnnnnnnnnnnnnnnnnnnnnnnnnnnnnnnnnnnnnnnnnnnnnnnnnnnnnnnnnnnnnnnnnnnnnnnnnnnnnnnnnnnnnnnnnnnnnnnnnnnnnnnnnnnnnnnnnnnnnnnnnnnnnnnnnnnnnnnnnnnnnnnnnnnnnnnnnnnnnnnnnnnnnnnnnnnnnnnnnnnnnnnnnnnnnnnnnnnnnnnnnnnnnnnnnnnnnnnnnnnnnnnnnnnnnnnnnnnnnnnnnnnnnnnnnnnnnnnnnnnnnnnnnnnnnnnnnnnnnnnnnnnnnnnnnnnnnnnnnnnnnnnnnnnnnnnnnnnnnnnnnnnnnnnnnnnnnnnnnnnnnnnnnnnnnnnnnnnnnnnnnnnnnnnnnnnnnnnnnnnnnnnnnnnnnnnnnnnnnnnnnnnnnnnnnnnnnnnnnnnnnnnnnnnnnnnnnnnnnnnnnnnnnnnnnnnnnnnnnnnnnnnnnnnnnnnnnnnnnnnnnnnnnnnnnnnnnnnnnnnnnnnnnnnnnnnnnnnnnnnnnnnnnnnnnnnnnnnnnnnnnnnnnnnnnnnnnnnnnnnnnnnnnnnnnnnnnnnnnnnnnnnnnnnnnnnnnnnnnnnnnnnnnnnnnnnnnnnnnnnnnnnnnnnnnnnnnnnnnnnnnnnnnnnnnnnnnnnnnnnnnnnnnnnnnnnnnnnnnnnnnnnnnctcctgagtgctgggattgaaggcatatgccaccacctcctgactataaaccacttctttacaatcactatctgctgaaattagaagttagagcagtggcttaaggtactcacagaaccttcctggtacagagagatgcaggggacattctgccactgtctgtctcctcattgaattctggtatacaacacagccgaattctttaaaacacacacacacacacacacacacacacacaggaccacgttctatgtgcctattatccttctttgtaggccacagcctccagtacaaaatcatgagtgtaggctgggttctgaatggcaccaagagagcagaaatccacatttccctgacagtatttctgctcaactgtgtagccaaggatggtgtctcacacttgtaacggtcttgcctccgcctccctggtgttgggattacagaaatgtgccaccacacccaatttatgattctggggatcaagtccaggttttcatgtatgctgggtaaccattctaccaaccgagcctttatctccagcctgagatttttctataacagaaaatgctgacttctgctgccaaaagtaggaaatcattgctctcactaagcaggcttttcagatataatctgtgttaataaagatctattttgcaaagtggaaaaagagtcaatgtaacactagatttcctaattcaacattccaaatgcaaatatttctgtattagttacttttctgttgctacaataaaatatcacaaaccaaagcaactgagaaaagtgtttattttggcttacagttccagagggatagtgtctattgtggtgggaaaagcctgacagcaggtaagactagacaggaacagatcacagtctcatccacatacaggaagcagagagaatgagaacaggaagcaggtgagactataaaaagcccacccctagtgatgaaatatctccagcaaggctctgcctctcaaaggttctataacctccttaaacaataccacaaactggggaccaagtgttcaaatctatgagcccatgggagacatttttcatttaaaccacaattgtcaatatattgtatttctcacagttttaagcattgcctgattttattgctttaaggtttcatttacaagctgcctacaccaaaataaatcatgaagggttaaagatgtagtaggcatgaaagacataataagcagtccacagtgtgtaaacagctgtaatcataggaacttgctggtgtaggggagttgctggcattgttgctgccagctctaagtgattgtacaaggagctcaggtgttgaggccagtctcccttcaaccccaatgaaacagactcacaaagaagcagatttccacccatgtgtgctctcctctcgctctaaaagccactgtgcctaaatccttcttaaagcggtcagtgtaccttcctcccaccatgtttcctgaaatgaggaaatgctctacaattctgtagatggcagacgctaacccacagcgggaaagatgacacttgaaagatggctcatctggcagaactaccttttcaatttcctttagttccacacaacaactagattaaaatagctgaatgtgactaacggtactgtatcagatagctcaggcacatacactctgaggcggcgacgtcaaacattcattttcacttatgagtcatgtagttatggccaggtaccttgggcctttatgagtcactatcaggttattttttggcaccatgccactgacatcaagtttgtttatgagctccgttgctggcaagaggctccagagaaaaggtcagagtgtgggatgggaattgaagaccctgtctctgagtcactcaaaagataggctgagaccagtagttatgtatgtccccaacatggctactttatcctcgttaagaaaagacctagactttcctgattcccagtagaagtcaaataattacttcagaagtcctggatagagaatgtgaaccctcccttgcagtgcagtgcaccgtgggtatgttaggtgttccagctgaaactaccatgctacagttgctattgcctagaaagcaggggtgtgtgcaagctgcagcacgctttgcttggcctgcatttctgggagagatttccaaggtgcctgactccctattgtgcccaacagggctgcagccagcctttgtgttttcccctagtctgtgtccaagacactctagaaactgtggtttgtgactccacacagggctctcttccccatgctgtcctgggatctagggttgtaggcaccagagaacatgagagtgctaaacaggcttttcagaacccatgtgggagcactgagtccaggataagaaggaatttgactcagagtgtatagagcagctgctctgtgccagatgccagtcaacacccttgaatatggagatgagacgacccccccccccacctccttattatttgaatcattctttgtatcaccagctccattaacaattcagccttccaaatgtgtcctgggcatcctgctttcagggactccccttgagtcagttaccttgaatgagccacacagaacacttagccctagccagtccttggatagtttcatgtctgccacagaagtcatcacttataagcctggaggaaaaaaggataccttttcttctaatggcctctctctaatggctgctttttgtctttctcttttctccaggattcatcactgactacagggtaagtgagtggctttgcccattgtaatcaaactctgaggtgccaagggctccctactgtgctgttgctgtcacacacacacccccaccacattccggagcaggaggccacaagaggcagcttctaaatgtgttctgacagacatattaggtggctttgccgtaagcatctctgccacgtccatcaagggtcggtcttcacagcccacgtggcccttttttctgccttctgcctgtacttggggcagcgtcctggggagtgctagggcagagtcagagaagagccagcctcttggacaggatcgtagtcttggcagtctttcctctactcactttacttctttctccatttttttttttttttaatattcaccacaaatgttttctggattttgaaaacaccaggatgtcccagctttgctctggaaaggaatttggaaccgcaagtaatgctgggaggtttcttccaagaatagaagccaagccgggctgggaacatgaggggcccactgcatctgctgtctctctcagaacacgaaggggcccacttcatctgctgcctctctgactaaaaaaaaaatctgacctggcttatttgctgggtggggaggcgggtgtgcatggtgaacacaagacactatcaaagcatcttgtccgaagtagtgtgtctaaattcttggggcagtatgtcagccactgataataaggggtagcaggattgcctctcctagacacagagtacccttccttcttctgatgacagctgcaggctggcaggtgcaggttaccagggaatcttcatcctatcttctcccaggccagagtctcatggaagcttgtgctatggggaaaagctaggacttgtgcagctatgggtatggccaagagaacactccattttctcctttaactttgtacaagctagccctatttaggatccaagttaccttttagaaagcacaatttaagggatactataagaataatattaaaagtagtttgaggataagatcacttaaaatcttttcatcctgacacttctgtgggctttggatttgtattactcttgtggggggtacaaatgccagacttttgagaggaaaagctctacgttaaacagagcttggcaagtctgtcagcaattgtcagcagaccctccattgttttaagtgaacttggcatgaggtcagatgtccccttccccacaatggtacttaaactgtgcagaagcaaaatggaaaaacaaacaaacaaacaaaaaaaccccgcacatcctatggccttattgtctcattctgattttatatacttggtaaaagttgcaggactgctgcataataattctggaaaaccagaggccttcataaagaaacagtttaataataaggaattaaactagggagtaaagtctgatggcgcacacccttaaccccagaactcaggaggcaggggcaggaggttctcctagcctaccaacctagcctactaagtccatgccagctggggctacataatgagactgtgcctcaaacaaaaagcaattataccataggcatacaagtataggggaaacagcatatatacatttggtgttgtctcagatttcatgattcagggaggaacgactgcatttaaaaataaactctgtgttcctagaagcagcacggagctcactcttaattgtagctaaagctaattcttagtgggctctgtgatggtagacagcgggcgagtttagggtgcttttcccaactgtagaacaccacccagaagggagactgcgctttctctccaggagactggagcctccggactagataagaagtaaagagctcccctcccccagcccgccctttgtaagcccaagtaaaagaatttcaaagaaagccaggaagtagtgcaaggccatcctcccgacaggcctgtgtctcatgcctgccctttcctacgtgcttttattgcatttccaaccatcatccatcaccatcaagaagaatgtgaggagccagtgtgaacagcctgtcagatgaccgtctggaaaagctaggagaagcagaggcaggcttctttggtaaaagggtattaggggtcactccccagaggtcagtgagacaaaggcgctgatactgtttcagagtgcagcttcagtgcatccaggcagagaaaggcagacacacaaggagttcagcaccctctctctgcctggatgacctcctgccccctcggaagctgcctagggcaggaccacatcattcctatttcttcctggagtgcctcctctggggtgtactcagcagacatttgtgcgttgaaaatggtaaacttcagtgcctctcgttcagtgtttcttctgtcctcatctccacaggatgtgaaggcagcttctccctctcttctccccagctcacacaacaagttgtacgccttcccggctgggaaacggccattctataggaaactggctgcttccagaagaaaccggctgactgggaagctgaaaaggagcctggctgtttgcactgttctcactgacgggttctttatattttatttcagcactggcagatcccactggggcgacgatttcgctctttgaaaatgtggtttgtttttagaatgtacggagtcaaggggctgcaggcttacatccgaaaggtgactgccttctttgtttatctaatgttctaacggtcggtcgtaggaaactcagaaacgaattcaggtgtctttgtaagcaaacaccatcatgcattgcctaacaacagggataagctctgaaaagtacatcatgaggccctttcataaacatgagggcatcagaattttcatatacaagcagagacagacaatttcctagaagggacaggcctttggggacagaggaatggatgtgataagttattctcccccagtgaaacgagtcaattcaaaccaggtttgaataaaggcaggtttcttgggaagcagctctggggcgagttcactggtcccaaggaacgaggcgccacgaggagcgagacagaggggagggggaagagaaagcgagaaagagcatgcgcgttcagggagagagaatgcagagaggggggagtgagggggagcgagaggccaaaatgtctggattacataggaaagagcttctgggggaggggaggggaggggaggcccagcccggggctggaaagttcaggctggaaagagagtgagagcagccatgatctgctgttgtctgaaagagcgtttttttttttttttttttttttttttccttaagcacagcgttggaatcaggcagtagtttgggcctttacgattaaggcactcacaaactggttctatgtatcttctaagacactttcattagaatataggttatcagctccaggaagttaattaaaagcagtgtgtaaatttaatgttttccacgtatccatccagcagtaattttgacggagcaatactagtaatgagagcataatgtttttctcccccactaccgccaaacaaaatgaaataaaacaagcaagcaaacgaacaacagcagcaacaacaacccaaacctcccaaactaagaaaacctttgagttggttgggatagataccatctagtccttttgtctcaaggaggctttctgggcagtatggaacttcggttccaataagccacccagtcactatgatgtgccttaaagtagcttgaggagccgcttattattctaagtcctactaccctactttttttgtttgtttgtttgtttccaggctaagccctgagtatgagccaggacatgtctacccatttagtcagatgcagagggcccagtgacttcagctgagtcctttctaagccacaacatcatcttgatgaggcaagcatgcctgtggtttccagcctgtggtggtgacagctttccccttaagtcccactgcattaccagatgtgcagctaaaggcaggggctgagtgtctcgggccctcttctatgacaggatgcagaaaagcagttgttagaagagtacccgtgtctcttctaaactggcatctgtccaggtcacaaaactgttgtaaggaaatgtatgcaaacattgagcagtgtaagaagctacacaggggaaagaactagaaacctagagtgtgtgtagatttctagatagtccctgatccaattgcaaacgggataaggagggtgagtcaacttgtgtgtaataagaaagaaaccccaagtggtttatcagtcaaaggtggtgatgactctcagttcaggacagctcactgcgattagcttgtgccaggttaaagacacaccacacctctttctggaaaggccccaatccagccttcacaggagaccataggaatggtcaaagatggcgttcctaggcttgagctaattgaagagcattttagtcctgaatctttggtgccctctggtgggaagacttgagacaattgcttctgtggcatctatgaccaaacaagctgtgtgtgcttcagctcctctaaaggatgggccttgtggaaggtagtgctggatgccaggaggctccaattagctaagtgtgcccttggagagtgagcaaatgttcatatgtggttttaatcagtttttgaattctttaaacatctagagattaaataagttggtgtattcaatgcgatcacatagcgttttctttttccttttaattattttattattttggagctagggtctcagtatgtagccttggttggcctggggctcagtatgtcgatcaggttggcctcaggctcagtatgtcgatcaggttggcctggggctcagtatgtcgatcaggttggcctcaggctcatagaatcttccaggtgctgtgattacaggcacacaccatcacaccagaggggacacagctcttgaatgtggcaggttagggtgattcctgtctgtaagttggaatcaggctgggatcactatcccatttactgcagaagtgataccccagtgtacacatcagatgcagctgatgtgaatctcagctgagcccaggtatgactgaggcctacgctatgacacttgttcttgcagggtctcagtttcctatctacaaattaataaagctatcatgaggaggtcaaggtggcctttttttcttttagaatcttcaactacttctttataatgtttattataaaattataaacggaagggggttaaaacatagatccatggacagaagaaaatgaggtttttttttttttttttttgaggaagctggaatccttgtggtatagggcagatgagtttcttctcaacctatgtgggaaatgctggtgaggatgcaggacattgctcagcgcatgtgaatgactaatagatgtgcagccctataaggtactgggtggccagggttaggctaaagttgtgatgagaaagacagcaagtttcccttccctttttccagcacgtggagctgtctcatgagtttgagtcactggtacgccaggaccctcgctttgaaatttgcacagaagtcattcttgggttggtctgcttccggctaaaggtatgttatgccagtgtcagccatctttgtttttgttgaacacaataaagtattattcaggacatccacaagcaaagttgtgtaccagttgccaagggctacagaacatgacctgtggtgctaagcaggccgcgctggctggctgactggcccagtagactctcctccatggacttgctgcccagtttcctctgatgtgattggatgctttcctcttgacccaatgccaagagtccatccaatacctctggaactgtaatcctctgctgagttgcctgtggcctcagtaaccaggtcacctgtggacacacaacatcagcacatctgggaaccgggttgataaacaaaccccactgtcctagtcatctggctatatatacctccacaagattcctgtgcagagcgggtacctgagttctgtgttctccttgggagggaagcctgcccagatcggcacgggagtaagctatctttgcagagacttacacaaccatgttactcaaaaggccctgctcatcactgtcttataaacgaaaccagatgctctggccgttactaagatggcttttaataggccaacagttttatgttttgttttcttcctcctcgccttcctctcctcctttttacagtactgagatggaacccagagcttcacagattcaggacaagttcacactatgccataataccagaacctgcctcctttttctccccttttaaaaactaagagaaaagggctccaagatattacccaggctgacctgaaacttgcaatcctcccaagtagttgggtctgcagacacatgccactacacttgactggaagtttctgaatcagttcaaaaggtcttcaggagacctccttgttcaagcttagacaacagtcatgagaaggagcaatctgggatacatcattttcatgctgttgcactccctgtaccacctccttccctcatcttgattcttaaaggtttgagataagatctaagtttgggagattctagaaggatcaatcacaagcgttatggcgtgagtgctagagaggagccccatgctttctgcaagcatgaaatgtaatgtctaaggaagatgtatagaatgaccaagaaagtgggccataggtagcttgtgtgggatgcctcaagtatatgtctctggagttcggtgtgtggagcatgggatatgacagggctaccaacattggcattggtactgtgttgacttctttgtcctccaagtatttgttttcattgcagtgggctgctgcagtaagatattttcagttttgtaggatgcttatattttaattttaatggttttattgagatataattcatgttggcctttagcttatacatttgagtgatttctggttgtgaggtcatcaccataatataattttaggacctctttgtcttccttaaagacctctgcataatatcgcctttgtgattgtcagcttcactcttgatgtgatgttgtagtgaaggctaagatattggtggatttgtatcatttaggattattccaaatacacttggcctcagattttgctccttctcacatgcatggtagtgtgcacagccgtcacacacagaaccctccagactctttggctaagaaacttttccttctgtgaaactttgttacctccttgccacgattgtgccttttttattaaggaagcatgttagccaaacaccatttcttttttttttttgcctgtataactatattgtgtgatttgccaccttgtccttgtcttttccaatttgatgagttcaagaagcatatactgtggctgcttacttattaagacagaatctcatgtagcccaggctactctcaaactggctatattagcctaagactatcttgaacagattttttcatcttcattctcaaaaggtgagggtacaggtatgcaccactctgctgacttaaagtagcatccattatacaaaattcatttttgtggcattggggattaaaactagggtctcacgggtgctaggcaactgctctaccacaaagctatactttctggcccttgtggcccattattagacataaagtatgaggcattacaatggcatagttactccttcttccctggccaggctccttttatcttacttatcttacttttgcctttaagaaaaagtatttagagctgggcgtggttgcgcacgcttttaatcccagcactcgggaggcagaggcaggcagatttctgagttcgaggccagcctggtctacaaagtgagttctagggcagccagggctgtacaaagaaaccctgtcttgaaaaaaggaaagaaaatgnnnnnnnnnnnnnnnnnnnnnnnnnnnnnnnnnnnnnnnnnnnnnnnnnnnnnnnnnnnnnnnnnnnnnnnnnnnnnnnnnnnnnnnnnnnnnnnnnnnnnnnnnnnnnnnnnnnnnnnnnnnnnnnnnnnnnnnnnnnnnnnnnnnnnnnnnnnnnnnnnnnnnnnnnnnnnnnnnnnnnnnnnnnnnnnnnnnnnnnnnnnnnnnnnnnnnnnnnnnnnnnnnnnnnnnnnnnnnnnnnnnnnnnnnnnnnnnnnnnnccaccatgtggttgctgggaattgaactcaggaacctctgagaagaatagtcagtgctcttaactgctgagccatctctctagccctacttttgcctcttcattattgcatctctgatcatttctgtttgctttctggtcctgcttcttggaagtgctttctaacctaaagcaattgaaaatagcacacaactttcccctaaataactggcttttgttttttgtgttatatgaatttcaagtgtgtgctctcatatgtgtgtgtgtgtgtgtgtgtgtgtgtgtttatcatccttccttgaataggaccttattgtccagtcacagcatctataccaacaatatgaatagcctgtagttctctcacgtatagtgagagaaaagattttcttagatgtcacactcagacctgaagctagaagcatgtgaatctgtccaaggccaagagcagttctcaatatccagcaggtgttcagctgtcatggtccaggcagaggtaacactttcctttccatgtatcctcctacctctcgacccttaaaatccagaatagtggtctagcctagcaagggtcttatgattagggagtgaagcctgaaaccagcccctggtacattttgctagacggaaaggcttagcagcttggaagccatttcatgacagttatacaaaggagtaaagaaataggcagagaacagctaccagcctgtctacttggggcccagctggaaagtgatggctggctgtgtgttgtttgataaggtcctcttatctctggttagtcattgggagtggagggctctggcctctctgtctccagcttgttgactattttctttctagagaagctgtatagagattatccataatcccccattcccgcatttacaaatgccctttagagattcttctgggaaacagctagccttgcctggggtgctccatggtctctgttgttgagacctcccgtgggttccaatgtatctaaagctgctctagtgtaccagagacagggtcacatagtttatcctcatctatttgctgacagtccctccagggaccttcatctttcttaaacaaacttggaggataagaaggtcaacttctgataatacagattgctgagaaacgctatcacagggagaagttatcttataagttctttaagcccatgttagtcatttcatcaaactttctgccatcttacatgtaaaagaaaagtaaagatggtttcttcattgtctaccgtctctaggtgttactagactttgtgttatacgatggatctgctttctaattcccccagggctccaatgagttgaacgaaactctcttacaaagaataaacagcgccaaaaaaatccacttggttccatgtcgtctccgagacaagtttgtgctacgctttgctgtgtgcgctcgcactgtggagtctgcccacgtgcagctggcctgggaacacatcagtgatctagcaagcagtgtgctgagggcagagaaagaatgaaagcagagctgcttcaggtaagctagctgcaccagggacatctgtttccttgtggaggcatcaggattccagctcagtcccagcatggccacttagtgctgagtggctgtgcagtgaggaagagaaaactatcatagtcagtcaggagtggcagaaagaatgttatgtgccatgattctacagagtgaatttgtattcatttctgtgggcttatatacaatagtgtatagatcttgctgtatactttcccttcagatttccccaaacagcactgaccaaagcaactatccaaataagctttagctacatgaaaacagtaaatgggattttcatgtgaccgtcaggaaagacccaaagtgcgatggtaaggaagggcaggcaggcttctgtgctgcttatcagagaggaagaatcacagccagagtaatttataaaatttatcactagagatgttagattggtaacatgaactcttttgttaaaatgatctattgtattggacactgcagaaacagtgtattccttctctgaagtcagtttagaagtacagaaaattctaatttttattattttatttttgtttctgtagtatcgggaaaggaacaaggatcttggccttctaggcaggtgcactactactgagctacattgccagctctccttatttctaagttagcctctaagttcttgctattttttttctcccatagagatcaaaagttgaaaagaagtttatctgaaaactggaaagagaaaaataactaccactccgtcttcgtgaaatcatgattacatgtggcgtcatgtgtgtctccaacattaaccagaaacctctgactgactttttggtgacttatcaatgaagaaatattttctgtattgtccagggaaaagtattttctgtgtggaaagctattgtcagtggctctagcttctgttctttgtgtggccgtgacttctgttgataataagatgtctttgtgctcataaggtcattggtggcaggataggcttatagaaatagtttccagggcagtctttggtcttaccttcagagtatatctatggctgttaacttatcctctgtgtggctaaatactaaataaacaacctatgtgcaatactaactgtattgagtaagcgtcttgttttacactgtatcagactcattcttgtgaacttgactaaccctttcagacacttggtcatcatgtgtttaatgaaagcctggtatatgtcagtcactattcagaatcattaacaacactcaagttctgcttagatttcatgagttcaatttctaggtatttactcaaataatctctgatctttatatggaatgattctgattttagaaaaatgttatttttttgtagatttatttttaattgtgtgtgtatatgtgtgtgcgtgtgtgcatgttgcacaaggaggccagaagaggccattctatcctctagagctacagttataggcaattataacccttctaattgtgggtgctaaaaaccaagtgggttttctacaagaccagtgtgcactcttagctacttagccatctccgcagtcccagcataagtgtattttggtcctttggagactttagaattgtcaacggcattcacatgaggtccttgtgttactaacaggtatggtcgtttatatggagtatccacttgataggatctagaatcgtcgaggagacatgcctccagggaatttctaatttaggttgcatatggccacactctgagagattatattgattatgttacttgaggtggtgaaaatcagccccccggtggcatcttcccttgggcttggatcctagactgcataaatgggaggtaggggttatctaaacgttctgaatctttagggaatagagtctaagatctcagcttatgttcaaacccaggaagggtacagtcttgtctaactacggctcatttttagtgcatccactgtcttattagagtttctagtgctatgataaaacaccacgatcaaaagcaactagagaaggaaagggttgatttggctcccacttccacatcacagcccatcaatgaaagaagtcaaggaagtactcaaggcaggacctgatgaagagggcatggggtaatgttgttttactcagtttgctttcttacagtaatgaggccacatcagtccaggggtggcactgcctatagtgaggccagtcttcccatataaatcttcaatcaagaaaatgtcccacaggtcaatctagtgagagcattttcctcttcccaaatgactctagctttgtgtcaagttgctagcagcacatcccatcttcttggcctttcttcaacatggtgctcagacaccaaaacacccagccctagaaacaggaagaagcgcttcctcccagttaacaaaatcatacacccgcacttactctatgccaggtgctgctatccacatttaaaaatagcaactcaatacctatttaaaaaattccatagctgggcgtggtggcgcacgcctttaatcccagcactcgggaggcagaggcaggcggatttctgagttcgaggccagcctggtctacaaagtgagttccaggacagccagggctatacagagaaaccctgtctcgaaaaacaaaaaacaaacaaacaaaaaaaaaaaaaaaaaaaaggaaaaattctatgaggtaagctgcatggcagtggggggtggggggtgggggttgggatttggtgcttatgggacaagatccatttatcttcctgggtaaaccttgcctttgatcccaactatacattattcagatagaagtcagtattccaaagccaggcaggcatagtgctttagtgctttactgcttccagtgcttagaagccagaggcaggtgggcagatctcttgagttcaaggccaccttgacctataaagcgagttccaggacagtcaaggctacacacagaaaccttgtcttgaaaaatcaaaaccaaccaaacaaaagcgaattgagaatgccgggacgcgtagcaagtgcatttaaatctgtgcctactgcagttgctcactggagcacagtgacctctggtggcagtgatgcgtgatgctagacctcaggttttcactgattccaggcacttcaacctggagctgagaaagccctagacttatctggacacagcagacagccaacaaaaggcttatcctggaacatctcttgtttagaacgtagcagagaaaaggcttcctggaactggagatccaagtcaggctgactgaatacgagtcagcacacagaaaaggccgagatagaaggacctgggaaagggatataggacaagaccccaaggcaaggcaggattgaacttttaacattgattgaatccaatcaatggcataaactcaaaaatggtattactggtattctactcagaaagttcacatttgaggaaacatggtacttacccaatagcattttggcctaatgattgctgtattaatttttttaaatgaataatataaattcccaaatattaatagtgtttacttctttggtatcaaaatctgtttcttgagcacttctctctgtgtgccataacctacccttgtaaaaagtaatgggaaaaacaatacaaaattactagcaaagtaagttgcttgcataaactggtaatatttgaaaaggtctttttaaagaaacttgtgttgttccccaaagcagacatgcaataaacagtcacaagaagaattatggcatgaccccatagcctgttcaaactagaagcagaagagtccacacatggaccagtttttcctaaacacagcaaattcacagcagccagaggccaaactacctcagcttgactaagtctgctctaacctcacaagagaaatgagctgaagtgagctgaatcaacctgtcagctcctttccgacaggctcggctccctgcgttacgaagctcacccttctgttcctgcccagtaccggctcttgttctgttttgtagagtgaaggttgccccgttcgggaatataaaggctaacgagaactttgtcagacttgttaaaattctgcctctggtcgtaggggagagcaccgtctaatgaaaacttttcattaggactgtatgttccattcatgttagactgtatatccgaggaatggctggctacatctccaatcttcacgggtcctctttcaccaaggcatgtttgaagtggatttcaggatccaactgtactcggggaatctcagaaaaagagacagatttaattttgtcccatcttctttcctatctctacaacagcccacttctcacattgcttacaaacatagtttttttttttcttccctgagacagggtttccctggctgtcctggaactcactttgtagacctctggcctcgaactcagaaatctgcctgcctctgcctcccgagtgctgggattaaaggcgtgtgccaccatgcccggccaaacacagttttataaacacttattattgtgtgtttgtggggaaaggacatgtgcctagaagtcaaaggacaactgtgtggagttgttttgaatccttccactttttcgtgggttctggaagccacactaaggccaccaaggttgcacaggaaataaatacctttacctgagacatcttgctagcttacaaacacaatttttctggcagaggatgcatattatttgggatcattttattttctctgatcaaaacaaattagccagctgaactgtaacaagcattgtctgagattatggttataaactcataaatacataaacaagaagaagctctcccaccaaggaccagttctgtctgcttaggtggcaatttctttcttgcaggtccaataacttctgaccatgaaaatagagtctatcaaaagcagtttgtgttctcggtcagcaagtttactacttgcatagcttaagccttaaactcttccacagtagacactgggttgtgagcctaacaaagccaatttaaaaaagacggacgccagagaataatgttgctttttgcaggattcctggtcttataaaaaaataattaaaacaaaacaaaacccagactcagtaggaaaccgaaaggcaattttgaatttaggggaaaaataagacaagctagacatgttggcagcctctggaggaggcagacggataaggggaaaagagaccatgcttttggagttaaaggtcagaaaggcaggcaggctcaacaatgcaggcctgggaatggctgcatgggtaaggaaggtcttcagcctgattaaaaatgcccagagccgtagagcaagcagggttaggagtgttggtcagtatttgaaggagataggatgaataaaagaaaagtacagttttcccagtgaaaacaggcaggcttagcgatgagggttgtagacaaagaaaccaaaaaaaaaaaaaaaaaaccacccaacaacccagcacagcccccctcctctcccctctctgacaatcagctcccgactgcttggagcctgacccaatggcttgttatgcctatacaaacaattaagaacctaacccttggtgacctctccccaaattgcaagccgtcttggttggtaatagagaggtgggggtggggtgaggtggggcccaaagctatgaggggaaagttccctcggtgactccaggactgtccatgttttagctacctacgattagtttttttaaaaaaaaaaaaaaaaaaaagctcttcagttcttactggacccctgccagctactacttcggtaatctcggtattccgtctaatgctggctgtagcctttgctaaaccttcctgtattcgagtctcactatttgatagctgctgctgaactggttaaggccggagggcgccggggcgggcaggctctggagtggcggcccggaggctacacctccccttccccctcccgggccgctttcgccctcccaggggactcgtgctctctacactcctgagctttctttcctctctcactgcctctgcctaggtgcctttgcagcacctagctcggcaaaaagaacatattaaggctgcagtgaacgggaagccaagggtttgcttagatttatcgccaccgcgcgggctaaatctccctcatagagcgcgggccggaaacccaaattcccgcgttaaggcctgggcggtgacctcaggccttccgagactccgccctcacgctgcgtgcagcgcgcgctcagccgcccttactctacacgcatgcgcaacgcgggccgagccgtcacttcgcgcaggcgcacttcgaaaggcgcgcttttcggtggctgcggtcccggcagggagcacaggtgggccccggtaggctgctgttcgccgctaagccggcgggcggaggctgtggttgccatgccgggtgtactttggttttgttttcttctgtccgttcttggcctcgggttgtcggagagggtggccttgggaagcccgcggccagacggcggctggggctgagggacgccgttgggcgtgacggtttggggtcagtcagccacagctaccccccgctaggactgctgggaatgctgtagctggtttgccacctaaatgtactcattttgagtttcgtgctttcggcaatactaacacaggtgaattttctccgaaaatcagaaatgctccagcatctgaacttgacgcctaaaataacatcctcatcatgaaactttttttttttttttaaattcattcctgctcagaaaatagtatctacagttaaccgtctggttatgtagctaatgtatattttaagtatacgtgagttgtatttagaatggagtcccctacctgatgtatgtgtcaatacctagaaatcagacacactcctgaccccgagcagttggactaaagatacttttcagttgtgataactggttccaggccatacgcagtcgctacggcctgaggggggaaccttccaaagggaagaaataataattcataatctatcatatttctaagttctggggaccctataatgcaacaacctgtcagctaaataatggtgcacgctgtttctccccaggtgacgacatagcttaagagatattctcagagtcactgctgaaagaacagattatgtattcagaattcagggcctgggaaatggcttagtgggtcaaagctgccgaacctgaggacctgaatccctaagaactgtcctggtaaaaagagaaaattcagttcctgcaagttgctctcagacttccccaatttattacaattaattaaaacttttatgtccagtgtctaaagctaggtcttacagcttcagatcctgtgttctaaattcctatgctactttgccactagtaaactagagttctgtaaagttcaaaaatgatgtctggaatatagtaggccctccagtttttaatcattttagtggataccatgaactacgtactaaagaaaatctaaatacaatgagaagtagttcttgtttgcagaagcttcctgtctagtttgaatgaccaaaacattcttaatcagaaaattaacaaagtaaagaaaattgaaatgtaactcggttgcccatactttatagatttctatcaagcacaaaggttaaaatgacttagaagtgttagataatacggtcagtacttgtgtcattgagcaacagactgttttgggttgtatgtagttgtgggatatgactgactggaaaggaaggaaaacttggtcgataacttctaaatacaaagatggtggtggaagaggacagtttttggagaatgactagaataggtgattttaggtgatagactgaaatgaagctataaagataattataatcattgcgaacctttgtggaggatattttccaagttacttctccttcaggttctttttttttttgagacagggtttctctgtgtaaccctggctgtcctggaactcactctgtagaccaggctggcctcgaactcagaaatccacctgcctctgcctctgcctcccgagtgctgggattcaaggcgtgcgccaccatgcctggcttccttcaggttcttatttctggtgttgtataatggagagtaaaataaggttaaagcagatgaaagcagggctacttacttgcctcagaactgttgatccagtttcaatttaagtaacagtttgactagatgttaagtttcccattattataagcagagatgtatgcttacctacttataatgtggtaaattttttccacagcattgtcagagataatagctatattaaccaggagtggttacccttttactcccggtgcttcagaggcagaaacaggtgaatctcagaaacaggtgaggttgaggccagcctggtctacagagtgagttccagggcagccagggtacacagagtaaccctttctcaaaaacctaccaccatcaccaccatcaaagctgtattaaatatagctcacatagaaagtattgattatttagctgtacttccagataaatagaaattaaatttaaaatgtagatattcttttgctttatcatagttcttagggaaccaaatggttttcttaaaattttttcatcttagtatctaggcaaaaagttgtacattacaaaagtagttttttcattatttagtggtaggttgggcacatttgtgtcaagctgtgcatgtggatggcaggggactgctttcaggaaccacgtaggcctgagaacttaacttggcaggcctgtgctaagctctctccttggccccattgtatatttccctaagattctttacaacaatgtgaaggggcttatgagactatctcaggaaaaatctgaaataaaacccctatctagtagactatttggcttattcttagagtttattttttataggttttaatttttaacactgagaaatgggggaaaatttggaagatttgtgccatcatgtttcaagtgtttattcacgataaatcattaaagatatgaaacatgtcaccatctttctgttccatgcagctcatcctgtgctgataacatcgagaagtgttcagtgcctggtaaagtacatagaccttgcttcacttggaactcggccttgatttctgccgttggtcataatcagcagagttctctctagtgagtcagttctttaactctctcagctcaatttccacatttgtatagcaggggtacaagtcttcaaatcattttcataatcacctgatttgattctcacaatggttccttcagaaaaatatgaacatccaaaaattgtaagtggcttgcataatattatctgatttttcttagaaaacagccttaagatttaaagtttcattatggcatcttcatacttagttttgacctgttcccctcagtgctgcctcctacccacctaccctttcccttgttccttccctcactagcccctcttgccttcctgttacctgtcccattgccctatttccctcctccctaaggatgtctacctcctctcatgaccaccttttgtttccatggtctacaaaatacatacgtaaatgcacacacacacacaacacacacacacacacaatttctaacgctttgtaccttcttattacgtgagtcattgctctatttctcaacttcctaaaaatcacaacctcttctcatgatccccttctagttctgacctacaaacacatataaatgtgtatgcacataaaatctctaaatctagattttgcattctgaatgtcttattttgcatagcgtaagattttcagttgcattgatttactgcaaatgtcaggatttcatttttctttctttttttttttttttttatggttttcgaggcagggtttctctgtatagctctggctgtcctggaactcactttgtagaccaggctggcctcgaactcagaaatccgcctgcctctgcctcccgagtgctgggattaaaggcgtgcgccaccacgcccggctcatttttctttttgactgcatagaacttcattatgtatttatatgtcatcattgatgtacattgaagttgttttgttttatggctgctgtaagtactatagttataaacatggatacactagcatttctgtggtgcgtggacttagaattcttggagtatatacccaagagtacaatattcagttttttttgagcagcatttacattgatttttctagtggccaaacaaattagcatttccacccccagggaataagggtttctctttccctatatccttgacagcatttgttttgttgatgacaactattctgactgggaaatagaatctcaaggcagttttaatttgcatttccccatgactaagaatgttgaacacttgtgcaagtatttattagctgtatttcttttgagaactggttagttcattagcacagtttttgattggaagattgagggatcgttttttcagttttttatatattcagaagggtatgtgtgtgtgtgtgtgctaatgagtgtgtacattgtggccaaaagaaggtgtcagatcctctagagctggagtcacgggtggttgtgagtagtcatgtggttgccctgtcctctacaagaacagcaagtgctcttaactgctgagccatctctccagccgccttcacatttttgtagaatcttgtaactggtctggggtcatagcttagtcttagtgaagtgcttgctgtacaagcataaaaatgaaagtttgatccccagagcctatataagatatctggctgggaggtggtggcacacgcctttaatcccagcacttgggaggcagaggcagacggatttctgagttctaggccagcctggcatacagagtgagtctcaggacagccagggctacacagagaaaccctgtcttgaaaacaaaacaaaacaaaacaaaacaaaaaaagaaatctggacaggaaatatggtggcacatacttgtaatcatgctgtggaggacaggctggtccttggtgtttactgtccaatcaacctgtagcctacttggtgagctcccattcagggagagacctgtctccaaaaccagagtggacagtgcttgaggaatcatcttctccaccccacaggaggatattttggttctcttgtatttagtaagacat

SEQ ID NO: 1374 - DNA, 2046 bp, Mus musculus
ccgaagctctgggtaaataatgcagagaaagctgctgattggcttcgggaggcggacactttgtctacataaatggcaatcgcatcctctgtgtcttttaactgtcaccaaggagagagagagagcaagagagcgaatagagaggaggcgactccagctgcctttttcaacatggattcccgtgaattccggaggagaggcaaggagatggtggattatatagctgactatctggatggcattgagggtcgtccagtgtaccctgatgtggagcctggctatcttcggcccctgatccctgccactgccccccaggagccagaaacatacgaggacataatcaaagacatcgagaagataatcatgccaggggtgacacactggcacagtccctatttcttcgcttacttccccacggctagctcatacccagctatgcttgcagacatgctgtgtggtgctattggctgcattggtttctcctgggctgcaagcccagcgtgcacagagctggagaccgtgatgatggactggctggggaagatgctggagctgccagaggcctttttggctggaagagctggggaagggggaggagtgatccagggaagtgccagtgaagccaccttggtggccctactggctgctcggactaaagttatccgccagctgcaggcagcctccccagagttcacacaagctgctatcatggaaaagctggttgcttacacatctgatcaggcgcattcctctgtagaaagagctgggttaattggtggaataaagctaaaagcagtcccttcggatggcaacttttccatgagagcttctgcccttcgggaagccctggagcgggacaaggcagctggcctgattccattctttgtggtcgctacactggggaccacatcctgctgttcttttgacaatctcctggaagtgggtcccatctgcaaccaggagggtgtgtggctgcacattgacgctgcttacgcgggcagtgcctttatctgtcctgaattccggtatcttctgaatggtgtggagtttgcagattcctttaactttaatccccacaagtggcttttggtgaactttgactgctctgccatgtgggtgaagaggaggactgacttaaccggagcctttaatatggaccctgtttatctaaagcacagtcaccaggactcaggattcatcactgactacaggcactggcagatcccactggggcgacgatttcgctctttgaaaatgtggtttgtttttagaatgtacggagtcaaggggctgcaggcttacatccgaaagcacgtggagctgtctcatgagtttgagtcactggtacgccaggaccctcgctttgaaatttgcacagaagtcattcttgggttggtctgcttccggctaaagggctccaatgagttgaacgaaactctcttacaaagaataaacagcgccaaaaaaatccacttggttccatgtcgtctccgagacaagtttgtgctacgctttgctgtgtgcgctcgcactgtggagtctgcccacgtgcagctggcctgggaacacatcagtgatctagcaagcagtgtgctgagggcagagaaagaatgaaagcagagctgcttcagagatcaaaagttgaaaagaagtttatctgaaaactggaaagagaaaaataactaccactccgtcttcgtgaaatcatgattacatgtggcgtcatgtgtgtctccaacattaaccagaaacctctgactgactttttggtgacttatcaatgaagaaatattttctgtattgtccagggaaaagtattttctgtgtggaaagctattgtcagtggctctagcttctgttctttgtgtggccgtgacttctgttgataataagatgtctttgtgctcataaggtcattggtggcaggataggcttatagaaatagtttccagggcagtctttggtcttaccttcagagtatatctatggctgttaacttatcctctgtgtggctaaatactaaataaacaacctatgtgcaatact

SEQ ID NO: 1375 - protein, 505 aa, Mus musculus
MAIASSVSFNCHQGERESKRANREEATPAAFFNMDSREFRRRGKEMVDYIADYLDGIEGRPVYPDVEPGYLRPLIPATAPQEPETYEDIIKDIEKIIMPGVTHWHSPYFFAYFPTASSYPAMLADMLCGAIGCIGFSWADACTELETVMMDWLGKMLELPEAFLAGRAGEGGGVIQGSASEATLVLAARTKVIRQLQADEFTQAAIMEKLVAYTSDQAHSSVERAGLIGGIKLKAVPSDGNFSMRASALREALERDKAAGLIPFFVVATLGTTSCCSFDNLLEVGPICNQEGVWLHIDAAYAGSAFICPEFRYLLNGVEFADSFNFNPHKWLLVNFDCSAMWVKRRTDLTGAFNMDPVYLKHSHQDSGFITDYRHWQIPLGRRFRSLKMWFVFRMYGVKGLQAYIRKHVELSHEFESLVRQDPRFEICTEVILGLVCFRLKGSNELNETLLQRINSAKKIHLVPCRLRDKFVLRFAVCARTVESAHVQLAWEHDLASSVLRAEKE

SEQ ID NO: 1376 - DNA, 126988 bp, Homo sapiens
aagtgacagggagaatggaaccaagttggaaaacactctgcaggatattatccaggagaacttccccactctagcaaggcaggccaacattcaaattcaggaaatacagggaaaaccacaaagatactcctcgagaagagcaactccaagacacataattgtcagattcaccaaagttgaaacgaaggaaaaaatgttaagggcagccagagagaaaagtcgggttacccacaaagggaagcccatcagactaacagctgatctctcggcaggaactctacaagccagaagaaagtgggggccaatattcaacatccttaaagaaaagaattttcaacccagaatttcatatccagccaaactgcactttgtaagtgaaggggaaataaaatcctttacagacaagcaaatactgagagattttgtcaccaccaggcctgccctacaagagctgctgaaggaagcactaaacatggaaaggaataaccaataccagccactgcaaaaacatgccaaattgtaaagaccatcgaggctaggaagaaactgcatcagctaatgagcaaaataaccagctaatatcatagtgacaggatcaaattcacacataataatattaaccttaaatgtaaatgggctaaatgctccaattaaaagacacagactggcaaattggataaagagtcaagacccatcagtgtgctatattcaggaaacccatctcacgtccagagacacacataggctcaaaataaagggatggaggaagatctaacaagcaaatggaaaacaaaaaaaggcaggggttgcaatcctagtctcagataaaacagactttaaaccaacaaagatcaaaagagacaaagaaggccattacataatggtaaagggatcaattcaacaagaagagctaagtatcctaaacatatatgcacccaatacaggagcacccagattcataaagcaagtccttagagacctacaaagagacttagactcccacacaataataatgggagaatttaacaccccactgtcaacattagacagatcaacgagacagaaagttaacaaggatatccaggaattgaactcagctctgcaccaagtggaactaatagacatctacagaactcttcatcccaaatcaacagaatatacattcttctcagcaccacagtgcacttattccaaaattgaccacatagttggaagtaaagcactcctcagcaaacgtaaaagaacagaaattataacaaactgtctctcggaccacagtgcaatcaaactagaactcaggattaagaaactcactcaaaactgctcaattacatggaaactgaacaacctgctcctgaatgactactgggtacataacgaaatgaaggcagaaataaagatgttctttgaaagcaacgagaacaaagacacagcataccagaatctctggaacacattcaaagcagtgtgtagagggaaattaatagcactaaatgcccacaagagaaagcaggaaagatttaaaattgacaccctaacatcacaattaaaagaactagagaagcaagagcaaacacattcaaaagctagcagaaggcaagaaataactaagatcagagcagaactgaaggaaatagagacacaaaaaacccttcaaaaaatcagtgaatccaggagctggttttttgaaaagatcaacaaacttgatagactgctagcaagactaataaaggagaaaagagagaagaatcaaatagatgcaataaaaaatgataaaggggtatcaccaccgatcccacagaaatacaaactaccatcagagaatactataaacacctctatgcaaataaactagaaaatctagaagaaatggataaattcctcggcacatacaccctcccaagactaaatcaggaagaagttgaatctctgagtagaccaataacaggctctgatattgaggcaataattaatagcttaccaaccaaaaaaagtccaggaccagatggattcacagccaaattctaccagaggtaaaaggaggagctggtaccattccttctgaaactattcccatcaatagaaaaagagggaatcctccctaactcattttatgaggccagcatcatcctgataccaaagcctggcagagacacaacaaaaaaagagaatttcagaccaatatccctgatgaacatagatgcaaaaatcctcaataaaatactggcaaactgaatccagcagcacatcaaaaagcttatccaccatgatcaagtgggcttcatccctgggatgcaaggctggttcaacatatggaaatcaataagcataatccagcatataaacagaaccaatgacaaaaaccatatgattatctcaatagatgcagaaaaggcctttgacaaaattcaacaacgctttatgctaaaaactctcaataaattaggtattgatgggatgtatctcaaaacaataagagctatctatgacaaacccacagccaatatcatactgaatgggcaaaaactggaagcattccctttgaaaactggcacaagacagggatgccctctctcaccactcctactcaacataatgttggaagttctggccagggcaatcaggcaggagaaggaaataaagggtattcaattaggaaaagaggaagtcaaattgtccctgtttgcagatgacatgattgtatatctagaaaaccccatcgtctcagcccaaaatcttcttaagctgataggcaatttcagcaaaatctcaggatacaaaatcaatgtgcaaaaatcacaagcattcttatacaccaatagcagacagagagccaaatcatgagtgaactcccattcacaattgcttcaaagacaataaaatacctaggaatccaacttataagggatgtgaaggacctcttcaaggagaactacaaaccaccgctcaatgaaataaaagaggatacaaagaaatggaagaacattccatgctcatgggtaggaagaatcagtatcgtgaaaatggccatactgcccaaggtaatttatagattcagtgccaaccccatcaagctaccaatggctttcttcacagaattggaaaaaactactttaaagttcatatggaaccaaaaaagagcccgcattgccaagtcaatcctaagccaaaagaacaaagctggaggcatcatgctacctgacttcaaactatactacaaggctacaataaccaaaacagcatggtactgataccaaaacagagatatagaccaatgaaacagatcagagccctcagaaataatgccacatatctacaaccatctgatctttgacaaacctgacaaaaacaagaaatggggaaaggattccctatttaataaatggtgctgggaaaactggctagccatatgtagaaagctgaaactggatcccttccttacacttatacaaaaattaattcaagatggattacagacttaaacattagacctaaaaccataaaaaccctagaagaaaacctaggcaataccattcagaacataggcatgggcaaggacttcatgtctaaaacaccaaaagcaatggcaacaaaagccaaaattgacaaatgggatctaattaaattaaagagcttctgcacagtgaaagaaactactatcagagtgaacaggcaacctacagaatgggagaaaatttttgcaatctacacatctgacaaagggctaatatccagaatctacaatgaacccaaataaatttacaagaaaaaaacaaacaaccccatcaacaagaaggcgaaggatatgaacagacacttctcaaaagaagacatttatgcagccaaaaaacacatgaaaaaatgctcatcatcactggccatcagagaaatgcaaatcaaaaccacagtgagataccatctcacaccagttagaatggcgatcattaaaaagccaggaaacaacaggtgctggagagaatatggagaaataggaaaacttttacactgttggtgggactgtaaactagttcaaccattgtggaagtcagtgtggcgattcatcagggatctagaactagaaataccatttgacccagcaatcccattactgggtatatacccaaaggattataaatcatgctgctataaagacacatgcacatgtatgtttattgcatcactattcacaatagcaaagacttggaaccaacccaaatgtccaacaatgatagactggattaagaaaatgtggctcatatacaccatggaatattatgcagccataaaaaatgatgagttaatgtcctttgtagggacatggatgaagctggaaaccatcattctcagcaaactatctcaaggacaaaaaaccaaacaccgcatgttctcactcacaggtgggaattgaaaaatgagaacacatggacacaggaaggtgaacatcacacaccggggcctgttgtggggtggggagagtggggagggatagcatttggagatacacctaatgttaaatgacgagttactgggtgcagcaaaccaacatggcacatgtatacatatgtaactaacctgcacgttgtgcatgggtaccctaaaacttaaagtataataaaaaaaaaagagagacattttaaagctgggtgtccggaagcgacatcacatgtcggcaggttccatgatgccccctgagccgtaaaaccagcaagtttttattagcaattttcaaaggagagggagtgtacgaatagggtgtgggtcacaaaaatcacatgcttcatagggcaataaaagatcacaaggcagaaggtcaaggcgagatcacaaggtcagggagaaactagaattactagtgaagttccatgtcccactgtgcatgcattgtcattgataaacatcttaacagggttcaagagcagagaactggtctgactagaattcgccaggctggaatttcctaatcctagcaagcctaggggcactgcaggaggccagggcatgtttcatcccttatctgcaactgcataaagcagacaacccccccagagcagccattttagaggcccccctgggaatgcattcttttcccagggctgttaattatcaatattccttaccagggaaagaattcagtgatatttctcttacccattttcggtaataagagaaatatggctccgtcctgcctggctcccaggcagtcagacctaatggttatctcccttgttcccgaacattgctgttatcctgttcttttttcaaggtgcccagatttcatattgttcaaacacacatgctttacgatcagtgtgtgcagttaatgcaatcatcacagggtccggaggcaacatatatcctcagcttacaaagatgacagggttaagagattaaagtgaagataggcataggaaattataagagtagtgattggggaggtgataaatgtccatgaaatcttcccaatttatgttcttctgtcacggcttcagcaggtccctccgttcggggtccctgacttcccacaacatctttccctttctttttatataaatgtgctatggtgatgaaggcttgttcattctttcgattttgatgcaggattctttgactggtctggcacactaaagacaagtcaattaaacagagaaacctaattccaaattgcactaggctgtccccctgaaaagctgagtctttttcactacctggctagaaggcatatgagaaacggaagcaggaaattcacagaagaaaaactatacatgactatggaacatttcaatgtaatttttaaaattacatagaaaacataggcatagctagttgtccatgagttgccttgtctagctttttgtagtcattgattaatcctcactttcagatttcacaaatctcgacccactttatttttatagaatgagatcatctcttgatagaggcctttgcagtctgatcacaacctacagtaagaaatgcattctatattatgacccagtacacatattcctggacatcattgaaaggttcagaaagcaatattttcatcattaggtgcaatgtctcctgttttatattttattctgttctattgcattttttaaaatgctggtcatgagacctgcaaaacccattccatgacccaccaatagtctgaggccaatgatttgagacttttgagagaaaaacaaacttggaggactgacactgcccaacttaaagacttactacagccaggcgcagtggctcacgcctgtaatcccagcacttcgggaggccgaggtaggtggatcatttgaggtaaggagttcaagaccagcctggcaacatggtgaaaccccatctctactaaaaatacaaaaattagccaggcgtggtggtacatgcctgtaatctcagctactcgggaggctgaggcacaaaaattgcttgaacctaggaagtggaggttgcagtgcaccgagatagcgccactgcactccagcctgggcaacagagcgagactgtgtctcaaataagtaagtaaattaataagtaaatgaataaaagacttactacaaagctacagtagttaagaaagtgctattggtaaaagaatagacagatgaatggaacagaatagagagctcagaaatagacccacacaaatatggtgaaatggtctttgacaaaggagtgaaggcaatacaatgaagaaaggataggctctttgacaaatggttgtggaataaatggacgtccacatgcaaaaaaaaaaaaagaatctagatctagacctttactcaaaatggttcatagacttaaaggtaacatgcaaaactataaaactcctagaggatgacacaagagaaaatctagtttagtttgatgatgaccttttagataaatcaccagtttcctccattaaatacaatctatggaggaaaaggactgatgaattggacttcattaaaataaaaaacttctacgctggaagaaaagaaaacagaattgatattctcaccagctcctaaacaaattggcttttccaggaaaactcagttcccctgacactcctgtctgtgggcttggccagagtgtgggcatagcagtagagctcctctctcttcacccatggcctcagcaaagcccccagtgcccactttgctctggcacacagtggtctcagcaggaagccccgtctcttctgctcccaggagccacactcaggtgcactgtgaatctctttcacagtcacgtctgcacctgcagtctccctcctgcaacatgcacactgttgcgactgactgcaggccactctggcatcatgagagatggccgttgctgctcctgtggaagagcagactcaccctcttccaggaacagccttggctgcaacccatgctaccttcccctgccctggggcattacaaggtcacacgagatcagcctttctcaaccaggggcaattttgccaccaggaaacatgcaatgcctggagacattcttggttgtcacaactggggactactggcacctaatgagtaaaagccggatgctgctaaacattctataatgcacaggacagctcccatcacagagaattatacacccttaatgtaatagtgctgggatggttaatgttatgtgtcgactgaagtgggctaagagatgcccagagggccagtaaagcaggatttctggttgtgttcatgagggtgtttctggaagagattggcattggaatctccagaaagtaaacaagatccatcctcaccagtgtgggctggtaacatccagtttgttgagtgccagaatagaacaaaaaggtggatgaagggcaaattctttctcttcttgagctgggatatccatcttctcctgctcttgggccttcaaactcaggatgaattacaccaccagcttatctagttctccggcctgtagatggaagactgtgggacttcccagcctccataatcacatgagccaatttctacaataaatctcttcttatattcctatatccatatcctattatttccagttttctggagaaacctgactgataaagtgccatggttgggaaatcctgccctagatttctttctttggtcctcgaagcctcacccctattccccataaatcccacacctgcaagaagaaaggaaatgtaaaaagagtcccttctgggaacggatgctgattcctatgtagatttctctattgagagataactgttgctcagtagttggacactactagttcacttttttgaggatttcaaaactgaggtctctcttctctatggatgttttttttccagtcctattgcttcaaatatcatctaaacactttcaacccataactttatttcctgtctgggcctcttttctgagctgtactggacatctcaaatcacacgatttgtggatatctgaaatttaattcccaaactgaatccttggtgtccttcacctccccacacccaatactggtccaccccagtcttcttcctctcagtctatgaccgtcatcccctgcccactggcttcatcactgggtagtcgttccatccccttgactcctccccttgtccagcaacctcctaacatgcacacacacacacgcacttatggggaatattagcacgcttcttcatctcaagccccccctccctcccccagcccatctcctagaatggattcacttgaattcactcctggtttgcaggaaagtgcagaaatccaaggaatgtggtgggaattggtggtccaacttaaagggtctaaccctttcacccttatctccctctgatccattttctaccccagagccagagtgatcttaaaccataagtaagctaaggttactgctttctagaaacacttcaatgccttctattacagttggggggatacaaattacgtaacgtggcttgcaagactccccctcccctactttgaatggtccttaggagttggccttctgtcagggcctgggagatgccgagcttgatcctcagtaactttgcagaggctgttccctctttggagcccttccctcactcttccccttaccaaggacaatcacttcttcggttctcagctcctgtgagaccccaggcgggagcatttgggtgtgcgtcattggagggctcacttgccattctttctcttttccctctttcctccaatggctcctgtggaggttttgagactcctcaatgtcactctgcttctctctccagttccagtcctaacaataggaaccctaggtgccccgccccagcctgctccagtcccctaggatagagcaaggagagctcttccctgcatctagcctgtgacaaatggctctagtgacagccctctctgccttgtttccagtcctttaatgagctgcccgcagccagcctcactctcactctgctcttcacacccactgagccccacgcttggagctgctggggtctgccagaaagaccagctcctaagatccctgcaggctgtgcctgctcaacttctcaatgtggctttctcagccctgctttgtgctctcataaaattctatcgactttggggtttttttataaatttgtccaaattccactcagagtattgtttcatgcatctcaactatgattttgatgggtttggggaaggaaggtgagttcctgggttctgctgatatctgaacctggaaatcttacccatattgctgagtgctgcaccgggaagtgcaggcttactttggggctgccttcaggggcaggaggctgtgtgcaatgcaggcatcacctggtgcagggctggaacatatcagatgacttaatgggctccaaacttgaaatcagggctgcttagtaaaagatgggatgtatgtagaattacataagaaagatccaagcttccaggatttggaatgaaacagtctcttcagaatgtgctctcaggattcccagaggcgagctatttctcaagatttccttgacctttgtcaccatcaggaattaatgtttaactggcacatgtggctggaaatgcaagaagagggaaacgtgtggcttggagtttcaagaagagtgactgtctcagtgccgagtgcctcagcagcttctccacatgctcttcagtccccaaagttggagaatcccatcaaggagagtagccctgtaaggaattcgaatttccagcatgtaagtctctgattttatacctactcagattgtagtagtggaaaacagcaacatgtaccttgactctctggccccatgttactgaacatttgcttaaaggttaactcacttgagggagcttgtgtggtgctttctcttctgctgcaggctggcaggggtttttgttcagtgggggctgtgcacttggtggctctccatgcacacacagtcactccagtgacacatgtttgataggtgctgggaatgatttcatgactggctcagtagcaaatgcgggccagatgtgattctattttttccatgcaccaccagggatggtgttgggtattttattcccccagcctctgtttcttctgtaaatgaggattttcttagtatctaccttgtgaggattaaatcccatgattttatggaggtgattagtaaatgtgaactctgcccttccctttataacatctgaggctccgtcagggctctctccttttggtgtatgttatagtttacttagaggtcaatttggtgtctacctatgcagtgtgatttgaggagaattagaagatctttcccaccaacttgccatgctgagtacaattcccatctgaaaacatatgcggataggaatttctattgggagaattgttcggttatcgacttcaaggagtcgaagttctcctggttttaagtctgttgtcggaagtatataagaatcaaagcttaatcgatggaaatcattgctctccatcatgcgtgagttaaaaccattacttctgagtggtcagtttacattgggctctgtctagaaggtttgccttcttcacctccagtcacatccccatttcacaagtgagcaaacagccagaggaggggaggaggatggcataagatcttgcagctggcagagacgaaatgtgaatgtagcccgtttgcacttggtgctgtcgggcagccaagcaatccagtgtgtaggtccagggcgacaagcgctgctcccgtggctggggtaagtccctccagcattcagccttgctccctgtgcttatctggatgcggtgtaggatgaagatgaccctatagaactctaccctggaagtcctggcaaagtggatatgtgacatttttgaaaccagggacatgttggtgctgcttaatatttaaatcataattttcagactcttaaaaattactaaataagtttgaagagacacagccatctgcctacagtgccacccctgagcttcacgccaccctggtctccaggaaaggggagagtctcaggaatattgaatgcaggtaagatgtggaagaagagcggagttttcacattttaacaaggtcaattgagtaatcaactcaataaataaataaattattatataaaatgagggctgggtgctgtggctcacgcctgtaatcccagcatttggggaggctaaggcgggcagatcacttgtgctcaggagtttgagaccagcctgggcaacatggtgagacctcatttccaataaaaatacaaaaattagccaggtgtggtggcatgcacctgtagtcccagctacttacgaggctgaggcaggataatcacttgagcgtgggaggcggaggttgcggtgagccgagatcgagtcactgcacttcagcctgggtgacagagtgagactctgtctcaagaaataataataataataaaataaaattatgaaagttttactctgccaagaatatgttgcagttttaaagatacatagagccttaaatatataaagaaaatcttggttcaactatggagagaaatcaacaaatccaccatctttaccaattatagtaaactggatgatagatttagcaaacaaaacattagtaaacatttagaaaatttcaaagacaaaagtaatcatcttgctttattggacatatatggaatcaaatacctaaaaattagaaaatacactttcttaagtgtcttaagtggcattatgcaaatgtcaacatctatcagagaactgctctcacaccaacatgttctctgactgcaattcaatccaattaattaaattagaattcaattaaaaaataagcaaatattgctatgtatgtctggactttttttttttttttttgagatggagtctcaccctgccacccaggctggagtgcagtggcacagtctcagctcgctgcaacttccacctctcaagttcaagcagttttcctgcctcagcctcctgagtagctggaattacaagtgcctgccactgtgcccagctcatttttgtatttttagtagaggtgggatttcatcatgctggccagggtggtctcgaactcctgacctcaggtgatgtgcccaccttggcctcccaaaggctgggattacaggcatgagccactgggcccggcagtctggacatttttttaatagctactgaataactcatgtatcaaagaaaaacaaaatagagattaaatactatttatacataaatgataataaaatatcagcacctcctcatacctgtgtccccctggtgtgtagcccaagccgtgtgcagggtgaagggcacacatccagggagcagtgcagccccagctccgccctgtaggagccctgtgctcagtcacccactgcagcccccaagctcctggccagtcctccctgaccagggctctttctcatgggtgcattgccaggggcaagaaagtgggagtctgtgttcctcaggacagaggagtttcagctcaagaagtgcctggctgtccagcttgacactgtcccctcccacagacctccaatgctcacggctggggcctgcctctcctctgtggtcatggctgaactcacagtgtttggggggatgagccaccttgctgctggcttctggctccccctggatggtgacgcttgggcagctcccatcttgccctctgtgcagatggggcctaatctccttactgcctccattgtccacgtggctgctgcctgcaggtccctgcacggctgctggagggagctgcttatgcacaggctgagaccaggatcccctcacttgtaccacctgccaggtccccgccctgcagcccctgcactcatggcatgttctgctgcctggaaggccgctgcctctgtcccagttccatggggatctctgctctagaggggtagcttcttccttgaaaagatgctgcttaaagtcagaggatggatggctctccttggggcatttctagctctggactgtgccacaagccctggatgtggtatgtgtatgtgtgtgtatgcatgcacttaggtatgtgtgtgtgtgcatgtgtgtgtggtatgcatgcatatatgcatgtgctattgtacgtgtgtagtgtgtataaacatgcatgcatgtatgcttgtgtatgtgtgtgcatgcataagtgtgcatggtgtgtgtgcatgtgtgtgtggtcggggcaggggcacctgcaggctgctcgtcatctgagtggaccctgttctccactcttcctcctctgcaaagcccaggcccctttcctagcttcacatgactctgcgtgcaccttcaggagaaacggagtcctgctccttctattgcacccatcaaccaggagtggggggagggggtggaggtggggaagatgatcctccctgttgctgccccatggtgggaggagagactgagcccaaaccatgttttagatgctgataggcttaagggtaacagcacaggagtttgagatgcatgcggctcaacacctaatctacatctcacttcactttctcatctggggaagtgggcttgggaccctgagcctcccgggtatcacagggtcctaatagtccctcacagaaggagcagacccagagtgagcactccccaaatgccacgccgtcccttcctcacccttggagtggagcctggtcgttctcaaagttgctgggagagtcccaggagccctggccccaaatctgcatcctacacagtgcctgggaacacagggcccattttttccttggcctctcgccagtcccagcaggccctgatgctcctctccatcctgctaggatggctctctccccctgggggcagagtgggggcaggaggtggtgggagggtggagggatgctgctcagtaaataatgcagagccggcagctctgattggcttcggggaggcagacactctgtctacataaatggcaatcacatcttctgtgcctcttaactgtcactgtggagaggagagagagaggacagagagcaagtcactcccggctgcctgtgagtactgctctttgtcctcatggctcacgcgtccagctctctggatggccgtgaccctggggtttggggtgggaggtttgccggttgattctagctgtgctgaattctcctcctgcaggaggaaggaggttcggctgacagggacagctgagcattcagtgtgtgcaggtgacacagggtttacaggaacttttcaagaaaataggcaccaacctaggtcggcttgcttttttgtgctatctgcaagcaacaggtcaggcagagaatctgaaactttggattgctttttaggccacattcctagagccatgacagcaacataactaagtgagtggaaattattttccagactggctcatgtgcatgtagagaccgtggaggccacacgatgggtgggaaagaaggaggctatgcagccccacagactcaggtttgcattcagatgcacacctccctggccgcctttccttcctcagacgtgaaggagaggagctaattaacagcatcctcccccagatcatagtaaaaaccaggtttgattttataaaggggcgggcacacaataggtgctcaataaatgagagctctattgtgaataagggaggaaagtgtgaggtcactgaaaatgctgctgagtggtctgctgcgccctccacagcctgttttcttcagtttccaagcgaaattcaggcaggtgacatgggttcttcccacaagcttgtttctctcttgaagactccaagggcgaggctccttgcgaaaatttctcattcagataagcagagtttcccctccaaaaggtgacaatcactgcacaaaagctggtcctctgttggtttgtcaagggtgccagagaaaaacactccttttgctgggggcaccggagtcctgctggcagcgtgcggtgaccccagactagaacacaggcatcctggatggctgaccacagagcaagttaaggggtgtctggatggttctgaaggaaacaaaatcaagccattctcagcagtttcttttcttcctgtcttctgggcacacgctaggtgggcgtctacacacagccagtgtgaagaaaataattaaaataaatcccccttaactccccttgccacaaattcaaagagatagcctgggggatctaattacttttgttttctgctcttcaagatgttgattattctgaaggttttactttcagacactcaacttgagtcagcagttaagtttagggaacggctctaggaaaaccacactatgcgggtattttaaaagaagtgttctgcggctgggcgcagtggctcacgcctgtaatcccaacactttgggaggctgaggcgagtggatcacctgaggtcgggagttcaagaccagcctggccaacatggtggaaccgtatctctactaaaaatacaaaaattagacaggcgtggttgtgcgtgcctatagtcccagttactcagggggctgaagcaggagaattgcttgaacccgggaggcggaggttgcagtgagctgagatcatgccattgcactgcagcctgggcaacagagcgagactctgtctccaaaaaaaaaaagaaaagaaatgttctgatgttttgtgtttatctggtgcttgttggcatttctggaggaagacattcagggagcccagaggcacctcgtgggcatatgggacagcgatgggcacaggacctcgtagaaaaggttagaatcccactgtgttgagagacagcagagggtcctggtcttctggtttgtacagaggcaagtgtgaaagccatttctgagctgtgcgggctgagaggagctccgtgcctgctgcatgcttccctcagcctcttcgcattgctgtaaaggggatcaggctgctactttgcagagctgatgtgaagtttaggaggatataggtaaagggcttacactgctgccctgtatatggcaactattcaacatttcttctgctttggaggaggtagaggagaggcacttctcttggggcatggagggcagcagagtttgttgagcctctgcctgtttctgttgggatcagcccaggtgggtggaggcagacgtgtgtctgcgggctcagcactcccacccgaagccacattcccctgttctctcatgtgcagtgaaccaggcaggagccctggaccacactctgggttgcaggcaccaccttccccatccccagtgagagccctgtttagagtcctgtggtctcatctctggccatggtgaggacacaggcagctgacagtggaggtgtaagtggattcccaggccaaaggtgtgttaggaaaatgctggcttcagaacaccagcacccactccttcacttactggctgtgtggctgtggtcaagttaaacagcaataactctactggcctggcagtgttgtgagcgtgttcagtgagataatgtataccacgagcttatcaggagcttgagcactgctgatttgtttggtttcttggacaataggatgtggcaaccaaagttcaacagattctcaggattttttcttggaggggggcacctcaagtgcaggcttcttagcaacaccaggccccaggccagcagctgttcaatatgaggaatagggaagcattcactgtgaatgtagaagtcaatatttaccaccaaattggctcataaggactccccaaagagtgtaccaaagcatactaaatagattcacagtgcaggtgtcctgtgtttgtaatagacggtaaaccaggacatgtcatgggcactggatattatgactatgatgaaaagaagcaaccaactagaacataattcgaattgtctcaagccaatagcaaaggcagatggttatgatctcttgtgaactattaatgtgactgcaagagaaagggggaaagaattgagaaaaaataagggaaaaaatttgtaagggggggggtgatttctgaaaagtttcttctgacataactcttcaataaaatgaaaacaaaggagaaaagttaaaattacctagtagttatcatataaactttcaaaattagcaaccatgaatgaaaataataaaatttgaatgttttaaggtttaaagttaaaatgtgaatgaaggagcaaagcttacagagatggagtgtctatgctcaatgcctgatggtgggtgacatttctgtatcattccagtttttcaaaaagaaattgacaacacgcaaaaagaactgtacaactcacatgtctcaattccactggggaattaatatctttgagagacagacccaataggtgcgacctatatggtgatggtggggtggcatctactcatgacggtgctgcccataacagcaaacagctaacaggcaaagtggggatggatggtgtcataggaacacggtgaaatccccactcagcagcccttaataagtgcaaataggagcgttatgttaaggaaattctgcaccttgtaattaggcataaaggaaaaatgtcaagtgaaaaaaggatccccagtcatacacacatcctcattccaactatttgaattgtctacggtcaggactaaaatggaataatatcaatcagtttcatgtccttggcattcttttttgtctttggaaattgctcaagttatgaatttttccagccagcattaactaaggtcacagcatggttacagagatatgagtggaagtagcatctttccatgggaggaaaactgaaaaccaagacaaacttctctatggctcctttccacggataattgttggccaagaatctactttgacagagcattgtttattaaacagggaatgaataagaaacagctgcacaaagctccttcctccttcatgtcagcagaggagcaaggctttcccctgaattttgatctttgtttgttgtagaaaatttctcccttttctcttatgctacctcaggagaagaggcttctgcctgtcttttgtagcatcaataataataattgctagacacaggtttacagtccaaagtgctctctgcctgcatgagcttgcggccccattttataagtaaagaaacagactcagagactccaagacgtcagccagcagctgcatgcctcttgccgcagagctatgggctcaagctgttttctctgaatgcaaatccaccattctttctattcttcatgaggaggaggaggaggaggactgtcctgtggaattgtagtgctgaaagcttagctccacttgattgtggcagttccattttccaacgcagaccaatctcgccaaggaggccagctgggcggagtgggacttaggacccagtgcaaagtcccttacaggagttcctttctggacagaaactcccttgagatgatggatttgattcctcctgaatttgcacaggtgtggagagtgaaatgctatgcttcgagcatctactttgtaattatcttgtactctcttcatggttttgtgtggtgcctaggatgatggccatggtacagattgcaagtggagctgcaatggagtggacgtgtgtgtttctcccaacattcctatgttgaaatccttgcctgcaatgtattaggaaataggaactttgagagatgattaggtcatgaagtcagagccctcatgaatggaatgagtaaccttataaaagagaccctagagagacccatcacccctttcaccatgtgaggacatagagagaaggctatgtctatgagaaacaagcctcaccagataccaaatctgccggggccttaatcttggacttccagcctcagaactctaagaaatcattgtctgttgtttataagctgcccagtctatagtactttttatagtagcccaaagggactaagatagggggcttggccacggtctcacctccagccaagagctgcccaaaccctttctctttctggttaccatttgtaacgaacatgatctataagcaaacaaggcaccgtggaagctgcggtgcccctgtggtcctcagtaggcattcgggaaatcattccttgcagccctaggagaaactggtattacaagtttctaatcctgaagttacttaagccatgctcttttcatcaactgatatgcatctggctacagctgttagagatgctctgtacctgtgtttgagtccaggacattctctcaggtgccttcaggagccagactgcaggaattcaactgtggcctcatctgactacagcaggtgtggagtcttggttcagttgtgcagcctctctgcgcctcggtcttctcatctgttaaagggagtaatagtagtcctgacaaggttcttatgaagattaaatacgagaaccaggcaaagagcttaacgtggttcttggcacatgtaagttcatatcaatgttaactattttttagaccaatgagagagtgcctatttaaacaagaacacccgggtttacataaaaatagtggtacaagtgtaagacagtcgcaagtgtgtgtgcgtatgtgtgtgtgtggtgccctggctttattgtgtcaattataagtagagacactttggcctacaggatgaaggaaacaggggttctgccttggctttgctgcaaccagcttcacacctgggacagtcctttccttctctgggtcccaggtccctcccttttaaaatgagcatagtaatagctctcaccaataaagcattaaaggagctaagatgtcagcctgtcctgggtctcgtttccaacagatctcttgtctcccccactgactccaaaccacacaagccatgcttctcaggaacccaggacacccggattgtggtagggttctgccaatgggaggtttagtgggaggctcgaaggcagaggtaccaccatccccgtgacactggctcagcctcctcctccatgcctgctgacccggcaagcctgacctggtggcagctttgcacggacagcctggatcctggttccaggagcacagtctctcccatctctccatccgagggatgggagtgcatcatattggccatagaggttacctgagcttcctcggttacctaaggtcacccagctaataagccttggagataagacgcaagccgagttctctggatccagagtccacccttctcccccgcagtgccatgctgcctcccagaacactttatgttgctttttacccatgtgaggaagtctgtgatgtttctctctctgtagttgagaaaactcatgtgctaagggcctcagtgacacagaatcttcatgactttctgaagaatgctgcgggaacctggggtcaatcatgtagaataattggctttgaggaccacagtctctgagaagagcagttgtatggaaagtaggcctgagcactaactctggctctagtccctgactgttatctcatcaaagaatctgacaaatctgtcagcgctacctaagtcttgtaagctaaaaaaacccagcagttgcaaaacagtggatttccagtttgtaaacagatgagtttgagagctgtggaagagaaatacaagtgaagataatgtgtcctagaaagggaggaaggaaggagctgaggaagccggcctcaaaagcctcaaaatgaggccacttctgcccagttaataattttattttttacttaaagaaaattaatagactttcacggcagtttcaggtataaaggaaaattggacagaaagtagagagtcctcatatttcccctctccccctgccccccacagttgccctattattaatgaaaacattttactgaacactgactctgcagcaggctctcaccccatcatctcattcatcttcccagcagcactggagggaggtatttgcatgcattcttgctttcacagaggctgagaaggagcctcagaaaggggtggaggttaaaggtaacagagtaactgaaagcagtgactcttgacctcaggtctgcctgacacttggtggtgtagctggaggccacttgtgagcggatttagattattcacgtacctcctggccactgacaaaaatgctcatgtaaagcttcttagtggcctgttgtgtaaccagagtcttaagggttaaagaaagaacttagaggatgtttttttgaggcaagtttatcagatagccattctcctgtgattaaaaagctctcatggctagaaacttctttatggtcttgcttggaagcatttctcctactgaatatttttatggtctttgaacccacagagaaaatgtccatcaagaaacaagtcaggctgggtacggtggttcacacctgtaatcccagcactttgggaggccaaggcaggcagatcatgaggtcaggagttcaagaccatcctgaccaataaggtaaaaccccatctctactaaaaatacaaaaattagccaggtgtggtgacgcacacctgtagtcccacctactcaggaggctgaggcaggagaatcgcttgaacctgggaggcggaggttgcagtgagccaagatcgttccactgcattccagcctgggcgacagagcaagactccatctcaaaaaaaaaaaaaaaaaaagaaaagaaagaaaagaaaagaaaaaaagaaagcagctaatccagggggaaatcagccaaattagtgttgtgcctggatttataagtatatgcttgagggggatagtgagccagagcctcaggcccaaaagcttacgtgttttctgagacataaactatggctcctttttactggaatagtgtaaaaaatgtcaaccctatttttttcatcaggatggaaaaggaaagtcaagagaggctgaacaaagtctccagtatcccggtgtttgcagcaaaatcatgtcttgcgtgcatgaacaggcagtaccatggacagatccacagtgcatggttgccatccccactccgggcttgtgaggaatccactacctcacatgcacagtggcgtggatgggcttgcccgtggtgctaggggcctgggctgcattctcttcagtggctgtggcagagaagtcctaagagtgaaattgcagtgcccagactgcaggacacttagtcaagtgctgaacatggagggctagatgttgggcagggactgagacaggagatggcacaggtggaagtggtcaagactcaatggtgggaggggctgtggctcctgagccatagtgtctcctgtgactcttccttgtggcaaatatgtgaggggctggtgatttgaattgtctcaaaggtagagagtagagtccaatagggtatattacagaaacaaaatgtctagaggaccaaatatcattcattcattcatcattcagcaaatacctacagtgctctctgttgtccagggcccctgactggtcctgcaaatgcaaaaataaataagttgaggaccctgcttggagaagcccaccattagcaaagggtgttattgaaatgttgcattacaacaaaataaccccacaggtcaatcaggaggtctgagggagttcaggggagtccatctcttcttgaagcgtgtggggctggagatgagctctgactgttgctgatgcaaaaagacattgagccagaagtccagggaggcagccagctcaccgtgcacaggcaatgcaccacaggggctgcatggagaatagcgcagcatggagaatagtgtggggtagagaatagtgtggagaatagtgtcgtgtgcagctgctggaacactgggcagattatgtcaacagaagctatttcaagggcctggagaggcataagccacagcctttatcataggctaagtcttccagctaatatttacacagcttgggggcataaaatatcaaacagctacaaatgagcacaagattctctgtggcttcatgctaagagccttctaaaaaggtctttgtgggaaataatctgtgaataaataacagagaataatttaaaatataagaaccaggtcttactttacactttgactaggaatatttcttttggtgtatgtggtatgtgtctgcttgttgtgtttttttattccagagccacatgctttggcctggtgctgtgacttaaagctgatacccccagaagctgagcgtctttctgaatctttcccagctaccccttctgagtcttcagcttgctgcctcacatgtgtggccccccaggagggcaaatagatatagctagaatatttgcttcaaaaggcattgctaatagtcacacatcaggtacaagtcctgaagaaaagattatgagatttcactacataaaaattgacattctcataggtcagaatagaattataagcaaattgggtccaacaaaaatgaggaaaatgcctgcaaaacatttaacagacgtaagagtagaattattagtatattagaactctcacaattaaataggaaatatctaacaccctagtggaaaagaatgcagtgagcaagaaattcagtaaaaaagtaatccaaatggcaaagaaacacacgaaaaagctattcagtttcattagtcaaagtacaatggggccgggcgcggtggctcacgcctgtaatcctagcattttgggaggctgaggcgggtggatcacttgaggtcaggagttagagaccagcctggccaacatggtgaaaccctgtttctactaaaaatacaaaaaaaatagccgggcatggtggcatgcgcctgtaatcccacctactcaggaggtcaaggcgggagaattgcttgaacctgggaggcagaggttgcagtgagcccagatcacaccactgcactccagcctaggcgacagagtgaggccccgtctcaaaaaaaaaaaaaaaaaaagtacaacggaatcattaaggctggttaaacttaaaatggatattcaagcccggtgattgtatggtaaaatgagcattcttatacatgttttaggggaaaatttggcaatatattttcaagacactaaaaatatttatctctagaagaatttgttctaaataaattataaaataagtgttctcctttttataaatttttaatgcaaaagaaagtgtgcagaaacgtaaacaagaggttgcacattttaggattatttggaaaagctaatagctgacatttattgagtgctaatttgttaccatttatttatttagttgttacacgaagttcttcaaggtattacgggcatacctcttgtgaaaggaaaatatcttaggccctttcaagctgggaaccactcagggaaaatctgtctcccattctattcaagtcatccctttgctcacagagatagatgcatattttgattgccttctttagaaagacttatcagaaactcaaaagaatgcaactaactgtatctcacctaccgtgacctgggagcccacagcgggagggccttgctttgcactgtctcacctttctggatggaactaatgtacttctttcaaattgattgatgtctcctgtctccctaaaatgtataaaaccaagcttggccacatgttataaggacttcctgaggctgtgtcacgggtgtgtcctcaaccttggcaaaataaactttctaaattaactgagacctgtctcaaattttcggtgttcacacctcagaaatattgcaaattcagttccaggtgaccaccataaagggagtcgcatgaattttttctctccagtgcatacaaaagttctgtttacactatactgtagtctattaagtgtgcaataacattatatataaaaagtatataccttaatttaaaaataatgtattgctaaaaatgctaacgatcatctgatccttcagcaaacataatctttttgctggtgcagggtcttgcctccatgtcgatggctgctgactggtcagggtggtagtacctgaaagttatggtagctgtggcaattccttaaaacaaagtaacaatgaagtttgctgcatcgatcaactcttcctttcatgaaggatgcctctgtagcatgtgatgctgtttgatagcattttacccccagtagaacttctttcagaattggagtcagttctcttaaatcttgctgctgctttagcaactcagtttatgtaatattctaaatcctttgctgttgtttcaacaatactcacagcctcttcaacaagaatagactctatctcaagatgtctttgctcatccatgagaagcaactaatctgtccaattttatcatgagattgcagcaattcagtcatatcttcaggctccatttaaaattctagttctctatttccaccatatctgcagtgacttcttccactgaaattttgaaacttgaagtcgtctgtgaggattggaatcaacttcttccacctcctgttaatgttgatattgtgacctctttccatgaatcacaaatgttcttttttttttttttttgagacagagtcttgctctgtcgcccaggctggagtgcagtggtgtgatcttggcttactgctgcaagctccgcctcccaggttcatgccattctgttgcctcagcctcccgagtagctgggactacaggagcccgccaccacacctggctaattttttttgtatttttagtacagatggggtttcaccgtgttagccaggatggtctcgatctcctgacctcgtgatccacccgccttggcctcccaaagtgctgggattacaggagtgagccactgcgcccggcccacaaatgttcttaatggcatctagaatagtaaattctttccaaaaggtttttaatttactttgctgaagttcatcagaggaatgactatctatggcagatgcagccttatgaaatgcatttcttaataagacttgaaagtctaaattactctttgatcaatggactgtagaatggatgtcgagttagcaggaatgaaaacattaatttccttgtacatcttgctcttgagtgaccaggtgcattgtcaatgagcagtaatatttttgaaaggaatctttccttctgagaagtctctctcaacaatagtcttcaaatattcagtaaaccatactgtaaacagatgtgctgtcatccaggctttgttgttccatttataaagcacaggaagagtagatttggcatagtttttaagggccctaggattttcagaataataagtaagcataggctgcaacttaaagtcaccagctgtgttaccccctttgagagtcagcctgtactttgaagttttgaagccgggcattgacttctcctctctggctatgaaagccctagagggcttcttgttccaatagaaggctatgatgtctatattgaaaatctatggtttaccgtagccaccttcatggattatctttgctggatcttctggataacttgctgcagcttctccactggctcttgctgtttcaccttgcacttctatgtaatggagacagcttctttccataaacctcatgaacaaaactctgctaacttcaggcattttttctgcaactttctcacctctttcagtcttcatagaattgaagacagttaagaccttactctggattacgctttggcttaaggaaatgttgtggctggtttgatcttcaattcagaccattaaaatactctccatatcagaaataaggctattttgcttagcattcatgtgctcactggagttatacttctaatttccttcaataacttttccattgctttcatagcctggataactgtttggcttcacttttgacctggctcaacttttgacatgccttcctcactcagctgaatcatttctagcttttgatttaaagtgagagacatactacctactcttcctgtcacttgaatacttagaggccattgcagtgttactaactgacctaatttcaattttgtcacatcttagagaacagggaggcccaaggaaaggaagaaagacaggcgaataatgggtcagtggttcagtcagacacaaatttattaagttgaccatcatgtgggtgtggtccatgctgtcccaaaacaattacaatagtaacatcaaagattgccgaccatagatcactataacagattaataataatgaaatggtttgaaatattacaaaagtttctgaaatgtaacacagagtcattgagtgagcacatgcttttggaaacattgtgcctatagtcttgctggattcagggttgtcacaaaccttctatttgtaaaaaatgcaataaaacggggtgtacctatactattattgtcacgatttttgttgccagttaaagaaaatgaggtttagcatggcagcaatttacgctgggttgtacagctaatacatgctgttataatagctaatacatgcgattatgatagctaatacatagaatcagggtgtgactcgcagtcctttctttggctctcggtctcggagtgtggccactgggatacaccaatgcttcccactgtgtgggtgaaaattggaaataatataaatgctcaacaatagaggtacatgttgtgaatatggcacattcacattgtgaaatacttgtgagaaatcacacaatagaaaagtatttatcgggcaggtgcggtggctcatgcctgcaatcccagcactttggaaggccaaggcagacagaacacttgagatcaggagttcaagaccagcctgaccaacatggcgaaatcctgtctctactaaaaatacaaaaaaaaaattagccaggtgtctgccaccatgccctgtagtcccagctactcgggaggctgaggcaggagaatcacttgaacctgggaggcagaggttgccgtgagccaagatcgcaccactgcactctagcctgggtgacagagcaagactccgtctcaaaaaaaaacaaaaaaaaaagaaaaagaaaagtatttatcaacatgagaaatgtacttagaaattagtaaagaaaaacaggctagcaaaaagatctgcagtgtgataccatttgagttaaaaatttgagtcatattaatttgaaatacttccacttgaggtgaaaaccaagtttcactgtatgtgcaaaattaaaaaaaaacagtcacttcaaactaaaaactaatttcaaagcctgcaggccccaaggaattgtaagctggctgctttagcacatggccatgatgttttgctggtgaacaggacactccttggtcgttggcttaagaagcacaaaggtgcaacagaacttcagacagtcattgtggttgttctcatgcttgttagtttggcatttgctgttgctataatctagagtctaatcttacgtctcaatcactgccactcaagcactcactagctgagaaatgcatcctcaaacaatagctttaacatgggggctggatctaataagccttgaaatgacataaaaacttctgtaactgttcatttaacagagaacatggaagtaaaaatattagagagaatgccaatggaaggaaaagcacattctagcaggtttacctttgtcaaagtaccttgaccaaacatcagccaagctcctctggcccaagggggaagagcttagccaagtctcctccttggccttctgagcacaactttgatgtccaatcaggctcatgtgcttccacttctggtatctcatccagagttcctttttcccctccacccttgatacttacccaagttcctcttagtaattttccacccagggaccctctcacctgaccgttggctgtaagtccctatgtgcccctgttgtttttggaattgagttcagcccctccccttttgcaacattctatccctattgcagtggtcttgagtaaaatctgtcttgtcacttttaacaagtgcctggtgaacaatttttctttaccacctttaacctcacaaaaattgttaaaaatcccagcatggacaatgggaaaatagagaagtgctggaagctgatagtaaggtcatcaccattgctaataacagtgaatttagagtattcctaagcacttaactcccatgggaaaatttatcttaaatttgtcctggagccagctataaatttgaatcctatttctgcaattactggtcatgtgatcttgggcatgtcacattgcctctctgagcttccatttcctcatctacaaaactttggagtatgaaaaagatttgaaaatgcatccctatgcattttccttgtgccatcctatgcacaagacgtgccttatggagaaaatacatgtgttagagaagcttccccagacaggagttacagtgctgttggctgtgagtccatccctagcatgcaattgtctctcataaatagaaaatattctagaggctgggagcggtggctcatgcctgtaatcccagcactttgagaggccgaggctggtggatcaccagaggtcaggagtttgagaccagcctggccaatgtggtgaaaccccgcctctactaaaaatacaaaaattagctgggcatagtggtgggtgcttataatcccagctactcaggagactgaggcaggagaatcacttgaacccgggaggcagaggttgcagtgagccgagatcgtgccattgcacttcagcctgggcgacaagagcaaaactccgtttcaaaaaaataaacacataaaataaagtaaaataaaaattctagaaagacatgtgccagaattttgggttgtgggattttaggcttatctttttctttgtgttgttcactgtcctgttttgaaaatacaattgattcttattcacatattccacctatgcaaattctcctacttgctaaaattcatttgtaacccccaatgtcaataaatatcaatactcatggtgcttttgagaccactcagggacgtacatatgtgtagcgtagtggagaatgtgcttgtctgatgcgtatgttcccagctgaggctgaacaaagggacacactaccttcttgcgtcagctctcataatgtaaacatgtccttctctctgtctattcagtgccacatccttcacatttttatgtttttcttcttggtgattttgctgtttaaaatgacccccaaatgtggtgcagaagtgctgtctagccatcctatgcacaagacgtgccttatggagaaaatatatgtgttagagaagcttccccagacaggagttacagtgctgttggctgtgagtccaatgttaatgaatcaatatatattaaataaagtgtctcttaaaaacacatgaaaagtttatgtattgatttgttgacaaaaatgttgggatcacgcttcaggaaattgtatttcccctagaagaaatggttcagtattcactaattcagagtttatggccatggcaactgttgtagatagaacacagctaccagcaataatgagaattgcctgtatattacttatgcaaggagggaggagagcattagttttaaaaagcagatggtgcgtaaaggtgcagttccatctgtgacagaatcaagaggagagaagaagactaagtttgagggggtgtgctgccccaggctctgagctgaggctcgtgtgcattgtgtgactgtgccttcatgccctcctgagaggtcagcatcacagtcttcatttctcagatgaggagaggggctctaaggggcaagcttgtctctttcaaaggcaggtaagggcagaggcaggacttggaccagtgtttgtcattaaagttggaatcgatcatgaaaataaacgtgtgcttctagtctattgaaataaagcgacgttgtgttgttcccagttgaatagctggtgaagaggagaagcagcttttgcctcagtcccaaatccagtgccatttctacctcctacagacatggagggaaagcgccccttacttgggatccaagtggcctccagggcatgcagtcactgcccaggtgtccctacccacggcttgcttggtatccccgccttccagttcagaggttgcaaaatttgctcactgaatcattttctttctgcagttttcacctctgacagagcccagacaccatgaacgcaagtgaattccgaaggagagggaaggagatggtggattacgtggccaactacatggaaggcattgagggacgccaggtctaccctgacgtggagcccgggtacctgcggccgctgatccctgccgctgcccctcaggagccagacacgtttgaggacatcatcaacgacgttgagaagataatcatgcctggggtaagtgtgtatccaaggtcagaaaacaggagggctagaactcacatagcacctacttggctctgagcaattcacatactttgtttcaaggaatccctatggcagtcaggttggagagaaattttgtcatttctattttacaactgaggaaactgaggctcagagaggttaggtggtccacctcaggtcacacaggtagtacacgatgaagtcaggattaaaatccaaatccaagggcagtgaggctctttcccccaggtcccctgagactcagtccctgcccagagacactcggtacatagagcgtgtcctcatatacattaggaagcaagacactggtggctgctttcaaataagtcaattgccccaaataaagcacacttccaccatccttgggtttagcaataggtaattagcatatgtggaagaaacgttttctttagtttatttgagagtgggcagtgtggtgctgcccaccaaggcagccctttttctctgaagccagtaggcctggggtacacagagggcagaaatcagcgggactggctgctgtctccgatactcactcacagggcagcagagttggagctcagagaaacttcccttcagctttacgcttccacagtagattttctctgccaaggagttcacctaaaagcctgttggttaaagtggctctggcctagtcagggtctgggtgggagttgcagcccggccagtttctagatcacgaatgtttatgaggatggccaaacctgcccttccatgcaacaatgtgcagagtccaggcagggaaaatctccgtgggctccactggttgatcactgccgcgacccagcacgtctgtggttgtaaggcctatgagcaacgacatgtgattttcatagaagaggggtctgggaccatcaagacccactccctcaatgtagacagaatgccaaggccctgtgaaggcataaggtcagacaaggttacagtccactgatcatgggttgagactaggcctcaggccctggacctcagggactggtttctcagtagctgagcgcctctctcaccacactgctcacatttcttcttccaggggattctcacttggcatttatgctttgagcaaagaacaggattcaggttcttctagaaattgtgcaagtacactaagctgttcagcataaaaccctttgggagaggtgtggctaaatgtcaggcagtggggagtacaggagagtaagggaggatttgaagtctttctgcttccttctatgggggcattcactgcgcagagctgagctgggaaatgcacaggcgttgggcaaggtccctgggtgggagctgcagcccacgaactgctggctgtgtgatcgcaggaaaccaggtgagctctcgagccgtgagcggagcaagtgcaggcccagccatctcaaaagttgctgtgaatatcagcggagagtgaagcaaaagagcacacatctgtccctaatcaagaatcgcttctgtccttttccagcccagaggccacaggaaggggagagagacaaaggcacatgggccctccaggtgcggaggggctagtcagccacagggctgctcttaaactctcctgggccccgggcgctttgtctttgtcggctccttcctccctagaaatatggaaaattatgctttacaaatgcattggcataaagatgaatatattaacatcgattttttttctttaacctgaaagttcactgttttttcctcctgattacagaagaaatttaagcattttttcagcccctaacagtgtcgtgggcctggacctgctgtgctgaaggcatcacagcctgtgcagctcctctcggcctctcagcctcatcaccaacctcccacacctgagcccccaagcctagactgtgttagctccctctctccaccactccccaagccctggcagacttggggtggccgtggttgttaaataaaccttactgaacactcctagttcttggtgagctctctcagttggctgccttcacaatcagagggggttgctcatgctacatcttagacaacatatatttaacgatgagtgctattgagaaataaatgtttgcatctcttctcagattgtaagagatatcttacagatatcttagcttggactgctatatcaaaggacgtagactgggggcttaaacaacattgatttctcacagttctagagacaggaagtctgagatcaagatattaggttcaggtgagggctctcttcctggtttacagacagccgtcttcccagtgtgtactcacgtaaccaagaggtagccagctctctgccttttcttatgagggcactaatcccactgttggggggcactaatcttattaaggggaccccaccctcatgccctaatcacctcccaaagacgctgtcccttaatgccatcactttgggggttaggatttcgacgcgaatggtgtgcagatactcacattcagagcagagcagccaagcccgatagagcatatcctctgctgctgggattctgagccagacctggaggaagcatcagagcacgtgctttcattttatctgaagggatgacagggcccagggaggtgcagtcagttgtctggggtaacccagcaaatcagggttcctgctggacttgcagtccaggggtgctcccaacaccatgctattcccacaggcaggatggacatggagcaccagcaggggacaatgcggaacagggcaatgtctctcagaaaccagtgcgtggtcacagcctgagaggggtctgaatggcaatttctataccttctccatgcacaggggctgagggttgtcctgagggctttaggactttattctgttccttcagggcaggtactgcattggcaggaacaaattaaagacccaaagactaggctacacctgctccttctctgtcctcccctgatcgtcctcccagactccaagatgtttgaggctggccccttgttaccattgctaaatgttccctgcctgggtgtccaccacaacccttgcctcctggatcctgaaaccccctgtccccaagtataccacctggagctgtcactaccccttatggatctcctccctggcccacatgagcttttcctctgtgcctcacccagggagtggcaggtgttcaccttatgggctggagaaaggtgggatgcccctagccagggcaaatggcaaggggcagtggccaggctgagggacagcagaggtgagacatctgtggggtgatccagctgcttggctggagggaaggcctcagctcctctagaagagccaggggcagcgggaagaccagatgcatgtttgtggcttgactgaagaaacctcgaaaatccagagcttggttttttttttgtttgtttgtttgtttttaatggagactttattttttagagtagttttaggaaaactaagcttttggcacaaagagatcagccttggggcagcgccttcactgacgagagcaccggagcaagaacttgaagcacagtgtggttttttgagacttcttttgttatggaaaatgataaggattttccactttattttggagatagaacttttccttctgagctagcaaatacattccagtgtcaaaaagggagctggtttaaagggagtggggacagtaaggtgatgtgtaaatgctccgaaataatggaggaaggtaatgggatggctgacatttggggaactgcactcacctaactctgggtctggctgcatctggcagctgggagccatgggggtacctgggtcccccgctctcttgaggcctggctttcctcactcctcagcagctgctctgtcctcccatgcaggtgacgcactggcacagcccctacttcttcgcctacttccccactgccagctcgtacccggccatgcttgcggacatgctgtgcggggccattggctgcatcggcttctcctgggtgagggtccggatgcacctcgggaaggggtcctggctgtggtgggatcccggggtggggacacggtacctatgcacaagggacctgagcagatggcggtgctgtctgtgggcagacgggctactgttgcagggaggagaaaggattcagcccagagagagtgcctctgagaaagtagcgattgagaacagagaaagtctcaacaactcaaagcccattctgcagaggctgtgttggaagcacttggtatgaactaacatcatggtctggggcccagagtttctgcagctcgaacctgggaatctgcatttctccaagcagctcagagaatttctatatcctccaaagcttgagaaccgcgactgcccctgtctcattccttctgttctccaccagggctgctgcccggggagaggctccaaccagcctatcagatgtgtccagagccttggagcaggggggtctctggaaaagggcctagctcctgcctgcaaaccaccagtcccaccctatctggaggtaaaatgcctaaaaaagtccctactcagaagaacggtaggcagggctggctctgcccgtgactctgtgctccaggcacagattacaggaaagatgcattcctcccaaatgcagagagcttggaggtagagctgcctgctgatggccagtgtccgagggctgctgcaccctggggagttcctcaaaagccaggggctgtccttggcctttggggtccagagcactcaccttgtctgtggcttggagccaggtggacttgtgggcatcggtctatgtggcatgctgtgatgtgtaaaggagctgtcaattaggaatttgcagcactgagccacagggcccagctgagccacctctgcttcaccagcctggcacttgctcttctctgggctggggcactggaagttgccgggtgagcaggcatcatgggccctacaggcagggctgaagagcccacagatgggctcttcagtgtctgtgctgctcctctgccaggcactggggcctccctctctgctgggcagggctggcctgggctgagcataccctctcctaaagagcattttctatcactggatattgcagcagatttcatttagctctgctggtccaaatccattctgtcccacagaggtacttggcatccatctctatctgctcattctgggacagtctgattgccctcaggccttgaagggagtgcctcactatctctcaggctgcgttgcctgatacctcatccctagcagagagcataggctcctggtagagctgggcttggccaggctcaggtagaacccagcaggatggggctgaccagaagggagaatgcactcttctcacttagatcttactggtgacgcatcgggatgttgctgtgcacatctaggcacgagaacatcttggaccccttatgttggagacttttatgaaggtggagactcaatccacctttggatggggctcaagaccagcctgttcagagagaggggagagttcatagagaaaagtcactgggagtttaaaagacaagatcaatggcttctcgggatgcccagagggtgacagctgcccagcgcccactttctcattcccttcatttgtgactacggaggaaagtccaccagtgggctttctggacccttctgtgagtgaacaaatgaatatcctagcaagcccgcagagcccatgcagtgaggctcagtggagtaaggttcattatggtggcccgtatgttccttcccaaccgctctccttgcatgattctaggtcaaacagccttcaggcctttgaatcacatctgagattgggtgattttaatctgggctttagtggaaggttaaatccccttgttactgctgacccccaaattctgcaatgcctggccctcggttaatcccttcccttcccccacgacaggcggcaagcccagcatgcacagagctggagactgtgatgatggactggctcgggaagatgctggaactaccaaaggcatttttgaatgagaaagctggagaagggggaggagtgatccaggtaaggtgggagctgtgagggccacttttgggatgcatgggctctgcacaggactgtagccgcaggtggggaaagaggcactcatgcttcttgttagttcctcaaatttctcctggagaataaacaaaaccgagctcttgggaaaatgctggctttgggattggcaggatctggattaggatcccagtgctgtctttcactcgcttccccagggcagggcactcagttccccaggcccctagctatggtaggtagcacagccgctatctcacagcaggtgcgtggaagtaacaactacagcaactatcgtttgtgtggggttccccatcgccggccactgtgcctaagcattttccaggcattaactcatttaattctcacaacaacactgtgcattttagtacccctttttacaagtgaagaaacattttaatagccctttttacaggagaggaaactagggtccagaacattaggtagcttgccccatggcttccagctacagactctgtgtggctcagagcccgtgatattcctcggaggacagcacaggtggcagatgtgaccaggcttcagaggctataaatactatttgtctttgaaccaatcatttacttaaagatgctgctgcttctatgcagcaactgaattcattttcttcatgtaacatgtatctattgagagtgactgtgtgtcagagcttacaccagggaacaagatagacaaaagacaatcatgatggaatttctattccactggggttgcaggacaaatggcactgggatgacttggacttgatgcattaaaaaaaaaaaaaaaacaacttcctagcatggaatatgaactatattgaacccagtactctcccttaatcatttttctcatgtcaagtagatgatagtctcattaggaaagcattgttaactttgggaaaaaggggcttccttttcagatattgtctttcacaaggctctgagaattggtgaaggcccattcagtggatgaggacagtgaggcacacactggagaacacctttgtgcagagcacatggccagtgtggccacgcgaaactagcaagcaagtctctccacttccagtcctgagaatgagcaacaagactgataattttatgtatttgtttctattgatgttgtgacaaattttgtggctcaaaataagacaaactgattatcttacagttctgtacatcagaagtctgacctgggtcttactgggctaaaaccaaagttgacaccttggaggctccaggggtgaatctgcttccttgcctcttctgacttctagaggcttccaaaattccttggctcacagccccatttccattttcaaagccagctgtgtcccatctttctgacctttcttttgtaaaccccaaatatctgagatgggtctcagtcaacttagtttattttgccaaagttaaggatgcgtgcctgtgatacagcctcaagagatcctgactacatgtgcccaaggtggttgggcacagcttggttgtatacattttagggggacatgagatgtaagatgtacattggtttggtctggaaaggtgggacaattcaaagcagggagggggctttcaggtcataggtagataagagacaattggttgcattcttctgagtttctgattagcctttccaaaggaggccatcagatgtgcagctatctcagtgggcagaggggtgactttgagttctgtctgtccttcatccaaaaggaaattccttatgagggaggcatgtagctttttatcttagtagctatctcttttaggaatagaatgggaggcaggtttggcctaagcagttcccagcttgacttttccctttggcttagtgatttgggggtcccaagatttattttcctttcacactttcctggtcgcatctccttgtgaccacatataagatcggaaagtgggtctccacttttaaggacacatatgattggattgggtccatccaggcaatctgagataatctctcaagtcaaggttcttaacttaatcacatcagcaaagtcaccttttccctggaagggaaacagtcacagattctggggaccaagacctgaaatctctgggaatgagggtgcattaatgtgcctaccacatccagtgtgcttcagagtcatggagggaacttgcttataatgcctattcctagactctgggccaaaaaatgtgaacgctaattcatccggatgacacccagattcctgaataggccacatgccgggactgatgactgccttctccatgacccacaggccctgtggccaggctcagagtcatccctccacgtgctcctccttcgcattctttggttatctctttttccatcagacataagtgatattaaatggggagctgaggaaaatgaaatgtcaggcatagtggctcacgcctgtaatcccagcactttgtgaggccaaggcaggcagatcacctgaggtcaggagtctgagaccagcctggccaacatggtgaaaccctgtctctactaaaaatacaaaaattatccaggtgtggtggcgggcacctataatcccagctacttgggaggagaattgcttgaacctgggaggcagaggttgccgtgagccaagaccttgccattgcactccagcctggttgacgagagggaaactccatcaagaaaaaaaaaaaagaaagaaaagaaaacgtcagctatgttgtaagcaaagcttcaatacgttgctgtgaaccataccattctacgtagcagcaacaatgactcagcaatgattcagcaaatgaatcatgcttcagtcccagcacaattttcttctggtcagtgagtatgcagctggagaagcctccttggccaagatcacagcaaggataggctgtcacaggtgcccttccagcgaggggagggggctactgcacactgtccgcagccagtgctctgtcagctgcactttgccttggtgagggccagatggctttctggcctctggaacatcagtcctgattctccaggggacagagggcagcagcactcagggacccagtgggacagctgcgtgcctgcagagggcgtggttttgattccaggcaagggcatgcatggtctaaccctttacaagaggcctcgatgttggtggccgacttactttttcttttagttttatacacgggacaaggtctacttttccatttcttttccatttgttcctctcatttttttttttattttgtcttgtttttagacgaagtctcattcttgtcgcccaggctggagtgcagtggcacgatctcagctcactgcaaccactgcctcccggttcaagccattctcctgcctcagcttcccaagaagctgggattacaaggcacccatcaccatgcctggataatttttgtatttgtagtagagacagggttttgccattttgcccaggctggtctcaaactcctgacctcaggtgatccacccacctcggcctcccaaagtgctaggattacaggtgtgagctgtaggagatcggtcagagtggtgggagaaactatagggaaaaggagcaggccttctgaaaggtcagaaggctctgcaaagctccatggcagaatagctgaaggcagctgttctataaccctgaggcagaggataaggagtaggtacaagggagtgtaggggaatttatcttggtcaagcttgtttgttagaagttgtccaggaactgacctcggaacatccttgcacgtgacattccctgaaaggggaacaataaatgttaattatctacaggttgtgtttgctccaggttttcagcattgtgcttgcactcaataaaagcaagctgctccagcttctcagggctgctctctggccactagagccaggcagtcacttagctgctcttacactgcatacctgtgtctgagcactcatttcctccatcggccagggtctgcaggacagatccagcagtgagccactgcacccagactgttcccctcattttgaccctccctagcatttggtgagccctgctgattcaagactcagctctgtgcagtgtggagatttttcttctactgtatgttagttattgtgggccacgtcactctttttcagggacttcaattttccacagattgggtacctcttccatgatttctctctttctttcgatatttcccttttttgttatcttctatattttaggaagcttttcatggttttctccacatgattatgtgattatggacctggtgtggtggctcacgcctgtaatcccaacactttgggaggccaaggcgggtggatcatttgaggtcaggagtttaagaccagcctggccaacatggtgaaatcccatctctactaaaaatacaaaacttagctggacatggtggcatgtgcctgtaatcccagctactcaggaggttgaggcaggagaatcatttgaacccaggaggtggatgttgaggtgagctgagatcatgccactgcactccagtcggggtgacagagtgagaccctgtctcaaaaaaaaaaaaaaaagtcccctttccacctagatactggacattcatggtaaaaatgaaaagacacaggagctttcttgtcatattccctgtgttatttcagtatctacatgtgaatatatgtatacaaacaaaattgaaatgatactacgcatatggattttctgcatggtgctttccttatcattttattgtgagcatttcccactatttaaatattgtttgaaaaaagtattactccatgattttctatgatgcatcacaatctatataaatatataaataatacctaagatatttgtgttgcatcaaattttccattcttataaaaaaaattttggaggacaccctttaggatgaagtgcaacaatcttccaagatgatcaccttcctcctaggactctcctggctgtattcatgtttaacattcatgctccccactaaatccaaatggaacaaaacaaaaattgaagcatttctaggtcattgcatcttataacaaaaacaatttcatattcaattttttcagcagatgattcctctaattatatactcctcaaaaaaatcttatcaatccctcataatataagctgtgtctattataataagagctacttttcattgaatagcaattatgagcttggctatgttttagcctatgtcttgtgctttgtgttattgtcttcatcctcaaagtatttatgaagattgattggattatggacaatctttttcatggatgaggatattgagtcccagaaagttagtagaacatgcatagcagcaaaagtgaattaaagccaaggctagtaggaaagacaaccagagttatgactgttacaccagctcatccctgaccataggcttgggttggtgtccagagatgtgcatgctactatgggctgcattttcgtttcattaaagacaacctcatttttgagagaccatacaagtctttagcatttgggtaggaatattcctggcatctctcagcccccgctttaacacaatcttcctgtgagcccaatccactcagtttttttctggatgaaaggaagaaatgggatctgtgtttgccaccggaagctcacccttctcagcagacaaggctgattgtctgtaattggtgaggccccaaagagcacaggagcctggtgacagcctgtgagccagcctgcattattgatcccctcagagctgtaatcacagctgtgggcgtcagcgcagtgatgcgtgtctgagtcaaatggcaaactgttgttgtgaggctggacaaatgtggtctgggaaaatggtctcttaattgggttttaaagttcttgtggaagaaaagacaattttttgcttcgaaaaaaactgaagatgaaaggacatttctgctcacggcatcagcagccagaagcgtcagaccttaccagcatcccctcctacctcctgagcaggcttgccatggcaacctttgtctgctgctatcgcacagagccatcgttcctgctctgtaccacatgtcaccctccccgtgcttctctccgcgaagatctgctgccagcaaagtgcagagagctccacctgacatcatgcttgaggccaccaggccaccctggtggcatcggggtggtgtggttctagatgtgctactgacgatttgctccttcaggcttttaaaacatcattttgttgacttaagaaggtgaattttctcttaggacatgaactaagctcccccatccccccccagagaaaagccataatgagttgtcatggtgattcaggtgattcatggtgactcatttcattagaatgttcagagaatgaacacctgcgttccaacgcttcaagcagagggtagaatttagccggggaagctgcagtcacgcctgcttgtcaagcatcagaacagggaattgtgccttccaccaggcttttcatgttacatttccaatgagaatgggtgggacatgacaaacaaaatgtgtgtgggggcagatagggggacaggaggaaatcagggacaggaatgatggggtacataggagaagtgtaagtaaggtacaatgcctgctctcagggagcctgggtttcctgggatggctgatttagctttgccagccaaaattggtttctccccttctctctcctctggccaaggtttgtaaacctggcctaaaacaatgtctaaaatcattgctcatgaaaatatagcctgaaggaaataaagtacccattttagatgctgaattaagagacgcatatatctgtatatttgaacccatccattagtgctacagaaacatgaataaatgtatttgtctttcaatattactgtcccaccaaaggatgtgggttggctcaaaagaataagtaaaagtagtgtcaaggcaaagtcaaaatgagaaatcagggtcaatgaagagagcatcaaatgttaagaagagaggttagcatttctacttaattattttattatatatttctctgtaaaaacctatcatgttataaactttttcagagtcaacaagaacctaccttcttttatttgccctttctaatgtcctttcatactggtcggtagatgggtttcttctacgacttacttaagagggaaggtgctcgctgcccctacctttctaggcccatggcaccctaaaaagcgcaggcgtgggctcactcctaaccgtgccctacctagctgctgatttggggcaagttagtgaacctctctgcacatctgtttccccacctgaagatgataaaacacaaaaatgggattatttttacaacttaaatgggataacatagcaggccctgaatccattagtttgccaggggttccctaacaaaataccactgactgggtggatcgaagaagaatttcttttctcacagtcccgaaggctgcaagtccaaaatcaaagtgtccacagggttggttctcctggggcctctctcctgggcttgcagatggccaccttctccctgtgtcctcacatggtcttccctctgtgcacccacatgtctgggggccacatttccccttctttttatttatttatttttttgagactgggtctcactctgtcgcccaggctggagtgcagtgttgtaattgcggctcactgcaacctccgcctcccaggctcaagtcatcctcccacctcagcctctcgagtagctgggactaccaggcacgccaccatgcctggctaatttttgtatttttatagatacagggtttcggtatgttgcccaggctggtctcgaactccggggctcaagtgatcgaccctcctctgcctcccaaagtgctgggattataggcaaatttcatattatcagaaacatgtcagattggattagagcccagccatgtgaccccattttcttctaattacctctctaaaaagcctatctccaaatatggtcacatctgaggtcctgggggttagggcttcaacacatgaatttttggggacacaattcagcccgtgtcattaggaatcaaaagaaaccctttaaggcatctcttagtctcaaggaaaatgcacccctattttataaacaaatgcaaatcgctctgtccgagtgaatatgaacgcagagtcaggcttgcatgctggtgccctgggccgttctcctctgatagagacaggagcagtcgtcctaggccaggctgggggcagtccatgaggagaagctctcacaatacctggtgcagggaagtggtcagaaatgttagctgctgctgttacacaaaatagacccaccaatggcaaactcataccaacagctgaagtggtggtctcaggtgtcaaaaatattagttttctcctaagcaaaggagagtgaattttgccatttcagactcatattttaagaaaactatggacacaaaacaatatgtcttccaatagtgtaggtaccaatgccttcgctatgtttgggatttcatttggaccttctcttgaatttagggaagtgccagtgaagccaccctggtggccctgctggccgctcggaccaaagtgatccatcggctgcaggcagcgtccccagagctcacacaggccgctatcatggagaagctggtggcttactcatccgatcaggtgagtgtgttgtgggggtatcagccaagacttcaagacccgaatgtttggttttatgtcaaattcaaaccaaaccaaacagcatccttccaaatctaagaacagttcctcaggtatcactaaatagagacctgaactacagggaaggggtggattcttgggtgggaactggatagatcaagttaagaaggaaataaatgtgtggagacatcaccgcgactggctctgtcaccttttctaccagtgcggacttctgttgtgattatctggccttctgagcaccattgcagagaaactagatatggggatcaaagtcctcggccctaactgcagctttgttattctgtgatctcaggcccctgggtagcgtcaagcaggagacagtggcggtgggggctgcagggcaaaaggtggccggctttcatgagaattgcctttcctgagaatctctgagacaggatggatctgccacagtggtgatgcctcctggctggtttctttcctccaggtactgtttactgagcctggccaccaagctccccaaggctccacagtcaggggcagggcacagatttgagcctaggatttctaagtccacctctgggatctactttccagggtctcgccacttatccttgagttcaaacaaatgaaaaacttcataaatattgacccagcactttacccttgttagtgcctgatactttaaacttaaaagcaagattccacaggaacagaaacaactccaggaaaaaaggggtctcatgaaggtgcaggggagagggagcagtcaggagcagttctgcctcctgtgccgttaagagggaccttgtgtttgcaatgttggctgctctctgccgatccagggcctggtaataactgcatgcacacacctgtacaaatccaactctgctgtcttctttccaggcacactcctcagtggaaagagctgggttaattggtggagtgaaattaaaagccatcccctcagatggcaacttcgccatgcgtgcgtctgccctgcaggaagccctggagagagacaaagcggctggcctgattcctttctttgtaagttcggcagcacttgtggctcctggccaataaggtgaaactccgtctctactaaaaatacaaaaaaaaattagccgggcatggtggcgcattcttgtaatcccagctactcgggaagctgaggcaggagaatggcgtgaacccgggaggcggaggttgcagtgagccgagatcgcgccgctgcactccagcctgtgtgacagagcaagactctgtctcaaaaaaaattaatctttgagaaacgctttttacctccatttttttttttgttttgtcaattcaagtcaattccacagtgtaatgtggaagaactgacatggctcaaagttagcacgcagagcaaggtgacagccaagacattttgaaggatgcaaaaagagtctgccagtggatcaaggtgtacctgccatcttatcccaaaagtcttatctttctccgttgcgttcatctccacaggccatacaggtttgttcctatatgtgtttactgcttccttcttcccaacagaatgtgcggggaggtaaggtccatttgaatccctgccttatccctagctcctgaaacagtgcctggcactgaacagaagctcgataaatatttgtcaaacaaataaagatttggaagaaagatcattcaggtagaaagaaagatctcccttaaaattcccacaaacaatttcagtacaatttgaatagattctatttaaataaggtgaatttctttgaacctatagtgtcaatattaagactcagaatactctgtctagggaaaaataaatctgtcaaaacacactcttttaggtttcaggaatgaaaacaatgcaggaaacatcacttaaaatgttaagatcgtattttacaaaaatttcaaaactcatgaaataaaaagacaaatgctggcaagaaccacttatagcatatgtcgtaaagtaaatcttaaaaagaaggcttacatatcagtaagcaaaaaggcaacattccagtgggaaaacatgcgaaatatatgaagtcggtttcatatataaccacaaaaaactaagaacacaaaaccgattctgatcctctaataaccaaagaaatgcaaattagttgccgagagaggtatgttatatctatgagtgtagatatgtctatttccacttttatatctgttaaattgtgtacatattttgaagcatattaatttggtgcatacacatttagaattgtcatatctccctggtgaatgatcgtttatcactaggagatgccctttatatctctagtaatgcattttgtcctgcagcctactttgtctgacattgctataattacatatgttttctattggctaatgtttgcatgatatagacattttccattctactttcaacctccctgttcatttatatttaagatgtatcctgtgaaagcagcattgattgttgctattttaaaaatttgtttttaaaatccagtgtgacgattgatatttattttgttcatttacactcaaggtagttattgatacatttaaatgttatctgctgtctatttgttttttatttggctcaactattatatgattgcttttctctatgttcttgcctcttcttggattaattatttcatattattccattttcttatctctgcattttcttatttccattcggcatcttttcttttagtctgtagaattccctttagaaatttttagtgtgaatttgatataatgaattatctcagttttgttaatctgaaagtgtctttactgtgccttcacttttggaagatattttttctgggtatagaattctagagtgtttggtagctagttttatttttggtactttgtataagtccattgaattctttcttccatgatttctgttgagatgtcagttgtaattttaatgttgtgatgatgaagaacatataaaaatatgacatttccttctgtgccgccaatggaggtgctgcttgctttttgtctttgttttactgtgatacaaggataattttctttttatttactcttcttggatttcacagaacttcctgaatctgtaatttggtgtctctcctcggttttggaaaattctaacctattatcttcccaaagtttgcctctcctcatttcctctctcctcccattctgggactctgattatgtatatgttaaatctttctgcagactgccatatatctcttatgcccttttacatgtctcactttctttttttttttaatctccatgcttcatcaacttatttacaatttaccaattaatctctttagctatgcctagctgataaatatgtcatgctcataattctaaacattaaaaaattttaacttattttattttattttatttttttgagacagagtctcactctatcacccaggttggagtgcagtgatgcaatcttggctcactgcaacatctgcctcccaggttcaagtaagtctcctacctcagcctcccaagtagctgggattacaggtgtgtaccaccacgcctggctaatttttgtatttctagtggagacggggtctcatcatgttggccaagctggtctcgaacccctgactgcaggtgatctgcctgcctcggccttccaaagtgctgggattacaggagtgagccactgtgcctggccaactttttattttgaaataatcatagattcatagaaaattacaaagttagcacaaagaaattctgcgtactaacccttcacccaatttcccctaattgttccaacttttataactatagtaccatatcaaagacaggagactgacactggttcattgtgtgtgtataggtctatgtcatttatcacaagtgttgattcatgcagccaccatgccaatgagaatactgaaatcctctagcaccacaaaggtctgcctctgctactccctgatagtcactctcaccttcctgatctcctaccatcatcaacccttggcaatcactgatatgttttctacctctacactcttgtcattttgagaatgttatataaatggaattatacaatatgtgacatttcaagatcagcttttctcactcagcataatggccttgagatccatccaagttgttgcatgtatcaatagtatgttccttttcgttgctgcaccacagagatttggtaccatgttatctatactacagtttgtttacccattcacctgttgaggggcattgtagttgtttccatattttggctattacaaataatgcatccaggaacattaatgtataggtgtttgggtggacatatgctttcatttctctgggataaatgcctaagagtgcaattaagggtcctatggtagttgttacatttaatttttttaacaaagaaactgacaaggtattttccagagtgactgtattattttacatttccattatcaatgcttgagaaaatcaggctctttatacatccttaccagcatttggtattgtcactattttttattttatccattttgatagatatgcattaatatgctatcatggtcctaatttgcagttccctgataactaatgaacatcttttcatgtgcttattcactatctatatgtcctcgtcaatgacatgtgtctttatgtcttttgcccattttctaattggatgatggattgattttttaaatgaataagcttaattttgttagagttgttttaggcttacagaaaaataagtaggaagaacatataccttcttatatcccaaccttcgtttcccccattattagcatcctgcagtagtgtgatacatttattaaaattgattcaccaatacataacatccataatttaccttaggggtcactatttctattgaattttctatatgttttaacaagtgtataatgacaagtatctaccatttcagtgttacacagaatagtttcactgccataaaaatcccctgtgctccacctgtttatccctctctccctccacttgaaccactggcagccactaatctttttggctgtctccatcatttgttcttttttagaatgtcatacagatagaatcatacaatatgtagcctttttagattgacttatttcactaacatgtatttaagtttcctccatgtctttttgtactagtttatttctttttattgttgaatgctgttttctgatatgaacacgccacaattcatttatgcatttatctattgaaggacatcttgtttgcttccaagttttgacagttattaatgaagtgctataagcatttgtgtgcaggtttttgtgtgtacataagttttcaactcatttgggtaaataccaaggatcacaattgctggatcgtatggtaagagtgtgcttaaagttttataaggaaaggctgaactgtgtttcaaagagactgtaccattttgcattcccacaatgaatgttagtgtaggtttttcaatatctttgtcagctgttaatttttttcagtgttttttattttatccattctaatagatgtgtagtggtatcttattgttattttacttgaaaattctgtaataacatatgatgttgagcattatttcatgtgcttatttgctacatgaacatcttctttggtaagatgtctgttcaggtcttttgcccactttttaattggattgtttcattattattgagttttaagagttctttgtgtattttgggtagcaatcctttatcaagatatatgttttgccaatgttttctgccagtctttagcttgtcatttcatcgtttaaacaatgtcttttgcagagcagaagttttaattacaatgaagtccagattatcaattacttctttcatggatcatgtttttggtgtggtctccaaaaattcatcatcaatcctaaggtcatctaggttttctcctatattatcttctcggaaatttatagttttgtactttaaaacattaaaatagatgtaggtctatgatctattttcagttaatttttgtgaaaggtgtaaggtctatgtctagattcattttttgcatgtagatgttgatatggtttggctctgtgtcccaacccgaatccatgtggaattgtaatcctcagtgttaggggaaggacctggtggaaggtgattggatcatggggatggatttctcccttgctgttctcatgatagtgagtgaattctcatgagatccggctgtttaaacagtgtgtagcacctctccctttgctctctcttgctggcaatatgaagatgtgcttgcttccccttcaccttctgccatgattgtaagtttccggaggcccccccagccatgcttcctgtatagccagtggaactatgaaccaatagttcctttctttgtaatggaacaataaacctcctttctttataaattacccagtctcaggaagttctttatagcaatgtgagaatggactaatgcagatgttcagttgttccagcaccttttgttgaatactacacttcctccattgaattgcttttgttcctttgtcaaagatcagttgacttcatttgtgcggatctatttctgttcaactcatttatttgtctcttcctttgccaataccatattgtcttgatttatagctttctactaagtcttgaatttgggtagtgtcatgtcagatctcaaacactgttgtttaatattatgttgactattctaggtcctttgcctcttcatataagcattagaatcagtttagcaaaatgcacaaaataactttctgggactttatataggattgcattgaatttacgcattttgttgaaataactgacatcttgatgatattgagacttcctatccatgtatgtgaaatatgcctacatttatttagatcttttaaaaaattttcttcattagagtattgtagttttcctcatataaagctcattctttttttttttctttttactttttttggtgctaatgggaatggtttttattttattttcaaatttcatttttttaattgctggatgataagaaaacaattaacttttatctaatattatcattttatcctacagcttgccataattgtttacttagttctgggagagttttgtttttgtttattctttgggatttctacacagataaccacgtcatctgcaaagatacttttttttctttccttccaatctgtatatctcttatttcctcttcttgtcttattgcattagctgaaactctcagtacaatgttgataggagtagtaagaacagacatccttgcctcattcctgatcttcgtaggaaaacatctagtttttcatcatcaagtatgatgttaagagtaggtttttcgttcatcaagtatgatgttaagagtagatgtcattcatcaagttgaggatgttctgctcgaatcctagtttgctaggagtttttattatgaacaagtgttgaattttgtcaaacacttttctgtatctatttacataatcatgagattcttgtccttcagcctgttgaaatgatagattatattaatttattttcctatgttgaatcagccttccatcctggaatagatctcacttggttctgatatataattttttttacattgttggattcaatttgctaatattttgttgagaatttttgcatctctatttatgagagatattgttctatagttttccttcttgcaatgtctttgtaatactggtctcatagaatgagtcagaaagtattccttttgcttctatttgctgtaagtaatccttacttccttaaatgtttggcagaactcagcagtgaattcaattggcatggtttctttgttttagaaggtttttaattattgatctaattttaaaatagatgtagcaccattgaggttatctctttctctttgtctgagttttggcaaattgtatccttcaaaaagttggtctattttatttaggtttttgaatttgtggccttggaatccattttgtttctttattatctttttaatgtccataggattagtaatgatggttctactttcctttctgatattagcaatgtgtgtcttttttcttaacctgtataaatgtttgaaaatttatttatcatttcaaagagtcagcttttttctttatttcctatttccaatttcattgatttctgctctaattcttattatttcttttcttttcttctgcttacattgcatttatttatttatttatttatttattttctgagacagagtcttactctgttgcctaggctggaatgcagtggcacaacctccacctcccaggttcaagcaattctcctgcctcagcctcttgagtatctgggactacaggcatgcatcaccatacccagctaatttttgtatttttagtagagatgggatttcaccatgttggtcaggctggccttgaactcctgacctcaggtgatccgcctgcctcggcctcccaaagtgctgggattacaggcatgagccactgcacctggccacattgcatttaaattgcctttttttctaggttattaaggtggaagcttagattatagattttagatttcccttcttttctaatgtactcattcagttctgtaaatttccctttaagtactgtttcactgcatcccacaaattttgatgagttttattgtcattttcattgaagttgaagtacttttaaatttttcttgagacttctcctttgaccttaaaatgtgttgtttgatctctaagagttttcgggtcttccagctatctttttattattgatttctaatttaattccaatgcagtctgagagcatactttgtataatgtccattattttaaatttgttgagatgtattttatggcttggaatgtggtatatcttggtgaatgttgattgtgagcgtgagaaagaaaatatattctgctgtcattggatgaaatattttacaaatattgatttgatccagttaattgatggtacttttccattcaattatatccttacctattttctgactgctggacctgtccatttctgacaaaggggtgacaaagtctccaactataagggtgagtttatctgtttctccttagagttctatcactaataatatagtaactgtgaaaagtagattctcgcccatcttcaggatttactggtttttgtttgtttgtttgtttgtttgtttttgttttgattgttgtagactacctctgtgctgaaaattggccttaggtgtaaactttttttcccccataagttattagggtacaggtggtatttggttacatgagtaaattcctttagtggtgatttgtgagattttggtgcacccataacctgagcagtatacactgcaccacatttgtagtcttttattcctcacccccgctcccactcttccccccaagtccccaaagcccattgtatcattctcatgcctttgtgtcttcatagcttagctcccacatatcagtgagaacctacaatgtttggttttccattcctgagctacttcacttagaatgtgtccaatcttatccaggtcactgcgaatgctgttaattcattactttttatggctgagtagtattccattgtatgtatatataccacagtttctttatttattcgttgattgatgggcatttggttggttccacgattttgcaattgtgaattgtgctgctttaaacatgcatgtgcaagtatctctttctaataatgacttattttcctctgggtagatacccagtagtgggattgctggatcaaatggtagttctacttttagttcttttaggaatctccacacagatttccatagtggctatactagtttacattcctaccagcagtgtagaagtgttcctggatcaccacatccatgccaacatctaatgtttttgattttttgattatggctattcttgcaggagtaaggtggtattgtattgtggttttgatttgcatttccctgattattagtgatgttgagcatttttttatatgtttgttggccatttgtatatcttcttttgagaattgtctattcatgtccttagcccagtttttgatgggattgtttgtttatcgtgttactgatttgtttgagttcattgtagattctagatattagtcctttgtcagatgtatagattgtgaagatttcctcccactctgtgggttgtctgtttaccctgctgactgttccttttgccatgcaaatgctctttagtttaattaggtcccagccatttatctctgtttttattgcatttgcttttgggttcttgttcatgaaatccttgcctaagccaatgtctacaagggtttttccaatgttatcttctagaatttttatagtttcaggtcttaggtttaagtcctcaatccatcttgagttgatttttgtataaggtgagagatgaggatgcggtttcattctcctacatgtggctagccaattatcccagcaacattagttgaaaagggtgtcctttcccccactttatgtttttgtttgctttgttgaagatcagttggttgtaagtattggatttatttctgggttctctattctgttccattggtctatgtgcctatttttataccagtaccatgctgttctggtgactatggccttatagtatagtttgaaatcaggtagtgtgatgcctccagatttgttctttttgcttagtcttgctttgactatgctggctcttttttggtttcatatgaattttagaattgtttttttctatttctgtgaagaatgatggtggtattttgatggggattgcattgcatttgtagattgcttttggtagtatggtcattttcacaatattgattctacccattaatgagcatggaatgtgtttccatttgtttgtgtcatctatgatttcttttttttttttttttgagatggagtctcgctctgtcacccagggtggagtgcagtggcatgatctcggctcactgcaaccttcacatttccaggttcatgccattctcctgcctcagcctcctgagtagctgggactacaggcacttgccaccacgcctggctaatttttttgtattttttagtagagatggggtttcaccatgttcgccagcatcttcttgatctcctgaacttgtgatccgcccatctcagcctcccaaagtgctgggattacaagtgtgagccaccaggcccggccccgtctatgatttctttcagcaatgttttgtagttctcctggtagaggtcttcaactccttggttaggtatattcctaaggtttttttttttttttttttttagctattataaaagggttcttgatttgattctcagtttggttgctgttggtgtatagaagagctactgacttgtgtacattaatcttgtatccagaaactttgctgaattcttttatcagttttaggagctttctggaggagtctttaggattttcaaggcaagcaatcatattggcagcaaacagtgacaatctgacttcctctttactgatttggatgccctttatttctttctcttgtctgattgctgtggctaggatttccagtactatgttgtaaagaagtggtgagagtgggtaaccttgtcatgttccagttctcagagggaatgctttcaacttttccccattcagtattatgttggctgtgggtttgctgtagatggattttattatattaaggtatgtccctttatgccaattttgctgaaagttttaatcataaaggaatactgggttttgtcagatgctttttctgcatctgcatctattgagatgatcatgtgatttttgtttttaattctctttctgtggtgtatcacatttatttacttgtatacattaaaccatccctgcatccctggtatgaaacccacttgatcatggtggattatctttatgatatatttttggatttggttagctattattttgttaatgattttagcatttatgttcatcaaggatatctgtctgtagttttcttttttggttatgtcctttcctggttttggtgttagggtgattctgacttcatagaatgaattagggagggtttttctttatcttctgtaatagtgtcaaaaggattggtaccaattctttgaatgtctggtagaattctgctgtgaatctgtctcgtcttggactttttttgttggtaattttaaaattaccacttcaatctcactgcttgttgttggtctgttgagggtatctaattcttcctgatttaagctaggagggttgtatttttccaggaatttctccatgtcttaagggttttctagtttatgtgcataaatgtgctcatagtagccttgaatgatcttttgtatttcagtggtgtcacttgtaatatctcctgtttcgtttcttagtgaggttatttggattctctgtcttcttttcttggttaatcttgctaatggtctatcaattttatttaacttttcaaagaaatcagctttttgtttcatttatcttttgtattttttttttgtttcaatttcatttagttctgctctgatcttggttatttcctttcttctgctgagtttgggtttcatttttttcttgtttctctagttccttgaggtgtgtccttagaatgtcagtttgtgctctttcagtcttttcaatgaggtgtttagggctataaattttcctcttagcatcccctttgctgtatcccagaggttttggtaggttgtgtcgttactgttgttctgtttgaagaatttttaaatttccatcttgattttgtttttgagccagtgctcattcaggtgcagtttatttaatttccatgtatttgcatggttttgaaagttcctcttggagataatttccagttttattccactgtggtctgagagagtgcctgatataatttcagttttcttaagtttattgatgtttgttttatggcctattatatggtctatcttggagaaagttccatgcgctgttgaacggaatgtgtattctgtggttgttggatgaaatattctgtatatacctgttaagtccatttgttccaggatatagtttaaatccattgtttctttgttgactttctgtcttgatgacctgtctagtgctgtcagtggagtactaaagtctcccactattattgtgttgctgtctatctcatttcttaggtctagtagtaattgtttgatcaatttgggaactctagtaataggcacatatatatgtaggattacaatattttcctgttggacaatgccttttaccattatataacgtccctctttgtctcttacaactgctgttgccttaaagtttgttttgtctgatataagaatagctacccctgcttacttttggtgtccatttgcatgaaatgcctttttccaccccttaagtttatgtgagtccttatgcgttaggtgaatctcctgaaggcagcagatggttggtgagttattatccattctgtggatctgtatcttttaggtggagcatttaggtcatttacattcaattttggtattgaaatatgaggtacccttgcattcatcatgctctttgttgcctgtgtactttttttgtttgtttgttttttgtttttgctttttaacttgtatttttgctttataggtcctgtgtcatttatgctttaaagaggttctattttgatgtgtttccaggatttgttttaagatttagagctccttttagcagttcttgtagtggtggcttggtaatggtgaattctctcagcatttgtttgtctgaaaaggactgtatctttccttcatatatgatgcttagttcagctggatacaaaattcttggctgacaattgttttgtttgaggaggctgaagatagggtcccaatcccttctggcttgtagggtttctgctgagaaatctgctgttaatctgataggttttctttgtaggtaacctggtgcttctgtctcacagcttttaagattctttctttcatcttaactttggatagtctgatgtgcctaggtgaagatctttttgccatgaatttcctaagggttgtttgtgcttcttgtatttggatggctgggtctctagccaggtcggggaaattttcctcaattactcccccaaatatgttttccaagcttttagaattctcttcttcctcgggaacactgattattcttaggttcaacataatcccagacttcttggaggctttgttcatattttcttattcttttttctttatctttgttggattgcgttaattcaaagaccttgtcttcgagctctgaatttctttcttctacttgttcaattctattgctgagactttccagagcatttcacatttctaaaagtgtgtccaaagtttcaagctctgaatttctttcttctacttgttcaattctattgctgagactttccagagcattccacatttctaaaagtgtgtccaaagtttcctgaagttttgattgctttttctttatgcatctatttccttgaatatttctcctcttacttcttgtattgttttgtggattttcttgcattgggctctgcctttctctggtgcttccccgattagcttaataactaaccttctgaattatttttcaggtaaatcagggattttttcttggtttggatccattgctggtgaactagtgtgatttttttggggggtgttgaaaagccatgtgttgtcatattaccggggttggtttcctggttctttctcatttgtgtaggctctgtcagggggaatatctagggctgaagactgttgttcagattcttttgtcccacagggtgttcccttgatgtagtactctcccctctttcctatggatgtggcttcctgtgagctgaactgcagtgattgttgtctcttttctgggtctggccacccaggcagtctacccagctctgggctggtaccaggggttatctgcacagagtccttcagtgtgaactatttatgggtctctcagccatggataccagcacctgttctggtggaggtgagttggggagggggtgcaatggactccgtgagggttcttagcgttggtggtttaatgctctgattttgtgctggttggccttctgcgggaggtagtgctttccagagagcatcagctgtagtagtatggagagggcccagtggtgggcagggccctacaactcccaagattatatgccctttgtctttcgctactagggtgggtagggaccgaccaccaggcgggggtggggctaggcatgtctgggctcaggctttccttgggtgggtcttgctgcggctgctgtgggggatgggggtgagagtcctaggtcactggagttgtgtacctaggaggattatggctgcctctgctgagtcatgcaggttgtcagagaagtagggaaagccagcagtcacagccctcacccagctcccacacaaaccgaagggcctgtctccctcccaccgtgcccctgccaagagccccaagtctgtttctgggcgtgggcgagaggggcttaaaaacttgccccaggctacctacttcccagctatgaaagaaaagggcttggtttttcccctccctctggagcctgcacaccggatttgcaccgtccccgagttctggccaggaggcttctcatccgttcgaactgttacaatgttcagctggagatttccttctccctgtgaagttttacccactgctcctctggctgccttcccaatggatccctgtggtgccagcaggaatgacctgcttgggaacccagtgagttcccagtgcctttctgctgcttcctctacccctgtattttgctcgactgtctaaattgactcagatccaggtaaagtcggaaacttctcccgcaacagaccttcactttctctagtgggggtgtgtgttcaggagaggagggtctccctttcccgcttctgcagctggggcactcacagtacttagggtgtctcctgagacctgcaggagcatttcacttccttcacagagtctgtgggtcctctcgggattgctggtttgttcttgcagtcaacctggagctaaaattcacaaatgtgagcctccacacgctgctctgtccagtgctgcaatctcaatctagtcctgcctcccatatgccatgatgattggccttaggtataaatgtaaggttctttcagttattttctgagcctgtgtcttttctgggtatgtgtgatgactttctaatttcccctacataggtgttagtctttgaatatccaagtcttcacactgtctgtatccttaaaaagggaaaagaggaaaataaggggggaaaaaggcactggccctttttatcccccagaagtcacttcagttggataaggtgggtcttgcagcaatgggcagggtgtacaacaatggccaccacctctttgcacctgtgactgggatcagtaatcaacaatcaacaatcaaagtgcagactcccaatatttggaggacagttccctttttctcactttggctcttgcaagctctgtgcaagctgctccagggacacatgctcagctatgtgccatgggcctgggggtggtggatgggtaggtactactgtactagagctaaaattgaccaaaattaactgtattttcctgtccaacccttatattgaagttgcaagccttcaatagaccccagagtttcaaaataattgcatcaaacagattctgccagtaggtaaaagttttgtttagctgggagacagatttcctggtgcttcctactccttcatctcctctttaccctatatctgtaatgctcttttttatccctgacaattttctttaacaattttcttgatccactttgtctaaaattaatatagctattccagctttattttcattggtgttagcatggtatatttttctacatcgctatacctttaatctgtatcttgacatttaaagtgcatttcttatacagaaaatatagttgggtcttgttttcttacccattctgacagtctgtgtgctttattttatttttaattattttaattttaattttttatttcaataggcttttgtggaataggtggtgtttggttttgtggataagttttttagtggtgatttatgagattttggtgcacccattacccttttcaattagtgcatttagaccattgatatttaaaataattattgatgtagttggataaatatctacaatatttattaccttttcctatttgctgctcttattctttgtttcatttttggtcttctattctttgccttctcttgttttaactgagcattttatagaattccatcttttcttctctcttagtatgtgaatcaattttttttctttttctttttttctttttgagatggagtctcgctctgtcgcccaggctggagtgcagtggcgcgatcttggctcactgcaacctctgcctcccagattcaagcaattctcctgccccagcctcccaagtagctgggactacaggcgtgtgccaccatgcctggctaatttttttgtatttttagtagagacacggtttcaccgtgttagccgggatggcctcaatctcctgaccttgtgatctgcctgcctcggcctcccaaagtgttggccaggctagtctggaaatcctgacctcaagtgatccatctgccttggcctcccaaagtgttggggttacaagcatgagccaccatgcctagtcagattttctttctttacatcaaatattacaagcatttttttcaggtcattatatattatataaaagtataattttgttaaaaaaagtcgcatagtactctattatatctctatctttcccagctatctctctcatatatacatatatgtacacacatacatataacataaataaatataaatgtaatttatttaataggaattcacatatatgtacatatatgtatgtatttgtattttatgtattcataaaattcatattttatgaactcctattaaataaattatatattattttgtgtgtgtgtgtgtgtgtgtgtgtgttgtgtatagatatatcctaatatcctagcaataagctagtgttaaacagttgagtttttttttttttttttttttttgagacagagtctcgctctttcgcccaggccggagtgcagtggcgctatctcggctcactgcaaactccacctcccaggttcatgccatcctcctgcctcagcctcctgagtagctgggactacaggcgcccaccaccacgcccagctaattttttgtatttttagtagagacggggttttaccgtgttagccaggatggtctcgatctcctgacctcgtgatccgcccgccttggcctcccaaagtgctgtgattacaggcgtgagccaccgtgccctgccatcttacttacattttttttttttttttttgagatggagtctcactctgtcacccaggctggagtgcagtgatgtgatctcagctcactgcaaccactgctacttaggttcaagtgattctcctgcctcagcctcccaaatagctagaattacagatgtgcaccaccacacctggctaatttttgtatttttggtagagatgaggtttcaccatgttggtcagactggtcttaaactcctgacctcaagtgatctgccagccttggcctcccaaagtgctgggattataggcataagccacagcacccggcctacttacattctttcttgtagtaattggtgcacttaaaaattttattcatttacttatttaattatctataatagcttatgtaaacaaagtaaataagtaagatacataagtggccaggtgcggtggctcacacctgtaatctcagcactttgggaggccaaggtgggcggatcatgaggtcaggagatcgagaccatcctggctaacacggtgaaaccccttctctactgaaaatacaaaaacaaaattagccgggcatggtggcagtcacctgtagtcccagctacttgggaagctgagatgagagaatggcctgaaccccgggaggcggagcttgcagtgagctgagatggcaccacttcactccagcctgggcagcagagtgagactccgtctcaaaaaaaaaaagatacgtaagtatcttatataagtaagataagtaaatgagaaaatttacttatcagaatttcttgggaatgatttatagccctgaaattacttaatgaaagagatgggttttttttccccaagactttgatacatactctcacattctacttcaaaaacattgtaccaatttataccaaaagtttctttataaagagttattaaacataaaagtcatgttaaaatagtgacttctactgaaagaaatgtaatggtgaaattgctggaagtgccaagtaatacaggcactaagaaatgactcattcattcattcattcattcatttgctaagaggaagtaatttacgattttcttaggagtttatttactagagtgtctgtgggtgaaattcagattccactgggcaaatgaggaaatgaaaaatgtgggaatggattcctttataaagaagtttgcctgtgaaggaaagaagagtaaatagtgccattgctggagcaagttgggccgagggagatgtgctgagagagagatttatctgtgcatgtgaaggagctggtggaggaggcagaagcacgaaagagaagactacacatttcattaagagaaacaaaatcaaattttattttctttgaggaagatggaaggaccaaattaatatgcctctgttggaattttgccctaaagaccaaaattccagaacattctgctgatagaagccacagatgtgggccaattgtaggtatcggatcagagaggagaatcacttttttgccgtagactgccccatgcaccggcaccgtaccagccctggaggtgtgtggcgagccatggtccctttcctcatggcatggttcttggtggggaagacaggtatgttcccatctccacgccatttgatgagaacaatgcatatatacatgggtagagggcgcaaataaacttcctagaggggatttggaaagcctgttgctgagagagaacacaggagctgtgtcaggggatatccaggcaggtacttctgggcatgctgcctttcttgttggagggaagagggctgcagcgtacagagatcagaaaagcacaggacattccaggaaatgcaccttgtttgttgtctttaactggcagccaaaggattgtaaagctggagagagtctgggccctcataggagaggggttggagcctgagccttgtctcactgcccagctgtgcccttgtggttataactgggcatgtgcataatgactatatgcgtccttctgggatgtagccacatggtcttcattatattctcaaaggggctgtagatcccttaaaattgaagacttgctgctgagggcaaggggcacatttggcagggtttgaaccagaaaagctgaatcattgcccttccatgaacaggcttggggcttgtaataaagtttccccttgtttctcaggacagcttgcttccctaatgagccagcttgataaggtcgggccacagagggcgatgcctgcgaggcacttacgtgagcacagagggctagtcgaaggggcaaggatgcagaagagaaggttgtgctgggctctgccactgcaggaagactgtgggctctttgagatggaggcctgaactgtcccctacccctccttccccctgcacaaatgtgattatgcctctgcagagcgcctggaatcaggttagcgtcattgagcaatgctgagctggagtaatcagagcctggagcggagcaggtgctggctttaaagtggcttctgagaattaggacaggctgacttgtagctcagccccacgtagacaagccacttagaacactgtccttgcagcccccaggcctcctccttaccacagcaaagtgcttgggtttgttggaggggcctctggcatggcccaggtgctgagctcgttaactgatgttcagggactggtgtcccaggggtcctgtttgcccagcatgtggcaggacaacaagagctaaccaagcctggggtcacatttggtctgctcctgcctatctgggtgtcctgggacaattacccacctcttggagcctcacataagtcaactgtaaagtgggaatcacgagcatatctaactcataaggtggtggcaattaaatatcatataggaaaggctgtcagcattaggcctgctgcagagttagccgcaaagaacatcacccctattctcaacctaggccactgccaggacaaggccgggttttattgtttctgcaaagatgtttcatactcagaacaaaaaaaatcagtaattacataagaatctaagaataaaggtttatgttaaccaaaatcttaagagaaatgcagtattactgtttggtgaacatcactctagatactcttctatgcacacattaatagagagaaaataattttaataagggcacatttaataaatttttaataatagaagttattggctgggcatggtggctctccccagtaatcccaacactttgggagaccgaggtgggtgaatcacctgaggtcagaagttagagaccagcctagccaacatggtgaaaccccgtctctactaaaaatacaaaaaattagctggatgtggtgcctgtaatcccagctactcgggagactgaggcaggagaatcacttgaacccaggaggtggaggttgcagtgagctgagatcgcaccactgcactccagcctcgacaaaaagagtgaaactccatctcaaaaaaaaaaagttattgcatttagtttagtgtttaactgaagaaagtcagatgaaacagaaggaattgctaaactagagatatgtcatttctaagatatgactctgggagttgagaaaataagtttcaagcaatattaatattgttaagtcattctttttcgctattctcttaaggataaagataaggcattctaagactctcatgctctacaaactgagtagccaggtgtcttagacaaagtgctttaacattcaattatatgtcaagatgaaattgcaaatagcagagaaaaacaacacactgacttcaattcccactaaatgacttatcttgccaaaatgaaacaaatgcggagaattattgatgcttgacatgaggaggggacatccagaggttaagaaaggatgctgacagcaccaggagaaacattgaggtatgcaagatgttagcccgttggcacctgatagaccgggcaggtctgtaagtgcaatacgttgctttgtaggtaagaaaaataaagcccagccaggtgccaatgtgacatggagttgggcctccagcccaggtctctgtgccccacatacatggtttaactatctgtattcactgtgcctttttactatctgtgcttctgatgctgtgacacctttgggtcttgctgaccctggagggactgcccttctcagggagaggggtttcctagagctcttaaaggactcacttgcaagttcacctttcttttcttttcttttttattataagttctagggtacatgtgcacaacgtgcaggtttgtacatatgtatacatgtgccaggttggtgtgctgcacccattaactcgtcatttacattaggtgtatctcctaatgctatccctccccactcctgccaccccatgacaggccccggtgtgtggaactcaaacaaatttgtaaaaaaaaagcaaattcacctttgaaatgcaaaatcatcagtacagagctcctaccccagcatctcctctgtggggctctcacactctgggctactatcctcctgccctgaccactcaagggctaggtaccagacatctagggacagccactgctccaaatgtgacgtggagcagaccaaatgcgaccccagagcccactgaaattattcaaaccagccgatcctaatcctgctcacccttgccctgcctggttcttcctgtggaaaccacaacacaggcccttgccgctgtttttcccccacccctctgctgcccaactgatcctcgtgcttccccatgtccccctccccttggggactgtgaggaacaagctgtttttaatggcagtcatctcctgacttgttgggctcaccatcctgaacaagaagaaagcctacatttaaacagactgcccctcctgcgcctgagggtagccccttgggggactgactcccttgggcatagctcagtgacacagagagcccttccagagtccagccaggacctgttttgggcccacgccccggggtttggcatggaaaactctggtccctgagcaggcatcgctctgtctgagaagtaccttgtccagcccagccacctgtgagaggagcagggcaaagctggtgagacgaaccttctgcaggctaactctgtgctacctgggcatgaacactttgtctctctctaaaaggaaaagttggtttccaggtgaaatgcgaggcagtcataggtgaaatggagccacaaaggtctcgaactggggttctcacatacgagtttctgacctctctatctttatcctcaggacacatggcattgctaagactttacagggggctcaataaaggtcacacaaatttaattctattccacactcttgtcgcatctgcaaagaaatttcattatctagactgcatgacatccataaatcaattaggccctttggttttgtaaacataatgtgcgttttgatcctttggagagagctgtttcaattcagcaataggtttcagcatctatgcaatgtccagcaaagtgcaaatgctcagcccaacacaaaacaatgagacagggtccctggctttgggagcatcatgggtctggagggagagacagacatgtgtgtggggacaacacagtcaggctgtgccagtgcgatcgtggcaccacaaggtcctcagagctcgggagaggccgcagtgactcctagcccgtattttctgggttgtgtgactgacagcactcaatgctttctcagaacatcccttttaaaattattttcaatgtcagcagtgttttctcatgacctcctgaggatttaattaatctttgggaacagtatcattcagaaagagaaaggcagcggattaaagctggtaaatgatactcttgctcaaaatcctagtgtgactcttaactgatgccaaagtctgttctgaaagaagcattccatgagtgccttgggcagtctgggccctgctggagggagactcatctctactgcgcttgctctgctctgtgcattgcacatgtgtgtatgcacacacacacgtgcacacacacagacacacacacacccccccaaactaggaaaaaatcccaggcttctgctccatagtagtaactatgttcttacattctctatatatgtatatatatacacacacatatatatatagaaaataaaatatatacacttgtgtatattttaattataacttaattataaatttaattagattataattaaattaaaatgtatatatggaatataagaacatagttacactaatgttacatagaacgttaattaaaatttaacaaaaatatacacacatacatatatatgtatatttaataaagtagaatatagtatatgtatatttactaaagtagaatataggtatcattgtccaggtggtagattgcttcatgtctgccccaaggcaccctggaaaatcttttgcaacttcccagtttctaacctcagagcttagttttctgtctgcaaatctgtttctcttaacctgttatgatgctttcacccaaagattcaatgtgcatccatgggcttacgtttccatgtagcagacattcattgggatctcggctcatggccccaggttggaccatggggcagcagttgcttgtgtggaggttacagcggtgactggcacctggggaataaaaggctgtctgctttttaccctctagatggttgccaccctggggaccacaacatgctgctcctttgacaatctcttagaagtcggtcctatctgtaagtatccgattccattttctttttggaaaatgttctctgtacacggggaatttagcaaaccttcctcgttgatctctttcttgtcgttaacttcatattgtgatggtttgcccagctcttctcgtatttgcaataacacaaacctcattagcttgaactccacaaactcagaatttgggctaattggaaaagaactgagcttagttctaccaacacactatttgtaagaaaaaaaatccgagcaatatagaagttatgtaaaattgcaggttatgttggccctgttgaggagaataaactcttcaaaatcttagagtaaccaccttcatatgtgggtcgtgcatacacctgatatgagaattgtccacacttgaatttaattctttggtatatccctttttcacctttttttggaattactgaatgcagttaagaaaattgctgaaggtagtttagcaaatcaacacaatgaaactggatttcgccaaggaataatctgtgcttcagatgttttcctggtcactctcacctcctcccttcctcattcagagatcctaggttttctcattgagactaggatgctgtgttttcaaaaggtgaatgtgaatgagcagctctgtttctagagtttcacctttgacatgtagctctgggaactcagcaggccttgaagctgcttctgtggacagaagaaccctcgtagggcagggacactggctcagggggctccccctttctctgtccctctaggatgggaatgttctgaccgctcggctgtgagtggagctgcccaagtggggccttcagatcacatacctgtggcctgtgccagatcccacaacagctaccagggaattggcttcctccttagtctgcacaagccaagcacagttctcacctctcctaacccaagagtcacccatagtccatactcagaggagtggaccctcctctcctgggcgttggcctcccttcttggggtcagcagctggggaaggccggtgctgaaggtgcaggtgcctttgtgtgagctagacatgaaattggtgacaaggaagctagggtgcagcccaggatccacccctgaatcttacattctgagcttcatttatgctgtctgtaaagtgaagagaaaaaccccacttgtgctcataaaataacaagatttccccacacgattattcagaggataaattaatgcagggaaaatgcaccatcccaaaggtagagtgcattgctgcacagcaaggaatgcagtgctgggaactactgggaggtgggtggcatagacttacccgctctcacagggtttatgctccaccgtttatgctctgtggcacacagctgtaagaacaactggcgggaagtggtcgtgcacagccccgggctggggagaagggatagaactggctgactcaggactgcagccacagcattggcctcatcagctgcaaaccttcatcagctcagccaagcaacttggagtcctctgactcagatgtcaggctaagaactgaatgtcctggccagtagctggctgatgtaattccctagggctatcggatttaaagggccgaggtcttctgctggatagagcccacatggcctgctgtcccctgggccaagtgtgggctgcccgctggaccatggagatgacagccagcgtgtgtcacctgccagtcacagtcccctggatggatccagctcaggccttcctgctatctggggccccctcttctttgtagaggctggaggctgtggacagagcttgatttatgatttgtttggtttgaaacactgaggttgcttttggggttgtgcagaaggagctgacatgggtgaatgccaaaaccctttcatccattggcagaatgcataggggaggtcagttttgacaattcctttttttttctttatttttgagatggagtcttgctctgtggcccaggctggagtggcacaatctcagctcactgcaacatctgcctcctgggttcaagtgattctcctgcctcagctttctgagtagctgggatcacaggcacatgccatcatgcctggctaatttttgtatttttattagagatggggtttcaccatattggccaggctggtctcagactcctgacctcagatgatatgcccgcctcagcctcccagtgtgatggaattacaggcgtaacccactgtgtccggccaacatttccatttttattgatggtgttatattactaactgttggtggtaccttaacaattaagtcagcacccttttacctactttccctctcctgctaccattttcctatcaccagatatttagcattctccaactccaagcgggactgttctgagatcctgagctgaccttattctatatatgattagaataatctaacataattcagataagttattcacccaccatcatttgacaaagaaaacaaatcagaagatggttttcttccaattgctgccttaggaaagacattttctttttattgcatttgaaatgatttgccagtgagggtattcagattggtctgcttggatggatcagttgtctggcaggttttactgagaagatggaatacaaaaagtggatagttgaagtcagttaggttgccggtggggaagtggggaaactgaggacgagggtatgggctgagttggggaggccatctcaaggtgtgaggaagggaatagcacagggcaggcagccaaagctgcatcctgaggtgccagcataactgagagaggacgtgcagctggaggggcagccaggcctgccgcaagttcctgggaagtctcagaaggaaagagtcactgacagcaggaagctggagggttgtgaggctgtcccattcctccccactgaggcagccttgcctcagggctaggtgtgcccctggtgcatgcaacttctcaagctctggccgagggtctctgtgtctgcctggttcctagatgggccgtgctatgcagtgtgtgctgttagtggatcacatatgagatgcagaatgcagaatgcagaggcatgcccacagctccatgcatccccatggaaaccagagaagcccttcagagtccacttcctttaggggtctgtaagttcccttctgcaggagttgtaggccaactgcaagcttagagagaacacagtcctccacaaagctgataaaagacataaggcgtttcaaagctttgactcagtttaatcatcaggatgaaagccctcagttggattaaggtcaagtgtgtcctgcggacacggatatccaccccagggcatgggaggccaaaggtcacagagcagtgtggacctgaaccgaggcttaggggctcatcacttcccccagaatcagtctcacctggtgcttgcataaccccagatggatgcagcagtgagccaggaagagcacaaggccttaggatttgcagagtttctccctgaggagtcactcagtaatcatgggatgtccatgcctgtagctcagatcagcggtaaggttgagaaaaacctcagatcacatcataagataggtgtaaatttgaagcttgctgtagtctgaacgtttgtgtcccccgcaaagcccatttgctgaaattctaacctaaggtgatggtattggaggtggggccttccagtggtaatgaggtcagcacagtggagccctcctgattggaactgtgactaattagtgcccctgagagtctcacgcctcattgcacaatgagcaccatggatggtgagtgaacggtgaatccatggatccctacaaatgcatatgctgaccctgacacctaccccacggtaccctgacactggtatccaccctgtgaggtgagggtggctcgcgccctctctgtggtccttcacccttcaactcttactctcctgggtgcctagggctgagaggcagcaaccatggaagccacatttatttctcccctactcagtgctggggtcctggcaagcacattgtaaatattcccttgctcatcccttgggcctatgggtactatttcatctccatcttcctgggaggagagtgaggcttggagaagtagatagggccccttggctggggagcaactggaagcaggagttgagcccagatctgtcaaaattgagggagcatgctacatctgtggctctcccagctcctgaatgaggcagcccctgcccacaaggctgctatgcatggttggaaaacagaaccctgttcatgaagaaagcaggggatggtctaagatggtgtaaagtaaagaacttcacctggtggtggggatggagtggggcaggtagaggtcagcgtggactgtgtgcagacctccccttggatgatgtttgggggaggacttgagaatggattagcaaagggaaccaggaagggaattccaggtgggtggaaagggtggtgtcactggagagaaatgcaggtgagtaacatgaggctgtcacacgatggtcccttggagttacacttagccgccagggtcaggagagaaaaccaagtggtgcagtggcttccattttccctggtgtgtctggggccagcagcacacacactgccctcagctttagaccctttgaatgagggggccttttggggattcagccattagttcagcaaatactgttggcatgctctacccaagaaggtgctcagacagggcgaggtcagctggcaggctccgtggtgaggcatccatctggggactcacaagttgattctgaactttaggcaacaaggaagacatatggctgcacgttgatgcagcctacgcaggcagtgcattcatctgccctgagttccggcaccttctgaatggagtggaggtaggtgcacccttcgctctccctaaggctgttttcacagtgctctgttattgacctctcccttcatgaggagctgacgtccaatctcttgctattgaggtttgtttcagccaattatgtttgaaccaattccgacttcctcagaataggggctgagagccttccccagccatatagcctgtcctcctgaaatactcctgacacttacagttccatttcaatctacacaaatcccaaacagaaagaataaatgttagcttataaaactgtgggaaagtaggaacaaaataaaatcttaatgaacttaaactcaaaagagtaatttaaaataccaacccgcaattccatacaatctggttcaatatgacagtcatgttctgcccatacatctgaacatgatattcactttaaccaatattgaacgagaagctaccaatgcatttaaatgcccctagacagtcttctggaaattgtaaagcatgatctttaatgctaagtgaaatgcctgcttcttttgagaagtagcaatcaaaattattgaccagcactccgcttctccaaaaagcaacagaatgtaaattggtacagacttaacacaaaaaaatgaccttattgatatactgtggtgtgttatttcagactcaagcgggatttcattgttggtggtggctcatagggtaggaagtctcttctccccaagaactcagctttgaatgccatagagggtcctgagaggcagtctttggcagtgtttctaagagaaggaggtagcaaagcaggggagctgtggcactggccaagaaagaaatgctttctgccaaggggcaggaggtgtcgtgagacctcacccatgtgtgatggcagatgaagggcacagtcctctgcattagactccttggtttgaatcctagatttatccttaagactagctgtgtacccttgggcgagttagatatcctccctatcctccagaaaatagatttcataagaatacatccggtgtgggattgtcgccaggagtagatgagttaatcatgttttaagggcttaaaaacagtgcctggcagacagtaaatactgaaattgcattaggtgcttttgtgattttctactacgtcttagaaaaactttcccttgacagcttcctctgcttgcatgtcaggtttgctaatcactattctaattacaactttgaattctcataatgctgtaataccagaaaagagggtaccagaggtatagaatacaaatgtccccatctttggaaagaataatcctcttactactaatcaatgaagtagtattctggtttatgtctgcatcacaatcattcactcattcattcaataattacttgttgagtacttaatacaacctaggacttacatgatggatccttgggggtaaatggagcttccaaagacctatgtacgcactggagagagggtatagtatatgagaagttctcataatgtgatgccagtacccagctgatatagttcattgccggtagctagtttggtgcgtgtttggtgctgggaaacgaagagtaaatctctgtatcatataaatgcatggcatgatggagataatctccattatttgaaacatctgtcctgggacagtttcaagggaggaagggctaagcagtcctctgggatttatgtgccctccccacggctggcctgagcttgatgctcttttctaactctgggtatcaggtttagggttcgtgatcttttcctaccactgctcttcttttccccaagaactgacaacttgaggtttcatctttcatagaagggtgcctcattgtcagaccaccacagcaatgggctttccagccagatcctatcagcaacagacaggatttcatgctgtacaatgagtcactgccatttttcttgcattattgctcccgactctctttccatgcccagctgagggctgtgcgtctcagtggggcagataaggaggctgcaatatcctgttgtggccctgcccttggagataagagcctttctctccggttggcaggaggaaaatatcactgctgggtaatgagagaagtttaaacagatcagccccataggagggaactcataagactcctagcaaacagagctcctctttaaccttttgtctccttttatcaacaaatgaaacttgctgtaatttcctgtccttttctcaaaattacttttattaaaacctagaaggaaatgaacctgggtctccagagcagtggaaagttgtcatccaccaaccaaatgcctcccaggacgccccccaggtccctcaagcttctgctgcctcctcggtgcacatccctgaaaccaagtagacaggaggtgccctagggccttgggaagactgaaaagtttcccagtaggagagtcggccagactggcgcctcactgcaacagccacctttatttcggtatcaattatgaatccagccgcatggccaaatccctggccattaaggtggaccctgttcctgttcaccagtcaggtgataaaccaggacatgcatttgaaaaagaaagcaccatttatgacagctcagggaaaatgcagagtgtcctcctctgccactcttggtggtttaaacctcttattttctccttgaaaataaggtagaccctaacactgatgcatgcagccagagccggttgttcacagtttttacccaggatcttccagctacgggagcctgtagctgttaggaatacaatgaactttaaaaataaaggagctggtcggggtgcagtggctcacacctgtaatcccagtactttgggaggctgaggcaagaggacggcttaagcccaagagttcgagatcagcctgggcaacgtaatgagacacactgtctctacaaacaaaattttaaaaattagctgtgtgtggtggcacacgcctgtagtcccagctacttaggaagctaaggcaggaggatcacttgagcttgggaggttgaggctgcagtgagctgtgttcatgtccagcctgggcaacaaagtaagaccctgtcgctcaaaaaaaaaaaaagagagagaagcatttaggtaaatgaggagaattgttgatatgttacagcaatgctggcaaaagaacccatcaattaaatgaaaactgggtttacccctatctactgtagattagtaataaaatttcctctttcccactgtttatcatgacacgtgtagtctgagaactttgctagctcagcaagtggaaggaacttcaagcatgaagtatttcacaggccaaatcagtacaattcctgtacgttgtgcttgtgaaggacaattctgatttttccaaatattccagtaatttaaaatataatatggatacattttatgtcacattagattatgtaaatttgaaaatgcttttcatttgggaatataaacttttaattttaaaattcttgttccattttatgagagtataatctagatatagcaaaacatacaaatcaactctaaatacatatacccacccccatgtacttaccacccagatcaagagtagaacaattccagcactccagaagactcccctacccactacaagttactactcccctgggcaaccctacctggcccctaccactgtggattagttgtgccataaacttttattatcatgtatggggtcttctttataattaaacatttataaagaaaatgttttctttttcttactcttgttctttggcagtttgcagattcattcaactttaatccccacaaatggctattggtgaattttgactgttctgccatgtggtaagtttccctgctcacagatgtcagttgcctgtccgaggtgacagtgaaagaagctggcagggaagatgccagagccaaaggggtgcaatagtcacttagctcactgcttgctgccttttctgaacccttgatggaattattgctaattcttagcctcactggaaacttttatctagggaatatcattgcaacatactggcataagaaatgagaagcctaaaaaggacaattttttatttgatttatccagcattgacagaaaacaaatgcaagtacacacttctaattcagtagcttgtgttttcattcttagattcgtaaccagtcttagtgtaatgctaagttttagcaatctgagtccaaatgcttaaaagtatttgctaaggccgggcacagtggctcacacctgtaatcccagccctttgggaggccgaggtgggtggatcacctgaggtccggagttcaagaccagcctggccaacatggtaaaaccccatgtctactaaaaatacaaaaaattagctgggtgtggtagtgcatgcctgtaatcccagctactcaggaggctgaggcaggagaatcgcttgaacctgggaggcagaggttgcagtgagccgagatcatgccactgcaatccagccttggcgacaagactctgtctcaaaaaaaaaagtattcgcgaaggaaaaataatagtaaccatgtttcctaagaatttccctggaaattcttttcttcctctcttttttttttttcgagacagtgtctcactctgtcgcccgggttggagtgcagtggtgcgatcttggctcaaaatcttttctttctttctttcttttttttgagacagtgtctcattctgtcgcccaggctggagtgcagtggtgcaatcttggctcactgcaagctccgcttcccaggttcacgccattctcgtgcctcagcctcccgagtagctgggacaacaggcgcctaccacgcccggctaattttttgtatttttagtagagacgaggtttcaccgtgttaggcaggatggtctcgatctcctgacctcatgatccaccctcctcggcctcccaaaatgctgggattacaggcgtaagccacggtgcctggccggaaattcttaataacagcatgataataccttggtgatatttagaataagaaaaagaactaaagcattaaagtgggtgatattacaccacctacacaatgtttaaagaaataatgatgatgggcagtgatacagggacactagaaactagtttctctaaagttttaaagtaagaagttgattgattgatcatagggccaggaggatttgcatgaattttgtacagtatgcaaaactgcaaaattttccaaatattcagaaggctttgcaaaattgttcagtatgtaattaagtgaataacttttcactttcctcctaagcatgaggaaagcagcttttatacaaaacaactaatgtcagctctcaaggttaccaaaatacccgtttgaccttttcctgttttttttttaaggctaaccacatttctagtcctttacttgtatacaaatcaaattattttttgtcagtctttttccccaaacttctgctatataattttaaaaccagttggtatgtgggcatttcagacttaattttgtctgaaataagtatttatgaaagacatggccgttatgaatgtgagtattcttttgtattcttgtggttgtgtttttctgtttcacccaaggtggaacacagtgaggacagtttgcaccgtgtgccagaggtccctttattcgaggggtaattttgattgaaatgtaaatccgctctgctgaggtttttggtcagtggggaaaatcctctaaggtggctggagttcggaaggaccaggcagagcatccacaggctctggcgggaacaagtggctctccctacttgcttttgttttgcaaggggcaggcgtcctcagatgccttccacaaaggaagccctagaaccacccttgagcagggcagggctgatgggctgtccggaggaggggttctcgtgcgccctgaggccgtcctcaatgcctggatagaacagtgatatcagcaaggctgtttagtgactgcggataggtacatccaggctcccttctaagtccctaacctctcgtagctctctggacccccacgacagccctgtgttgagggacacagacattgccacgctctctttacagatgaggaaactgaagcggtcagggaccagaaatattttgggtccctaatcttggaggcaaatattgacacacgataagaaggagtgtaatgaatgcggcgtcctgccctcaggtccagacaaccagtgcgtatgttaaggctgaagaaaacctgcttagtcagtgcggtggtgagaaggagttgagcctttcgggacgtggagtgcctgccgcagagctgatgccccgaggctgccgcagacgctgcagagctgatgccagcaagttggcggctgtgcgctcatctctcccggacaactcttccccggcgctcggggttcagttcagccaccagcctgtgaggggaaatttgacaaagtggaggtgatgtagggaagagacacaggacacacagggatgaggccaggccatttggaaaaggccatttggaaaatttccttgtagaaggaattaaacgtaagccctaagacacaagagaggcctgcggtgtctggaagtctgccacaagagaagggtgatggggttagttcccatcctctggagtgggcgacagtggtgggtcagggtggttgcaatacttgaggaacctcttaccttcctatgggcttgaaaggctacaaaatatgtttttaaattgcaatagagaatgtgctctttctctcctgagccggtgcgttctcgacagaacaagagtcaaagaatttggtgagatgctgtgtacctggaaaaatcagatctctccaaaacccaaggttttgtcccatgacactataaaaatggcatgaatgttgatagatgaaatctgatctttgaaagatttgtgttttaacacagaaattgctgatctttactgtttgggggcactgtgcctgcattagttggctagggctggcttaacaaagtgccatggacaagcggcttaaacaagagatgatttatctcagtcctagaggccagaggtctgagataaagccatcagcaggctggtttcttctgaggcttctctcctgggcttgcagatggctgtctctccctgtcctcacatggtcttccttctgtttacctgtgtccaaattttctcttcttataaggacaccagtcacattggattagggcctgttaaccaaaaagtatctgagacaggtctcaatcaattcagatgttttattttgctaagcttagggacattcctggaagaataaacatggaatcacagaaacagggtgtgctttgtgcctttccccaaagatgattttgaggccggcagtatttaaaggggagggcaagctggaggggaaagagggagggtatggtcacattactgaatccacgtgttgtgagagaaaaggagcaggtagaggaatagtcaatgatatatttgtctcacgcccagtaaatcagctctttatataagataaggtgagcatagagtagctacctgtagagatatttaaccttttatctgtagctttctgcttaggaacaaaaggaagggtatcttcttgcatgaaagcgtccagcttattttttttcctttggcatagtaaattgaggcaccaagtttttattttccgttcacatttcttcccctccccttttaaaaaaagtcttcagaaaatgcattttagaagaaaatgcgtctctagtcttggggttttgtctggtctcttgtgactaagacagtttatttctagacaggtcccacgtggttaggaaagctcatttttagcaggttgtaaagtctcatgacccatgaaggaaaaaaataggtggaggaagagagagagaaacaaacaaacaaacaaacaaaaataaagggagaacaatcctggaaaactgacataaaccatattactctgaagtccctatgtcagtaggcaggtatgaaagtgatttacgtatataaataggttcctgttattttcttccaaagttgacgttgtctagcttcagtttacagggctttaagaaaagcatagcttaatatttagtgatttcaaatcacgattaaaaaggaaaagaaagaaggaaaaaaaactgacaacattattttccagaattgtagccaggaaaaattttagaattcagcccaaattgtagaaaataataaaaacagacaaacattaggcaaggctagactctaattacagatgtactatagtttattttgaaacataatttttctctttccagttccccaattgtattaaatacaagattataatagggccaatttatttgtaaaataagttttagttctattatgattggcttgattatttggataaagtgcagcaagaataatcatttgccatataggtttgctctctcgctctttttgttgttgttgtttttaaattggttttgttggaatcttttcataaagaatctaagatttagagcttttgttgttgttgttgttgttgttgagacagagccttgctctgttgtccaggctggagtgcagtggcatgatctcggctcagtggcatgatctcagctcactgcaacctccacctcccaggttcaagcgagtctcctgcctcagcctcctgagcagctgggactacaggagcgtgccaccacgcctgcctaattttttgtatttttagtagagatggagtttcaccatgttagccaggatgatctcgatctcctgacctcatgatccacccacctcagcctcccaaagtgctgaaattacaggcatgggccactgtgcccggctgatttagacctttttaaaagcctcagtcccagtcaaggatttttctgtgcctatagatacctgtatgaattggttgaatttttctattttcaaggtcccaagagaacttgaggttcctagccctgttagaaagtgacattttttacttaccataggtcaggaccctgtaaaggacaaggtatggggccagtttttctaagaggcttttactagctctgtaggtcacccttattttctcaaggcaatctgaaaatgtcattccaatcaaagccttggtaaaataaccaatgacagaacaggatcacacagaggtcattgtaaaatcagtcattcatttagccaaagcgataactcaaagatttcacaacctttattctttgagagaagagacttacttttctaaacaataaactctaataaagacagtatgaggccaattaaatctctctcaaattttataaacaaatctattaaattttaatcatcttgaccaaaatatataatttccataaatcattttataaccttttataattttttaattaaagaatgggttaatgtcccaagaaaaccttgttaatctggcatagggacacagatgctggtcttgcatcagtgtacctttgatattagtgtttaatttatagagaaactaagctaattttatctgtcaatattagctcttccaatctatgtgtccacctcttctgtgatactctgatagtccctgggcctagaggggttgaatagttttaatttctggccctgtgtctcttgaacacagtttattttgattgtcatcttctcctgggtctgaagatgaggcttttaactgctgtcagtgtttaagatttagctggacttggtatcttttttagacccaggagtcaaagtcctgtaatagtacaatgactttagaagcaatacagaaagttatatggatataataaccttaattttttaaatctcagttttcgtaggactttaattagttagacataggaagagtgcatcctgtgttataagttttctatttcatagaagaatttagagaataatataggaagaaagcatttgctttaggctgcgtgtggtggctcatgcctgtaatcccagcactttgggaggccgaggtgggaggattgcttgaggtcaggacttcgagaccagcctggccaacatggtgagaccttatctctactacaaatacaaaaattagccaggtgtggtggcacgtgtctgtaatcccagctatcctggaggctgaggcacaagaattgctggaacccgggaggcagaggctgcagtgagctgagatggtgccactgcactccagcctgggtgacagagcaagactccatctcaaaaacaaacaaacaaacaagcaaacaaagaaaaccattcagtttagatctttaagttaagatatattttttaattaggccacaacatcagtcagaaccagaggggaaaaagttaaaggagctgataaaaagttgaaagagttactatctcgggccctcttgaaggggagagaaagctgaaaacagcgagatgaaattaaagttgaaattttggtttatgaaaattaaaatgtcttgtaattttattaagaataaaccagtaccttaagaaaatttagttgttctaacaatttttttagtttattagtgtatttttaatatcaaagcccaatttctagaaagactattataaataattttcttttaattatggccaacttgatcacataaatattttttcataaattctctttttataaaccttattatgacttacacaaaccatttactgaatacttggagtttctgttttatcccaaacatcctcttttttaaataaccagtgattttattttaggacaaaaaatatatcacacaacatttttgtcatgtaaaattgttttccttttaatctttcttaccaaaaataccacttaatatttataactttttttgcatctcttttatttactgtttccttttaccttgttttagaaacgacctttaagtaatctttgaattagacaaaaattatttctttttaataagaaaacattgtttttcagaaaaacattttcctatatttttttttaaattggaaatgacccagacatttaagcaatatctattattttgtttaatgttactttagattctaaattatatgtcgttttttaacaagcatttattctattatatttatctaattaattttttaatagcttacttataaaaactgatggtcatcatttaaagttatttccctgctaaccaattttatagcctgcgaatttcaggtgtttacctatgtaaaaaacttaaggttaaataaatgtatttgttttttctttttgccaaataattcagtattaactgtttgctattaaaccaacaatattaaatgccttacttaccaaaagttacacaaagataattctcttttgggctgcatttatggctttataaccctcattccaaatattgacaccttataatatttagcaaacataaatataaaactacttgaccaataaatctaaacaataatatgtgttgacagtacttaagactttctaattttatttggccaataattttaaagccagcttatttattaaaagttaagtcatgtgaacttgaaaagcatttggattatttactaaatttatgagtactcctttatttttaagccaatttggtaccttgtggccacaacacataacaaaatgcatgtatgtatacataaacacacctaagcacacataaacagtcatgcaaataaagatcctatagcttttacttcagaactctagccatgatatatcaatacagactcatcagtttacaaaaaaaaagattaaatagaaacagtggtttttatctcaacaccagtagaaaggtcctctaaactagaaaaatacattttcttaagcaaaaaacacatcctcgcgtgttttataaactttaccaaaaacacatcctacgatacactactaaccctaattctccctgaaaaatcaaggattacttaatttaatataatatgactttaagtgttcaaattactggggacagttttgagactaactttaccaaattaatcttaccaaagattactaaaactatatgaactgaaaagcctctgagctagtttctattagtctgataaaaacttacttttctttaggccaattaattagaactctttcatataattggtagcaaaatattatttccacatgacatatctgaacatatagacataacagacccaggcagaggcagatcttatatatttaaaatttttcatttgcctgttttcaaaaatgttctttttcctacttaaactattaaagttgtctggagggaaagagggagggtatggtaatccacgtgttgcaagagaaaaggagcaggcaggggaatagtcaattatgtattcatctcccactcagtaaaatagcactttacaacagataagatgaacttagagtagttaccagtggagatatttaaccttttagctgtagctctctacttaggaacaaaaggaaaggcaactccttgcatgacttagctttaagcttaatttttccttttggcagagtgaattggggtgtcaggtttttatttgcctttcaaagtccccaccatatgacctcattttactaaatcacctcttaaaggccttatcttcaaatacagtcagtcatattctgaggtcctgggaggtggagcttcaacatgtgaatgaggaggaagggggacataatttggtccataacagcgctcacaagaaatcactagttaaagccataagcctcatatctaaggatttaaaccaggtcagcttattttaaactccataatcttaatgatcatctacttactgatttgtttatttgatagctatgaaacttatattttcatttgatctcactatacccaaacacccacatccctgttttttcctcattttcttaccaccaaaaacttattttcttcattccacagtggatagtcttcacattgccttgctgacacagtggcctgtgctgtatctgatagtatgcaaaccaagagtgcatgcacgcaaagcaacatacgttttacaaatacaaatacaaacaaaaagatgcacatagaacccactgggatcacttcttatggatatagaagctggagaatgagacctgttttttggtgtaaatgagccaaaatcagggtcacttttgttcaagctgttattgacttggttttcactgtaaacactggaagtagtctcgaattttagcccaggatgtacagcctcagagcaaaagacaagtaggtggaacacagcatcccttcctctagacaccgttacattaaaatggcaatcattacaagtacagcaagtatacttcataatgaattcattattctgttcataagctttttagggactatattattatcccatctaagaggcaggatccactgatcatgcttggtcgaggttggcttcccctgcctgtttgcgaatggtgccttgtaacgtggagacagggagtggggagagtgagggctgagaatctctactcagaggctttttcacactgtccagatatcatgaaataaaaataaatattttgacagtctaagagaagattacagtaacgtgatctaccttaacacaatagaacacagataataaggacacttgtaagaaccagaattcacaaaaggacaaatattcctctagattcctaagagtttaaactaagcaaaaaaatcctaagtggtgaatttttaaagtgtcttttaaaatttcactaattcagtaaacaacatataaatggattttttattgctttcactggtttctttgtattctttaaaattagaagtgtttctcttttgtttaatgaaattttactaatggttagtccataatttaacataaacactttggttgtactctttaaatactgaaatagacaaaataattgaagtttctgaaactggcaatcgttataagcacagtaaatacattttataatgaaataattattctgttcataagcttcttattgttcatttgatattctgaatcttttatctgtaaatgtgagccattctgtccagagcttattgcctctttaatatcagatctccaaagaaagactcaaattccatacacacgaaaggcatatattatccacatttaaaagatggcctgtttttttttcccaaaatgttaaattttgccacaaattattttatagtgtttgtacacttctgttgcattgggaggtttttaaaaattctatttctctgaaacagttttaatcattctagtaatcgttgagacttgattctagaacttgttttaaaagtcttagtggatagttttctatttatctatttggattctttgcacttagatctgggaaccctttattatcttgaattttttatggatgttattgggaccaggaggtcatgtgagtgctcattcagtgagcactatgtagtgttgtagattttttaaaaaagaaaacgtaaggagccaggctttcaacccaacacaagggtccttttcctgatcccctaggaatgtgtctggttacagagagaggctttcctcaccaaaagtctcatgcaggtgaggtcaccatgtgaggtgactttggtgccacaaaagcatgtttctctgtgtgtgtgtgtgcccatgtatgtcctcaagtacacatacacatctgtttccataaaattctttctctttataatatccattaaatcttaacaagaaatgcaaatttagtacctaaatattgaagaggcgactaccacaggcccattagaaacatgggccaatgaataaagtataatgggaagctgcaaatactgagaattgaacaaaaagaaagatgcaaccaaacttgccacacacagctaaagcagcacctacaaaacagacatcaattgaaaagaggaaagccagaaaatcataagctaagtatcaaaattaagctagaaagcagcaacaaaataaacctccaaaaagtaaaaggaagaaagcaataagaattaagaaatgtaacaaaatacacaaaaaagacccaacagagaggatcgacaaagccagatgttggtagttggcctgcctaattacataaacgatctctggaaagataggtcaaaaataaagaaaacacagattaacttgtagtagaaaatacaatggcacaattacagatacttcagagatttccgaaaatagtaagggagcattatgagtaacatcatgccaagaattgcccataaacacatatattcaataactacaaccaaacatgataccaaaactgactcaagagtaaatagaaaacctgaaaaatcttattgttaatacaacatgtcaatagtaaaattttcttacagcagaaatacccaaattattattcttttttttttttttgagatggaatcttgctctgtcgcccaggctggagtgcagtagcgcgatcttggctcactgcaagctccgcctcccaggttcacaccattctcctgcctcagcctccccagcagctgggactacaggtgcccgccgccacgcccagctaattttttttgtatttttagtagagacggggtttcactgtgctagccaggatggtctcgatctcctgacctcgtgatcctcccgcctcggcctcccaaagtgctgggattacaggtgtgagccactgcacatggccagaaatacccaaattcttaaataatgagtatcctaaactgcaggaaacttatcagtccaatcctaagtataattcacagagagcagcaaaagaggccacactgcctcttatatcttgaagccagtctaaatttgattctaaaaccagatgagaagctgagacagaaaagctataaacaatctcacaaacttaaatgtaaaaattctatgtcaaacattagcaaataaaatccaatgagattttaaaaaatatagtataccatgtccaaactgtgtttaatctggatatggcaggatggtttaatagtagaagatttttaaagtgctagtcaccatgttaacagagaaggagaaaaaaagttatcatattagatgcagaaaaagcattagataaaagtcaacaacatttcaggacaaaatgtcttagtaaaatcggaacagcagagaacttcttaatctgataaaaggtaactaccaaaaaacatagtgaacctttacttaatggtgaaatattagaagcactccctttaaaatcagaaaaaaatgaggattcccataatctgcacttctattcaacactggactttcctaacctccataataatttaaaaaaaaaaagataaagaagtaaacatgtaaggatcagtatggaagacataaaactctcattgtcagatgatgtaacctcaataaaaagagaatcctcaaagtattattaataaaagaacccagcaagatgtctagatacactaacatttttaaggttgcatttttttacatctacattaaacagtatgtgtaatttttacaaaggtaacactctttataatagcaagaaaagatatgtttactatgaacaaacatatccaaacctgttcagatttatatggagaaaattctataattttttggaagtcattaaagaagtcctaagtaggatgatatgttcataaagaagactcgatattagacctcagcacaattctaataaatatcctggcataatatttatatgggccaagaatagccaagataattgtgaaaaaaaatatagtgaggaagttgcctccttaaatatcaacgtgtgtgtgtaaagtaaccacgactgaactcatgtagcaccagcgcgggcacagatgggtagagcacattagaagagagagccagaaacagaccccacatattccaattagggcttctaatgtttacagaattgttgcaatccaatatgacaagataagcaatctaacagaaaaatgaacaaaaaattctttatcaaggaggaaacagatatgcttaataaatacaaagttactcaccctccttagtaatcagaaatgtaaattgaaatcccagtaaaacactataggttgtttacaacagtctcttcatactaaacgttgaccaggatatggaagaggagctcgcagactgcagaactgttgtggagactgatttggagctattgaatacggccgtagatagatgctttcctccaaccttaacatagctcaccttgtgctattccattggcagatgcatggccgacgggcgctgccactaggggctccaggagtatgcacagggatggtcccatgtccacatcagtgtagtttgtctatcaataaatgggaaatgatagaatgaatggattgggatatgtgcatgcactaaaatcccaggaggtcatacaaatgagtgagcaagagccctgcgcatgaatgaatgtgaaactcataggtctattttggggtaagaaagcaaattatagaaacatgcatggaattataaaatttaagataatacatcttaagtttatggtacagtatgtttagcagtgtgcaaaataatatagattgcttagggatttggagagaaaattttgtagaactatgtaagagtaggaacacaaattcagccttgtggcctcttgtgtgggacagggagaggaagtaggtgagggacaggaatatttaacttttattaatacttataatttaagttttatttcataagcagggggtggtgatttattctttacatcttttgtatggctttaattagtgcaaaattttttaaattaaaaaacagctggaaggcccctgctgagaatgagaagggaaagtgtgatctttgtggacaaagggcagagttctactgatagccataaatattcacatccctcttggtcccctctttttaagtctaggcacagagctttctctaatgcagagagacccaaaggacctccccccacaaccagtggctccccataaaatgcctatgatgcaagaaaattcctatacacacacaaaattaggtgcaattttcttccacaagtcaaagaaagaatatacactagacagcttattattcctactgactttgtctgtctttaaccttaaaacaaaaataaaggctcaatgaccatttatagataaatccagcctctctctcacctccttggtaagccacatctcagcatcctattttgtgctcactgggttctgtctttcagggactctcacgttttatttgttttcaagcctaagctactgtcagattaacatttcttctctagtttgcccttaggatactttatttgctacaaaattgctttgtgatggtgtcaccacactgccaatgaagcagagcaatggcaattaccataaagcacaggcccttcaaaggccagcccagtgagagtttgggtccgagttctgcagaatgactaccagtgtgagtgctctgtgtgcagacaggtgaaagaggacccctgtctgcagcccagggcatcctggccttctcactcattagcccttgggattttcaccccacacacacttactgatgccagcagggccagtcactgtgctgtccctggaaagagagagaggagcaaatgctaacctctgtggttttccctcttgacaccaattctccaactctgcagacaccagctgggtgtcctaaactcactcctattctgactgtaactacctagaggtagcgtcagactccacagggttaagggctcagtcccatcagccggcccccacttcaaatgccagttacagtgttgggtctccaggttacccacagttctgtccaccgtggctacaaactcaggggggttcccataacccttgccccaggttcagtaacttactagaacaactcacagaattcaaaaaagcattttacttaggtttacaggttataaagagtacaaacaaagaaatgcaatggcaaagtacaagtggggtggtaggtcacgtggcttccatgccctctctgtgtatgccaccatcccagcatcatgaagcatttaccaacccagagctctccaatcctgccacttaggagtttttaacggagtttcattcagtagggatgattgcttaaatcactggccaactcatctccagccccctaccctccctggagattggaagccatcgaggagaccccagctgccagctatcttattaacatgcaaaatgaacccttatcactaggagatctcaagggttttaggagctgtgtgccaggaactggtaacaaagaccaaatatttattttttattctaagacgccctccccaggtacttggagcagagacagggccgtgcaggcagagtggtgttcagggctgggagcaggtgcctgagctgaggcaggtggggagaggggagaggtggtccagtctagggtacttggttatcagcccgttcatttgttctctaaaaccagggtgaaaaagagaacagacttaacgggagcctttagactggaccccacttacctgaagcacagccatcaggattcaggtaagctgtgagcctgctttctgtggactgtttctggtcttgttcccctcagagctgccctggaggtccctgggagttaggggaagaccatccatatccaaggaggctttcacagagaagacggggtgctgtgcattcctggatttgcccttgtagcccactccctgtgggttggttaagaggcttggggaggctccctgggggaggctcctgctctagaagcactgagaacctgctgggctcattgcaggagcaggggcaggtgggcacagccatgggattttaatatgggcatgcatactgcctgcagacaaggaaacgtctttaacataatgacagccataatgtctacaaaaaggctttgcatcaccttccaccaataccatgagggggcaaagtaaatgaagaaggttgagtagggttggtgagggaagagaaaataagatgaagccaaggctcagatcagcacacaaaggtgcacctaagtcatttggtcagtaggcctgctctctgtgcctggcgctggtgacagccaaggaggctcagcacccacctgcaatgtctagcagggaggggatgagtgggcagttatcaagtggcatcaggggacacaggctgctctggggccacagcacggaatgcacaattcttggcttttgcacttcacctatgtcgtctcatttgacttgggccagtgtatctggctaattaatggtaggcattgaactagaaccaaaataaatagaatttttttgataactgaaaattctgtcacaacgctggtgaggaggtaaagtggttacactagtcatgtaggctttgaagatgtattccttattattaaagatgtacatttggaaaatagagtcaacgctgggccagaaaattcctgtaatcccaccactcaaatgcaaatattgctaatatattgctgtatttcttaccagtcttgttcaatgcattgttcgctttgttttaactctgcaccacttaccaattaccaatatacaagctgcccttcccacatgtatctcatgaagttttacatcttatgaggcacataagacctattaagtagtccacagttcaagtaaaaccattgtcagaggaaactactggctaagaggtttgtcatttctttatgttaacagtaaagaattgtgcaaggaagcttctaactgggccagttctttactcgtccataaggaagtagattcacggagaagcaaataggaacttgcactaattagacaccgtatctgaattcttctactgaaagcctccagtttttctttcctgtagaagtttctgcaatgagggaaatttataattctgcaccacccaatatggcagccaccagtccgcatgtggctactgagtgcttgaaacatggctcatctgttgaagaactaaagtttaatttcctttagttttaattaacttaaatttaaatgtcaacagccacatgtggctactagctaccatatcagatggtgcagtaatagaaactaaaaaggtgggccattccctcattttcattcatgacaatcatctggttctttgacaatttttttttttgagacagggtttggctctgtcacccaagctggaatgcagtggtgcaaccttggctctctgcagcctccacctcccaggctcaagtgatcctcccacttcagccttccaagtagctgggaccacagacgtacagcacaaggcccagataattttttgtatttttttttttttggtagagacggggtttcaccatgttgccaaagctagtcttgaactcctgagctcaagcgatttgcctgccttggcctctcaaagtgctgggattacaggtgtgagccaccacgcctagcctcgacaatttcttactgagtgcttcctgcatgcactctgttgagtgctgttgtttcatttgcagtggtctctgtgaatcattgccagatgctgctattgatgttatgtttgtttaacaagctcccttactaatgagaggccatgtgtcgtaaaggagagtactgtgtatgggttgagataggctgtatgactttgggcttccatctcagggtcactcataaaacagggggtggaggtcttgcatctcctcccagcactgccattttttatgctagtggagaaaataactattagggaatgataccaagtggtgacttcagatgttcttgtaaatacaatgtaggcactcctgtgcagtggatgaagtgcagggtggggcgtgggttgtattaggtggacagcttgtcccagctgagcatggtcaggtcctgctatggccctgccacagcccctgttgactgcggaagtaggggacactgatgtgcctggtccagcccacattcgtggatctactcccagagcacgagactcccttttccaccgatctgtgcagcaggactgcagcatgttgtcataatcctcacctgatgtcttgcgcaggatcacttgtattaatagaaactcccgtctctgagcctgcatccagggttctttcttctttatggtcctgggatttgctgctttaggcatgaggggaggctcaaaagcaaatcatccatttttcataaccaatgtggagccaatgattcctggatgttaaaactgactcagcagatattcactgagtgtctgctctgtcccagatactgaactaagatctgctaagatccacggatacagagatgaataatcccaccaagagtttcattctcctttttaaaatattctaatcactccgtatatcacaaattcaccttcccatgcatgaatgaatgaatgatgaacgatttacgtgatctgaatgctaactctctactgggcactagatgaaacctcagatgttcatgctatgtaactgcagaaagcaaaactaatgggggtctattgagagtgtaacatttccaatttgtgttttgggcatcctgttctcgggacacacccttagaatatgttaccctgggaagtgccgcaaagaacacccagacccagcctttgggcagttttatttctggcttagaagacacaagaaatttacctggaaaatgaaaaggattagcgtgtgatcaacaaacctgtctaacgatttcttttttctttttctttctcttttctccagggcttatcactgactaccgggtaagtgggagattccactgtaatctcaaatgctagtggagtgctggggggtacgccacagctgtcacacatctcctcccccactctcatgatcagcacgcactggtgggcaccttctaactgggtcctaactgacaaattaggggggtcctgccaggtggcgggcagctctgctgaaccccccagtcagaggtctcaggttaggagggggaaacctggaccctggactttgctcctggggaggagaaaggagcttctgcccctcattcctctggaaggaaaaggcccttctgccctgggctgctgtgtgcctggggctgcactggtggtggcagtgggagagtgagggaggagtcagggaacagcaaaagctcccaggtggggccagtcatctcagcagcctagtctcaaatgcattggtcctctctcgtttttatttgaaacaagtgttgaatgaggcatactttgaaaatgccaggttgttctagtgttagtctggaaaggaatttgggaccaaaggcagtactgcgaagcttatcaaaagaatagaacccaagggggagggtgaaactcagggggaacagaggtgtggccactgagctggctgtcttctgccatcaagagatgacctgtggccgggtgctgtggctcactcctgtaatcccagcactttgagaggctgaggtgggtggatcatctgaggtcaggtcttcgagaccagcctggccaacatggtgaaaccccatctgtgctaaaaatacaaaaattagctgggtgtggtggcaggcacctgtaatcccagctaccccggaggctgaggcaggagaatcattggaacctgggaggcagaggttgcagtgagccgagatcatgccactgcactccagcctgggtgacagagtgaaactctgtctcaaaaaaaaaaaaatgacctgtgtccacgtgtggtgggcaccagacatcatcaaagcagaggctgccatttcccgacagaggtgtgtgtctaagtgcgtttggagcaaacattgtcagcagccggtgtgataatgacccagcaggggcttcccctcaaaggcatgggtagcttgccttcttcctgtgacagctgtgagccaggaggcaggggggcagcagtaaaccttcccaagccatcaaggctggtcctaggacagttttggcaaagtttgcctgggaccacccagctctacacccagggagaaaggccagggtgtgtgcacataagggcacactgggaagatccatggatgatgccatttaaaactttcatataatcccattgtcaatctgacttatcttttggaaagttattattgaagggaaaatatgacaataatattaaaaataacctgaggaccagctcaccctgaccttgcatcctcgcgccgctgtggcctgtgtttctgtctcctcctctggttcatggcctttctcagacttcatgttgcatgagggccatgtgctgtacaaacgacattgcagctggttctcatggcactgaaactaaaattgcaataccttctccactcctccacagccttagtaagtacagaaaatctacacagaatcccatgttatatggtataattatttccctgttatttaactacttccctgggaaagtcccttgctttcctaaatgactatgcagtgggcatctggcacatccagctttctgctgaggatgagctgcttcctgcagcatgagactgaaaatggggtaacaggcacgaacacttcatgccttttattttattattttttaattttgctctttcccagcttagatatcattagaaaaaaaggcacaacaccatctctggttcacataaaataacataggctttgctaaaaactccgtattgactaacaagtcctctgggaaccaaagtccttttagataaacttggcactgtctttcaaaggcctggggcacaatccctagcaatgctggcttatgttacattgcccaagacaaaaaccagcccagctctgcccgcatctagcagctcagggaacatgatctcctcagacagtttctaccgttcaccaagaatcacagatctgtactggcacccgcctgcaggaccacgaaggtggcagggcttgcctgaggcttccccagcctgttcttctgctccatccagggccttccagtcctcagggctcactccttcttcccaaccctaggttcttcatcctactccctccaccaccagtccctgaccctcatggggtctttctgtccccttctgtctttagtgctgagcctcactctcctcagcacctcaggccctttccgcactgctaatccagaagacttgagcccaccattcaccctgccttgataggccaagcattctttgaaaagcgtttgtccttctgttacttcaactagttatctctactagttatctctactagcttaatgaaaggcattggcctcggttaaggaaaggtcaagcatcagcaacctgtgctccagccctactttcaaagcatcctttgatcagcccctgtactccccaccctgttggtcctgctgtgagacctgggtctctttcaccccatctcaaggcagccccttgactggcactccctttccaaccaggagctatgagctgctcctgcagctactcagaggtgagtgaggcccaaagccacctccaagactcccaggccactgagggagacagaggcgcagaccacgcaggccctgatgcctgttctgaaacacacctgagacacctcgatcctccagcctgccctttgtggcccaagaggacatgccccaagtccttagctagtcctctgcctgccagctctcctcttgccgcttgtggcaggcaatgatgctgagatccctggcactatggctggcagtgcatgagtcaggagccatgtggggacagtccttgtttggctgcctgttgcttctaaaggaacccaggcagatgggaagcaccacagcagcccagtcccactggcatccatccaccaggcttgggaggctctctggggtgattggccttctgtgctgctgtgttcctagagagggctggagatggcacatcatgtgttcacagccaatgtttcatggctgatgaggggacaaacgcatgaaccttatgaaagatggaatgcagaaggtgaaagctgttctggagcagaggggcttctaaatgcgaagcacaggcattaggcctcagcataccagccccaggaagcaggagtggccatgtggggacagccccgggcagccaccgggaaagcacacacaagttggccgggtgtgagtatgggagcagcctcagggccctggtgtgcagagcccccagggcacctctcagcccagctttgctctttctatcccttgggtgcaggcacaagtgtcactgcctcttactgaaccctctccatctgccacaacccagggatgtccctggccgtatttcccggcatcttctctttgctgctattttagctacaatgcagtgacctctttccctctctgtgctcacatgcacctctcaggctcctctatgattcccaccttgagtgtgaattccaggcaaatgtccccagagcatttgctttgctgggctcagcagggaatgggaaggaatatcatagacattctcattttgttcaaagaggctggaaacccaaacctaaggcggtctggggagaagatccatcagtctggggagaagatccctggatggtgggctgcctactgggccagtgagaaagtgtggggtgaaaaggatgagcagaccctggtagttctatcccccgtcagtagatgagggcacgaggacagagtgttagtcccaggaggaggctgttcaggacgcgaggtatggcaagagagctctgtgttctttctgatggtgaacggcacactgaagatgtaagacagcaccatttgcctccagtttgcacggtcctgggtaaagtgggcatcattatgcctgtttcataggggaggagacagaggttcagaaaagtttgctgaacctattgaaagacaggaccacggacctaggtcacaagccactgagccatgcagccctgcatgctatttggatgaggaaactgcatcttctggaagatgttgatggcttatcaaaaatgggacaaaatacaggtttaaaaatgatcaattgtggaggaaaaagtaccaggaaatagatcatttgatgtccgggaagcatcaaatatgaattgacttctacataaagaatcctttcagatgacccatgaatgagggtcaaatgggttttactcctgatttatttaagtacgtccatcaacaatcttccacaaaatgtgggctggccgcgccatgccaagccaggtgctgggcttggggctgggactaaaaaggcaaatgagacagagtccctttcctctgggaacttagtctggcaggaggtgaggctgggtacacaggggtcacagctgtctactgcaggcacccaggagcatattgggggaggggacagtgcatcgaattcagtctctggagagaacatgacaacatttggagccacatttgagtgagcattcaattagattgtgtgcattttcactccgggaccacagaaattaagtttaccttggtattcttccaaatgttagactgaaatctaacattttaatttgtaggaagttgaccagtcgaggaatgattttggaacacagcgcccatgctgaaccatggcagggaagcgtcgttttactgactgttagatagtcagtcagctagtggtgggataaggggttcttcttttagatttcccaaaagacaagttagcttagttcttgagcagcccaacagcttgcaaacagtgctgaccagcagacaactgtgtgtgcaggttcggctcaggctctgctgcatgctggcttggtgacattgggcaagtcactctccatacctgcttttgctccaagaaagtggggatccgaacccttgtttacagtgctgctaggaagctcaaaggagataatgtgtcaacacaccgggcagggcctggtgtgcaactggggggaaccacactgaatgcctgagtcagaggttgggtccctgtttcccttttgacttgagaagctcctgcagaaccatggctctgggcccttgagctacttctcttgtgttcagaagcagttgccacctgttcattccacccacactttattttatttatttatttattttgagatggagtcttactctattgcccaggcttgagtgcaatagcgccatcttggctcactgcaacctccgcctcctgggtcctgcctcagcttcccaagtagatgggattacaggcatgtgccaccataccaggctaatttttgtatttttagtagagagagggtttcatcatgttggtcaggctggtctcaaactcccgacctcaggtgatccacctgccttggcctcccaaagtgctggggttacaggcgtgagccaccgcatccggccttcacccacactttaaaaaacacctgcaagccctcctactggggagcagtgcgggactcaggactccggctaagcagtcccacccggcagatggcccagctgcgctagagtgtcgcgcctggctgcactgtgtcacccaggcccagtagggagctggctcagctctcctcagtgtctcctttatagctgaaatagaatatgactgttaagatgaccacgcagtgctgctatgctcacttcccagcagtctcctcgtcccagtccttccttactcacttcaccacatctccatccctcagtgtgtgggggccggtcaactgactgggtctgggaaaaccagaggaaggacagggaaagcttctggagcaccagcatggagacacacattgtgtcttctgatgaggggtcttggggtcactccatggtgatcagtaggaccaagagggaaccagtattgctctagaaaacagtgccagaacatctggggcagaagtggcagacaagagcaggttctggctccctccttcctcgtaggcaaggacatcaatgaaaattacccccttatccccactggatggtgagctcactgggggcagggccgtgtcttccctgtttgctcaccacggaaccctaggggacagcccaaggtctggccctgctgtgcatgccgcaaacacctgttgagtgaaaacaatgaacatcactggctcccaggtcaacagtccccatctgtgttcctttctcttggagatttgcaaagaaagcctctgcccacatcaccgagggccctgccatccaagacaggccatggcaatgggagcagggtggccaccagggaatcggctgcctccaagagaaataggcgagccggtgagccgaaaaggaagccagcttttaatatcttcctcactgatggtctgtttcatgtttcatttcagcattggcagataccactgggcagaagatttcgctctttgaaaatgtggtttgtatttaggatgtatggagtcaaaggactgcaggcttatatccgcaaggtgactttgtttttattatttatcacggtaaaattgcggaggtctttcgggactttagaaataaattcaaattttttttcttttttttttttttgagacagagtttcactcttgtcccccaggctggagtgcaatggcacaatctcagctcactgcaacctctgcctcctgggttcaagcgaatctcctgccttagcctcctgagtagctaggattacaggcatgcgccatcatgcccagctaatttttgtattttaagtagagattgggtttcaccatgttggtcaggctgatcttgaactcctggcttcaggtgatccacccacctcagcctctcaaagtgctgggattacaggtgtgagccactgcacctggccttcaaatgtcttaataagcaaatacatggcaagagaaccagactgtagtttgggttgttgagatgaggttatttataagatctgttaagtcactttcgttaagattgcaggttatcaggtccaggaagatggtcacagtagaaacatcacataggttgtgctttagccacatctagccaagaatgaagttcattgagcaatggcaattatgagaacataaggactgtgtttttctcccccaaaattgccagaataagatagatattccctagtccagtggttctcagacatgcttccagaccagcagtgccggcctgcagtggggcccagcaacctctgttttaacaagcaaaccagacaccttctctatgcactaaaatttgagaaccacttatcagctccaagccccactcccctgctttttttttttttttttttttaaataacaattggctgggtgtggtggctcacgcatgtaatcccggcactttgggaggccgaggtgggcagatcatgaagtcaggagttctagaccagcctggccaacatagtgaaaccttgtctcctactaaaaaaaaaatacaaaaaattagccaggcatggtggcaggcacctgtaatcccagctactcgggaggctgaggcagaagaatcacttgaacctgggaggcagaggttgcaatgagcagagattgtgccactgcactaaagcctgagtgacaaagcaagactccgtctcaccaaaaaaaaaaaaaaaaaaaaaatgaggaaactgagtcctgaatatgagcctggatctgcctagagccacccgtttagccagctgcagaaggcctgctgctgttctgctggctctctctgatcctggtgtccttcctaagctgtggcctcatcttgatggacagaggtccccaggcttcatgggaacaagcacacttatgatattcagccttagtgatggtaacagccctccattttaagtcctgttgccacttcacaaccaggtgtgcaggggcaggtgtccccagccacctcctctgtggcacagcatatataaacacatccatctgcaagcttcatagaatgcctaggatgtgccatgaactgcctactcccaaagcttcggtgaggacagttccaggagctgccgagcactatgaggacctgtttgggggcgagaactgggaaaggagtatgtatatgaattcctgggtaggaaatccccctctacccatttgagacgaattcagcttttttggggaaagaaagccaaaaaataagggatttatctccccacaatgatgacgtctttaagctcaaggacaactagttatgatcatgctggctcctgtttaaaacacactccacttctttcttaaaggggacccaatcctgccttaggagcagagtccagcgatgctcaaagcctgtctccttgggcgggaaccggctttcgggatcgcccatgaggccgaggtctttggcgctctctggtggcatgacgaggaaccactcgtatgacacgtgtttttgtcccagccaccccctgcccgcgaggcgccgcgtttccgcaggtcctccccagcacctgcaacatgggggccctgctgtatccgcgggcttagaatgagcaaggcaccggcctacgccacggagggctccttctcctaggatcacatgctgtctgaatagcttctgagttctataactatttggaagtgaaataaggtcagtgtgatattcaatgagaggaaggccgtttctgaatgtgacagagcggacaggatgcccagctctaggtggcaaacgcggaggaggagcaacagctgtggcagccacagagctgcagctccatcaggctgccttagaatcccagctcagccaaggcctccgggtgcaccttgggcatgtcgctcaccctctcccagcctgttttcttatctccaaaatggggataatcatgatatcttctgtgttgtgggctgtcctgaggatgccgcagtggtgagcgctggcacctcaagcacagaggagcaactcgatgggcattagccattgtctcttccagaatgatcaaatacctcctcacggtgtttattctaacattataaaagacagtttgggtgggataagaatagtcccatgaacagaagaaaatgacaattggtgttctgaggacactagacctgtgctaatgtagggaatgagtttcttagcctgcctggaaacagctggtcagtgaacggtaaaagcacttgaggaaaattgccaagagcgtctaaatgaattatacatgggcagtctaataaggttttctaggtagttaagttctgaattaaatggccatgagaaaaacagattttccctttcctctttgaagcatgtccagctgtcccatgagtttgagtcactggtgcgccaggatccccgctttgaaatctgtgtggaagtcattctggggcttgtctgctttcggctaaaggtttgtctacatctattccattcttcattttctgtgaatgtgacagaggggaaagtgttgttcattacctccatgctcaaacactggcactggctctccagagatggcagagcaaagcctgcattctttggcccaccggcctgccctgccccatgctacacagccttgtttccacgcacagcggctgttcccgcttcctcaagcctgccatgagacttctaacttacatagcttattggccgcagaatctttaccatttttccttcctcaaggctccatcccacacctctgccactggccctccttggaggacagcggcctgtccatagcctcactaatctgagtgtcttctgtggatcaacagcatcagcatcatcagcattgtctgggagctccttagaaaagccagtcttgggccccaccctagagctgctggctgcgcacctttacaagatgcccacacaggagtctgtttgacactgtgttgtggcgtgctgttattttgctgcctgatgctgtgcattcaccaggtgagggcaggctggcccacacgggttggggcataagccatctctactgagaatcatgatacagttctcaaaaaggctctaagatgcactgcacacatgccccttggtaatctcccttgtgtacacagagccaggtgagaccaaatgctctgtttggtttataaggttttttttttttttttttttttttctttttggagacagagtctcccactctgttgcccaggctggagtgcagtggtgtaatctcggctcactgcaacctctgcctcccgggttcaagtgattctcctgcttcagccttttgagtagctgggattacaggtgtgcgccaccacgcccagctaatttttgtatttttagagatggggtttcaccatgttggtcaggctggtctcgaacttctgacctcgtgatccacccgcctcagcctctcaaagtgctgggattacaggcgtgagccactgcgcccggctgaggtagcttttaattcacaatcatttcaagcctttccaggaggcttccttgttcaaattaaagacagcactcaggagaaggagcaggctggggtcagtgtcattgtcaaggggctgccagtcagagtgtggcactgccactccacctactatgtccttttgcctcacctgactcttggagctctgaggcgaggaggagctgcagccgtgggaaagcctgcaggtagcagagcaggagaggagacttgagcccttggaagagcacaaagtgatgagacctgggaggtgcacagaggaccgagagggcaagacacgctctggatgtttgtgggaggagcctcagtccatccatgtccaggatgtgtctagtcaaccaaccttagtgttggcatcgtgcttattagactcatctgctgtcaagcagttgttttcattcttgtttttgttgacagttttcttctaggacttttatattctatttttttaacagttctattgagatataattcactttgttcatttaaagttaacatttgggctgggcgtggtggctcacgcctgtaatcccagcattttgggaggccgaggaggccagatcacttgaggtcaggagttcgagaacagcctgaccaacatggtgaaacctcgtctctactacaaatacaaaaattagtcaggagtggtggcacatgcttgtaatcccagctactcgggaggctgaggcaggagaatcacttgaacctgggaggcggaggttgcagtgagctgagattgtgctactgcgctccagcctgggcgacagagcaagactctgtctcaaaaaaaaaggctacgtttgagtatttttagtatatctacagaattgtgcagccatcaccacaatctaattctagaacattttcatccccctaaaagaaaccccacacccagtcatgccactttccccatcctcagggctactaatctgttttctgtctctgtaggtttgtctattctggacatttgtataaatgaaaacatacaacatattgccttttatgactgttttcttcacttagcataatgtcgtcaaggttatggcttttattttatttgcataatttgtagatgccaccaaacccatctgtgtactggtttctgtccattcttctctcatgccatatagtgagtcctctcatgaaggaagtccaaggcatttttcagctgacaaatgtttccttttgtaaaactttgcttgtgcctccagtctgcaaatccagtttctggaggaagcgcgttagtcaaacactgtggctcacttttctgcctccatatctgccatcttggcctcactctctcctggtctaatcctctctaatctgaatttcaggtcctctcatgctgaatgcttcagtgtgtcatgtggctctttactaaagcagaagtgatgttgctatggcatcacggtccctctccctccatcctcattatggccagaacttgcttggtctccatctgtgtgcactcagcctactttgttcattgtaattgtcccacctctgctaggcttcttgcctctacttcatggaagtactgccctatccagtctgtttgaaaatggcaagcacatttttcctaaataatttgcttccattttctgtgctctatactttgcagatgtttgctctcatactgagtctttttggtaaaattccattcccttggtatgataatttctttttttctctatcctcatccttgagtcctcatccagattcacccagccttggtgttcacccacggtttccaaatttcctctggcccatcactgtctacctgggcacaacaggagcagggcactcaggcccatagctagaggccaggggatttgcacagctctatggccaggtgccaacatccagcaggtgctcgtctgaggtggttccatgcagtggatagaactctctccttcccactcatcctccctgcttctccactctgaagacagggccacgaagtgcagtcctgtgaggtttgggtgactaggatgcagtgtcccacattcagttccttctatttaagactccatggcttagaagacatggagtcactgcctgcaaacagaagaaggacagaggagcaaagggagatggaggtgaagtgtcagaagaccggctgctatggaagcagggcccaggcaggacagcaagggcttcccattggcttattgataccaggcttccatctctagtgtagtgggaggggtggggcctctgcgcctaccccaggctggtgggccgtgcttgtctggagaggcaccagtggttgctcggtcctgtggttcatggacattcttctcagattctagcactagcttgaccgttatgcttcattttctaggttgctgagactcttctatgtttccgtgagaatttagagactcctcccctggtgccatcagaaaccccaattctgctgtttaagctcatatatttgtagattacatatccagggatccttattttccttaaaaaaacttagaccatggaagggtcatcttttgatggcacatcagaatatagagaaattgtctgtggggagaagatgcatgcagtcttttagggtgcattactattattttgttgaattttgtaacatcgtaaacgcaagggggatggttagtcggcttcttcctgatgtacggtagggttgccaagcactgtctttcctacatgaccagttgatttttgagtcctcagagacctgagcacagttcctctctttcaatccctccagggttccaacaaagtgaatgaagctcttctgcaaagaataaacagtgccaaaaaaatccacttggttccatgtcacctcagggacaagtttgtcctgcgctttgccatctgttctcgcacggtggaatctgcccatgtgcagcgggcctgggaacacatcaaagagctggcggccgacgtgctgcgagcagagagggagtaggagtgaagccagctgcaggtaggctgccctgggctcattttctgcctgtctccttgtcccgtggcaagagtgtcctcctggagtccagacccagctacaggcccagcccggccactcaatgctgccagagtgcatttccctcaccttaaaataaggaagagaaggccgggtgcggtggctcacgcctgtaatcccagcactttgggaggccagggtgggcagatcatgaggtcaagagattgagaccatcctggccaaagtggtgaaaccctgtctctactaaaaatacaaaaattagctgggcgtggtggcatgcacctgtaatcccagctattccagaggctgaggcaggagaatcgcatgaacctgggaggcggaggttgccgtgagccgagatcgcgccactgcgttacagcctggcgataatgcaggactcagtccaaaaaaaaaaaaaaaaaaaaacaagaagaagagaaaaccatgttaattctggagaagtagaaggaatgatacattgtaataattcttttaaaacttagatttttactttttattcttacatcaatctctataatacttcaggtttcttcaaacagcatttgttgagataacttactatcataacaagctcatataagaaactggtgacctttagagaactaatgaaaacaataaaaagggaatttattatgactcacgacttgccgtccaaattcttgatggtttgaagaaaggatatgtttcgactaccgggcttcttgcagttgtgaggggtttacccctcatagttaaaccctggagacagcatgcagttaatttgtaaaaacaaagcacacattttaaataaatgcagtgttggcaacatggagggtatttaaaattatgtttgtgggaacctagacaaccttagaaagcctcttcattaggttatcttaagaatgtcatcctgttggggtatgtctacctttttctgtttattttcttttttttttttttttttttttgtctttttgtcccatttggtggaagaatctgtgatccctccttagggtctgcttctctttctctctctccctatcctttttgcaatggctcgttcattataacccgtgggggatttagaatctgtggatcatgtaatgcatttcctgattgcctacaatttttatcttctttgctgttgattttaattgtgaatatctgaaaaagtatagtgctcaacaagtcagaagttgaaaatcatgtttggtatatgtgatagacctgtccatggctcctgaaagttgaagccaaagggctaccttctgagtcaaaatgtgccctgagaaccaggtcctttccctggtgcaaccagggccttcccctactcataagctgagaaagacctggggtctgaggaagaactgctgacccagagcaactccaaagtggtatctcaagcatctctggaaggtagtggggagaggcttatatgttgaagttattccattgctctcagcataagactatgtgaggggagggaaagtaccgctgtaagctctgtacgaaacaaatccctatcaggcaaacgctcccgactcgcatttctgcaaccccacgtttgcatctatctcataagcatgtatcatatcaggatcttattgacatacgcccagaagaacatatgtggagagtgtagctctgaaaatttatcagcaaaggtgtgtttccgataggagtctcagttcctctggagtcattatatttgctgtagattcaaaaggtaaaaatgaaattcaatttttaaaaagatatgtgatacaatagtaagtcctaatgcatgtatgttgttttggacagattagaacaataaaaatcttaatatcttgattttacttgtacttatttgagtttattacacatattcatgtggtcatagctctgagagaaagtaggaactattcttattttacagagggtagaaaattaggcagagattctagttgacactaatacagttttcatcagagaagccagattggcaataaaaattcctttatttaagttcaaactctttggcattgcacaattgtctctgtttcattggagaaattatacgttcgttctttatattcaaataagaagtacatgcaattcttattctttatttttttaatttttatttttttatttatttttttttttattgatcattcttgggtgtttctcacagagggggatttggcagggtcataggacaatagtggagggagggtcagcagataaacaagtgaacaaaggtctctggttttcctatgcagaggaccctgcggccttccgcagtgtttgtgtccctgggtacttgagattagggagtggtgatgactcttaacgagcatgctgccttcaagcatctgtttaacaaagcacatcttgcaccacccttaatccatttaaccctgagtggacacagcacatgtttcagagagcacagggttgggggtagggtcactgatcaacaggatcacgaggcagaagaatttttcttagtacagaacaaaatgaaaagtctcctgtgtctacctctttctacacagacatggcaaccatccgatttctcaatcctttccccgcctttcccccctttctgttccacaaaaccgccattgtcatcatggcccgttctcagtgagctgttgggtacacctcccagacggggtggtggctgggcagaggggctcctcacttcccagtaggggcggccgggcagaggcgcccctcacctcctggaccgggcggctggccggacggggcggctggccgggcagggggctgacccccccaccttcctcccggatggggcggctggccgggcggggggctgaccctcccacctccttcctggacggggcggctggccgggcagaggggctcctcacttcccagtaggggcggccgggcagaggcgcccctcacctcccggacggggcggcaggctgggccaggggctgaccccccacctccctcccggacggggcggctggccgggccaggggctgacccccccacctccttcccggacggggcggctggccaggcagaggggctcctcacttcccagtaggggcggccgggcagaggtgcccctcacctcccggatggggcggctggccgggcggggggctgaccccccccacctccttcccggacggggcagctggccgggcagaggggatcctcacttcccagtaggggcagccgggcagaggcgcccctcacctcccagatggggcggctggccgggcagggggctgacccccccacctccctcctggatggggcggctggccgggcggggggctgacccccccacctccctcccggacggggcggctggccgggcggggggctgattcccccacctccctcccggacggggcggctggcctggcgggggctgacccccacctccctcccggatggggtggctgccgggcagagacgctcctcacttcccagacggggtggttgccaggcggagggtctcctcacttctcagacggggcagctgggcagagacgctcctcacctcccagacggggtcgcggccgggtagaggcgctcctcacatcccagacggggcggcggggcagaggcgctccccacatctcagacaatgggcggccgggcagagacgctcctcacttcctagatgggatggcggccgggaagaggcgctcctcacttcctagataggatggcggccgggcagagacgctcctcactttccagactgggtagccaggcagaggggctcctcacgtcccagacgatgggcggccaggcagagacgctccgcacttcccaaccggggtggcggccgggcagaggctgtaatctcggcactttgggaggccaaggcaggcggctgggaggtggaggttgtagcgagccgagatcactccactgcactccagcctgggcaccattgagcactgagtgaaccagactccgtctgcaatcccggcacctcgggaggccgaggctggcggatcactcgcagtttggagctggagaccagcccggccaacacagcgaaaccccgtctccaccaaaaaaatacgaaaaccagtcaggcgtggtggtgcgcgcctgcaatcgcaggcactcggcaggctgaggcaggagaatcaggcagggaggctgcagtgagccgagatggcagcagtacagtccagcttcggctgggcatcagtgggagaccgtggaaagagagggagagggagaccgtggggagagggagaggggggagagggagagggaaagggagagggagagggagagggagagggacttctttattttttttaatgtagccatatgctcatgctattttttttccctgtaggaatcaaaaattgaagagagatatatctgaaaactggaataagaagcaaataaatatcatcctgccttcatggaactcagctgtctgtggcttcccatgtctttctccaaagttatccagagggttgtgattttgtctgcttagtatctcatcaacaaagaaatattatttgctaattaaaaagttaatcttcatggccatagcttttattcattagctgtgatttttgttgattaaaacattatagattttcatgttcttgcagtcatcagaagtggtaggaaagcctcactgatatattttccagggcaatcaatgttcacgcaacttgaaattatatctgtggtcttcaaattgtcttttgtcatgtggctaaatgcctaataaacaattcaagtgaaatactaattgtgtcagatgatcatcttgttctatgttgtatcaaatttattcttgtgatacagacattccctccaaagtagacaaagatacagcatccttggatgtttttaaacggcattcatttattcagcaaatgttcactgagtgcctagtatatgtcaggcactgttctggatacattaacaatacacaggttttacttgaagatgacttcaacttctgtggaaataaaattagaaccaagagtcaacctggagcaatgagatcgaggtctctgctgtgatgggaaggattctctggctttctgggccttgattttctggtccgacaagtctatctgtcctgtagtatcatgattgataagcaactgaagagtacttctgtaaacattaattccaacaaggatatggtatttactcaatctcactttaagttcactatctgtattgggaaccattttgcttttagaaacatgtgttttaatcctaagattagttattgtcctttgaagactacagaactatcaaaggcactgtcagaaagggtccttgggttattaccaagtatatttgaatttcaaagacctcagatatctatgtgaactaagtgaatgatacgatctgttactcaaaaatctggaaatatgtcagatgccaagtagttccccatctaatttagtcaggtcatttgttctctactcaacagcaaacaagacctgtcctccatcatgatgtggggacagaggctgtgtttttggggcccaccaggggccacccttgataggaccagtggagtgtggagtactcaggttgagttgaggctgggatgtctaaattttacaagattatttttcagcccgtgagttaagattgctgcaagggctccagtgtgagccaccaacatcattgataccagctctctgctttagtgggctcatccagcctcatccacaaatatacttcagaaagatggctgagacctgatgggagggaggagactgggtggcaggggccaacggggatgctgtacagaagcagggcaggaggccagcaagtgactgaagatttcctccctccgaactggctggatccttttgatggagagtctaagacatcagcttagacacagacccaacagagagaaaagcttgtctgatttctcgctcatttctaggtaactcatagcagttcaccccacctcctgacttctccaggttcctccataaagtggttctcagatctgaatcccccagccctagaaacaggaagaataacttcctcccagtttatttaacaagaacacacccatagcacttgctgtatgccaggcactgttacacgtgttttaaagtattaatttaatacttattttaaaattctacgatgcgggctcaattattatgctcattttacaagtgagaaaactgaggcattgcaaggtttagtgatttatcccaaggtcatataatcagtgaccaagctgggattggagcccagtcagcctggctctagaatccatgctcttgcccagtaaactatgctgcaaaagatgccatctgctacccaggattaaccatttctgaaggtaactggcagtgaagacatttattctcttctgggtaaagccctatctttgcctaccaaggtaaagtcttggaccctagaccatccctagggggcccctagaccccacatccaatgtggggaagtttttaaagttttggattattcagactaatctgtggtcaatacagagcatctttatttaaatacatattcaagttagtgtcaaaaagagtgcacaaagtgctgctggcactggaattagatgtttccttactgacctctggtatctcctgataacaggcccctcctgcttagtgttgggaaagtcccagattgatctagacacaactaacagctgatatgaaagatttgtcctggaatcacatgtctcctctctaaaatccagcaaacagcaatactccctaaacctggagaatctcattgttgctgaccacatgcccatcaccaaggagcctgcaggaaagcccaagacaaaaaggggagcaggtgtcactgggtggccccttgatcatcatgagggtgtgccacagttcaaagagaaacaagagaggagaagaccccaagggagggcagttctaatatccactgactccacacccgcaccccttaattcagaaatccaacagacatgacaaattagaaactgattctgctggtatgcaattcagaaagtctacatttgaggaaagatatgaacattgactaacggcttttttatctagggatcatttcattgcttttctaaattatgtaaatatccaaacgtcaaacactataatttttttttgccttttcaactgcatttgatatcaaaatctatttccttaatacctctgggttacttgccataacttacacttgtaataagtagtagaaaaaaattaataagaaagcactgtgagtgtaagttgcttgcataaactggatacatctggagctaccaatttagagaaacttgtgaatggttccccagagcacagatgtgcagtggatggtagaggaaagaggaagaagataacagagcaggctgtattgcagcagaccttgtgaatcccaaagtgctccaatgtggaagtgagatctagaccccaggatttatgagatggatgtgtccccaggtgttgtgagagaggagccaagtcacacaggaagagttctaaatggaagggtgtctcacaggacagactcaaagaggactcagcagctgtcttcacattttacactccctttaatttgaagagtctcctctctagctccaaagacaaagtgaaagagacagattttcaatacaaagaaaaacttagaagtcagcctatcagcaagtggaaggtgttttcttacagggcagtgaattctccattgtaggtgctcaaatggagataggaaaaaaccaagagttgggacatcggaaagtcagtcttctatgagactgacttttcagtccatgagattggactgaaaattagaaaattcttcagcttccttgtatatctgagattccaatgtcctgtgaaaataagagaatttggctactttatgaaacagcaaggttaagcagcctaaaaacagtagaaaaaaacaccaacaaggtgggttattttttccttcccaaactctaagcaaggaaacctaagaggaagaactggccagcccagccataataacacctggcacctgggcagtgcttaccgtgggccaggctccggtctaaatgatcttcagacctcagctgggttgattctgaacaattctcagtagtggctcctgagcagtggagctaggacttgaaccctggaaagctgactccatagcccctgctcttaatcactccacccctgccgcagtgctgtaagaatgcagggcattcgtttcctgtggctgctggaacaatggacggcagtctcagtgtcttcaaataacataaacgtgttctctcacagttctggaggcagaaactgaaatcgaggtgttggcagggccatgctgtctacaaagtccagctgttggtaacccagacattccttggcttgtgacagcatcactccaatctctgcccccatcttcacatggccttcttccctctgtgactcttttccttttctttataaggacaccaatcaatcagatgagggtccaccctaatccagaaggacctcatcttaactggattatggctgtaacaaccctctttccaaataaggccacattcacaggtgccaggggttaggacttcaacatatctgtttgggggatgcaattcaaccccttacatactgtaccaaactggaggcacctagaagtgttgactccaattggtagcgcagtccttgaggaaaatgacgacccaagcaaatgtttccttcaatctctgctctaccccgtttcaggtgctatagaaaaattacgggagggcattgttttagagtgagctcctgcactaggtcccaacagaccaaactaaagtggagtcactcatgctaagtgccatttaaccaagctgaaactttaagaaagctggtggtccccaaatagaccagtttttcttgaaaacaagagtcacagcaacccatcagaaagagttcagtctgcctgagtcagagtaataaggaagtcccatttgctttaaccatgacgagaaaagtagtctgaattaagctgacactaaccaatcaacctttaaaataatactgtttccttgttcccaccttacaaaaccactgttctgccattccccagtgggaactctaattctattttatagaatggaggctactggattcatgaatcatgaataaaagccaatttgatctgtaaataattttgtcttttgacaccaggagaacaccacctcccccctcaccagctgtgtttatgacaatgatgccagaggtagcctcttcacatccctttatgattcattcagtatggccaatgaaaatcttttactaaaattgtgcacttgcttcaccctgggctcacacatcttactcctctgctggagggctagaacaccatcccctcaatcctggtacttttttcttccttaccactgagtcagggagctgagaggtttggaagtcagtgggaatccacacagagaaagaactggatttagattgggctgttttccctctgagctttgtcctgttggcttccctatctcctcaacaccacctgcctcccgcacccaccgacacacacatctccagaatgtaactctcctggctgacagggaagcacattatttagggccgtattatcccctctgctcaaaaacaaatgagctcaccgaagtgtacacttgcatttatctgagaccatgtttataaaattcatgaatatggaaatgggcagccatctcccagaatccctcacaccaagagaactggcactgtctgctgtaggtgaaaacctcttcccttgaaggctcaacaacttctacccagaagaagaaaagaacagcatattctttctcatacacacacacaaacacacacacacacacacacgcacacagtatataccaccagtctgtggtcttggaagcaaagtttaataattgaatagctcaagcactaaactcttacatattattaagatactatcctaatatgtctcatttgtcaaagatggaaaagttttgatatgacataagggtttcaatcccaataggaatattaatggtaacaataaaaataacatagcaacacggtttctgttgaatgcctgccacatgccagcaactgctttgataattaaagaattatatcttatgttgattataatccttataatggcttcctgggtaagaaaggtttattactgttttacatttgaggaggagactagggttcagagagggtgccgaagtgagttacacttttgccaaccaggccagaagatgaaagccgctggattgggaaatgcttttgtatcaaaagcacaaaatgaagtggctagtgttacttgttggaaaaaaattaactttggcaagcataaatataattcagtatttgagcaatacttttaggagggtaacagagtggtttatgtgaattctccaaaatgccatcatgaaaattttgatgatgaaaatcacctaaaattgctaattacctgtcttagcctgtctagggctacaaagtaccatatgctgagtggctcataaacaatagaaatttatttctcacagtggaggctggaagtcagagtgccagaatggtcgagttctggtgagggctcttccaggttgctgtcaactctttgcatccttaggtggtggcaagagggctagaaagttctttggagtctcttttattgtattttattttttggagacagtctcactccgtcccccaggctggagtgcagtggcgcgatctcagttcactgcaacctccacctcctgggttcaagcaattctcaggcctcagcctcctaagtagctgggattacaggtgcccaccacaacacctggctaatttttgtatttttagtagagacagggttttgccatgttggccaggctggtctcgaactcctgaccccaggcgatccacctgcctcggcctcccaaagtgctgggattacaggcatgagacactgcacccagcctctggagtctcttttataaggatacttactattctcatccatgaagtctccactctcatgacctaatcacctcacaaaggccccgccccttaaaaccatcacattgggcttaggatttcaacatacaaattttggggggacataaactttccatccctaacattacccaaatagtatctatatagtcatttctaaatatacacgtatttagaaatttctaaatagccagtaaacatacaactgacttggccttgatataactgttttcattttcttttattttcattctacatgacatattttgggtaattataaaataattaaaattagttgataaagtatggaattagaataaaataattttctattactatctaagccatgaaatgaattaggagatgctgttttcagtgaaacgtcttctagtttttaaagtgcattgtccaattcctttttattttgtgaagattttaaaaacttaaaaaaagtcttcaaattgtttgtgccttgcatttctttaaatcttatgtttaaacatcatgtgctgctagttgctagtcattttctctatcccctgccccagaccctctctttctcaggaaaggatatccagggatccgggtcccagttagtcaaggagatataagaggaaggctatgaggctttctgggaaacattttctttttccaagagagaagtgttcagagggaaaaggtcctttctcagtttggctccctctttgtgttttagatctggtcatgtgaggctgcctggcttggattgtgagggcatctctcgacaatgaagtgacaagcctggggaggaaaatccacaggcgagaaggtggcagaatggagagatggtccttcatgacttctttgagtcaccaggtccagatttcccgccaacctccagtcttcttgttatgtgatctgatatcattatttactgcagaggccactgagtggatgctcttacttgtgtctgaaaatccaattcactaaattaatcaaaatacggcactcttcttttgaaaccttgctccagaacaaagtggaaggtaatgatggggtgcttttcaaagttccagggaggtgtccctacacagcagacagctgtccaaaggaatgtagatgttggctgcggggagatctgagttgccagactcagtcagaacaggtgtcctctcccttattttatcttaaacatgcatgtcatttttgcatgctactctatgcggttctttcagccagggaacattgctgagcacccgctcacgtgctgtatggagcgcagactgcagggtgcgaggggcggaggtgatgtgctaggcctgaattcaagagggggcgcagccacaggccccgcgatgccggggtggcctcttgtaacgacgttttaaccgctgacctaagtggatccgctcctctcccgccgcccgctccctgcctgcagcacaggatggcggctggctttcccgagtgggcgcaggtgagccacgctttgctctcccgggtgggcgcaggtgagccattgtttgctctcccgagtgggcgcaggagagccacgctttgctctcccaggtgagccgccgctcgctgtcccggtgaggggaagtgagccacgctctatgggaatccttcgaatcttcattcaatttccatcgcctccttgtatttatttgggagtacttttaaaaatgaagcctatgcacaatgatgtaataagcgtttatagaacaccactggtcggagctagggcctaggtggcggtgcccgggcccaggtgccgcgcccacgccccgcgcgccgaacgcacgcacgcacgcactcacgcactcacgcacgcacgtacggcgcgagtccgagggcgacagcagcgcgcaggcgcacgtcagtccccgcgcttttcggaggctgccagcgtcccacaccagccgcaggtaggatgcggtgacgggaggcggggcaggggcgctgctgacccctgtggagcatcagggttggggcgtaggggagaggcgggcgtgtgcctctggaatgctgggggtcgcggggcggtgacttcgcgggaggccgtgggaggcgggagccaggcagtggctgtgcccttttgcttctgtcttagcgggagggtggctgacccgctagcccagaaccagactcatccaggattaggaagctggggcccggcgtggacggcaggctcggggccaggtctgcgggcggcttcctttggcagagcctgtccgggggcggggccgcttaccgcaggcatttactgggcccagcggggctctgggcgcccacagcgggggtcagtcagttcccctgtgacccaggcaagctcttaatctctgtgatgagaaagaagggctcatacctttcaggggtcatcgtgaggaatcagaagaagcagtattttatagagtattttctaagtgctgagtcctctgtctagtgctttgcagaattaaaataccttgtcagctcagtgatgttgctgcgcttcttttataggtgaaaaccggcagaaagacattaagagattttcctgcagtcactgctggcagatgatagagccaggatttgaaagcaggcagcctggctccagaccctgtgctcttaactcccgttttgcatcaagaacagaatcctatgaaaggcttgtacagtgcttggtactgagtaggcactccgtcagtattttagtagctattattccaaaggacactgtattctaggtactaagacaatgtgaatggaatggaaaacaattcctccctgcagaagccaactgtctaggaagacagataatgacattattaaaataatcagaacattggcaaaataaagaagattgaaatgcagttcatatgacagtgctaattaatcatactttttagatctaggaaaggccataaaggttaaattgacttggaaatggtaaacaagacaatggttgtgtcactgatcggtgatggccagtttttggttatccttatttgccatttaaatgattgaattgaaaggaagaagtaagacttggaagatgaatattgaaggaaaggtgaagatggaaaagagaagggggtttattctgagaacagtgactagaactctgaggtatggtagaaatttcaggataacagatgataaaggggaatgaagccatggagaggaagagaatgataatattaattgtgaaagtttgtgtcaagtgttttctgagtcacctttctttcagtttctcatttctagtattgtataaatgagtttaacatcaaaatggtatagtgaaaaaaaggatgaactgcttgacagaagaggtcagatctagttttgactctagcttatttagctttacagctttaaataaattacagtgtctttaaagctctggatcttaagttttctaattgttttttaaacaaagatttgtgaacacctacttacaatgtgacaaatgtctttgtaaggcattatgggagataaaagctgcattaaacctggctgttgtacttacaagtaatttggaaggcaaaatttcaaatacttgaacctaaagtagggtttcttggttttcatttaattgaaatactgttaggaaacaaaaatttttcataaatttttcttgtggatatgtaagtaaattctatatatctagcaatatgatacatctatagttctgtttaaaggtaacaatgtgaggaagcttatgcgaataacttgacagaagaaatctaaagtaaaagcattttcctagtaggctagcttgttctcttatttcatttattgta

SEQ ID NO: 1377 - DNA, 2064 bp, Homo sapiens
tggcacatgtggctggaaatgcaagaagagggaaacgtgtggcttggagtttcaagaagagtgactgtctcagtgccgagtgcctcagcagcttctccacatgctcttcagtccccaaagttggagaatcccatcaaggagagtagccctgtaaggaattcgaatttccagcatttttcacctctgacagagcccagacaccatgaacgcaagtgaattccgaaggagagggaaggagatggtggattacgtggccaactacatggaaggcattgagggacgccaggtctaccctgacgtggagcccgggtacctgcggccgctgatccctgccgctgcccctcaggagccagacacgtttgaggacatcatcaacgacgttgagaagataatcatgcctggggtgacgcactggcacagcccctacttcttcgcctacttccccactgccagctcgtacccggccatgcttgcggacatgctgtgcggggccattggctgcatcggcttctcctgggcggcaagcccagcatgcacagagctggagactgtgatgatggactggctcgggaagatgctggaactaccaaaggcatttttgaatgagaaagctggagaagggggaggagtgatccagggaagtgccagtgaagccaccctggtggccctgctggccgctcggaccaaagtgatccatcggctgcaggcagcgtccccagagctcacacaggccgctatcatggagaagctggtggcttactcatccgatcaggcacactcctcagtggaaagagctgggttaattggtggagtgaaattaaaagccatcccctcagatggcaacttcgccatgcgtgcgtctgccctgcaggaagccctggagagagacaaagcggctggcctgattcctttctttatggttgccaccctggggaccacaacatgctgctcctttgacaatctcttagaagtcggtcctatctgcaacaaggaagacatatggctgcacgttgatgcagcctacgcaggcagtgcattcatctgccctgagttccggcaccttctgaatggagtggagtttgcagattcattcaactttaatccccacaaatggctattggtgaattttgactgttctgccatgtgggtgaaaaagagaacagacttaacgggagcctttagactggaccccacttacctgaagcacagccatcaggattcagggcttatcactgactaccggcattggcagataccactgggcagaagatttcgctctttgaaaatgtggtttgtatttaggatgtatggagtcaaaggactgcaggcttatatccgcaagcatgtccagctgtcccatgagtttgagtcactggtgcgccaggatccccgctttgaaatctgtgtggaagtcattctggggcttgtctgctttcggctaaagggttccaacaaagtgaatgaagctcttctgcaaagaataaacagtgccaaaaaaatccacttggttccatgtcacctcagggacaagtttgtcctgcgctttgccatctgttctcgcacggtggaatctgcccatgtgcagcgggcctgggaacacatcaaagagctggcggccgacgtgctgcgagcagagagggagtaggagtgaagccagctgcaggaatcaaaaattgaagagagatatatctgaaaactggaataagaagcaaataaatatcatcctgccttcatggaactcagctgtctgtggcttcccatgtctttctccaaagttatccagagggttgtgattttgtctgcttagtatctcatcaacaaagaaatattatttgctaattaaaaagttaatcttcatggccatagcttttattcattagctgtgatttttgttgattaaaacattatagattttcatgttcttgcagtcatcagaagtggtaggaaagcctcactgatatattttccagggcaatcaatgttcacgcaacttgaaattatatctgtggtcttcaaattgtcttttgtcatgtggctaaatgcctaataaacaattcaagtgaa

SEQ ID NO: 1378 - protein, 474 aa, Homo sapiens
MNASEFRRRGKEMVDYVANYMEGIEGRQVYPDVEPGYLRPLIPAAAPQEPDTFEDIINDVEKIIMPGVTHWHSPYFFAYFPTASSYPAMLADMLCGAIGCIGFSWADACTELETVMMDWLGKMLELPKAFLNEKAGEGGGVIQGSASEATLVLAARTKVIHRLQADELTQAAIMEKLVAYSSDQAHSSVERAGLIGGVKLKAIPSDGNFAMRASALQEALERDKAAGLIPFFMVATLGTTTCCSFDNLLEVGPICNKEDIWLHVDAAYAGSAFICPEFRHLLNGVEFADSFNFNPHKWLLVNFDCSAMWVKKRTDLTGAFRLDPTYLKHSHQDSGLITDYRHWQIPLGRRFRSLKMWFVFRMYGVKGLQAYIRKHVQLSHEFESLVRQDPRFEICVEVILGLVCFRLKGSNKVNEALLQRINSAKKIHLVPCHLRDKFVLRFAICSRTVESAHVQRAWEHIKELAADVLRAERE

SEQ ID NO: 1379 - DNA, 1931 bp, Homo sapiens
ggagagagagaggacagagagcaagtcactcccggctgcctttttcacctctgacagagcccagacaccatgaacgcaagtgaattccgaaggagagggaaggagatggtggattacgtggccaactacatggaaggcattgagggacgccaggtctaccctgacgtggagcccgggtacctgcggccgctgatccctgccgctgcccctcaggagccagacacgtttgaggacatcatcaacgacgttgagaagataatcatgcctggggtgacgcactggcacagcccctacttcttcgcctacttccccactgccagctcgtacccggccatgcttgcggacatgctgtgcggggccattggctgcatcggcttctcctgggcggcaagcccagcatgcacagagctggagactgtgatgatggactggctcgggaagatgctggaactaccaaaggcatttttgaatgagaaagctggagaagggggaggagtgatccagggaagtgccagtgaagccaccctggtggccctgctggccgctcggaccaaagtgatccatcggctgcaggcagcgtccccagagctcacacaggccgctatcatggagaagctggtggcttactcatccgatcaggcacactcctcagtggaaagagctgggttaattggtggagtgaaattaaaagccatcccctcagatggcaacttcgccatgcgtgcgtctgccctgcaggaagccctggagagagacaaagcggctggcctgattcctttctttatggttgccaccctggggaccacaacatgctgctcctttgacaatctcttagaagtcggtcctatctgcaacaaggaagacatatggctgcacgttgatgcagcctacgcaggcagtgcattcatctgccctgagttccggcaccttctgaatggagtggagtttgcagattcattcaactttaatccccacaaatggctattggtgaattttgactgttctgccatgtgggtgaaaaagagaacagacttaacgggagcctttagactggaccccacttacctgaagcacagccatcaggattcagggcttatcactgactaccggcattggcagataccactgggcagaagatttcgctctttgaaaatgtggtttgtatttaggatgtatggagtcaaaggactgcaggcttatatccgcaagcatgtccagctgtcccatgagtttgagtcactggtgcgccaggatccccgctttgaaatctgtgtggaagtcattctggggcttgtctgctttcggctaaagggttccaacaaagtgaatgaagctcttctgcaaagaataaacagtgccaaaaaaatccacttggttccatgtcacctcagggacaagtttgtcctgcgctttgccatctgttctcgcacggtggaatctgcccatgtgcagcgggcctgggaacacatcaaagagctggcggccgacgtgctgcgagcagagagggagtaggagtgaagccagctgcaggaatcaaaaattgaagagagatatatctgaaaactggaataagaagcaaataaatatcatcctgccttcatggaactcagctgtctgtggcttcccatgtctttctccaaagttatccagagggttgtgattttgtctgcttagtatctcatcaacaaagaaatattatttgctaattaaaaagttaatcttcatggccatagcttttattcattagctgtgatttttgttgattaaaacattatagattttcatgttcttgcagtcatcagaagtggtaggaaagcctcactgatatattttccagggcaatcaatgttcacgcaacttgaaattatatctgtggtcttcaaattgtcttttgtcatgtggctaaatgcctaataaacaattcaagtgaa

SEQ ID NO: 1380 - protein, 474 aa, Homo sapiens; identical to SEQ ID NO: 1378

SEQ ID NO: 1381 - DNA, 2230 bp, Homo sapiens
gcaatccagtgtgtaggtccagggcgacaagcgctgctcccgtggctggggtaagtccctccagcattcagccttgctccctgtgcttatctggatgcggtgtaggatgaagatgaccctatagaactctaccctggaagtcctggcaaagtggatatgtgacatttttgaaaccagggacatgttggtgctgcttaatatttaaatcataattttcagactcttaaaaattactaaataagtttgaagagacacagccatctgcctacagtgccacccctgagcttcacgccaccctggtctccaggaaaggggagagtctcaggaatattgaatgcagttttcacctctgacagagcccagacaccatgaacgcaagtgaattccgaaggagagggaaggagatggtggattacgtggccaactacatggaaggcattgagggacgccaggtctaccctgacgtggagcccgggtacctgcggccgctgatccctgccgctgcccctcaggagccagacacgtttgaggacatcatcaacgacgttgagaagataatcatgcctggggtgacgcactggcacagcccctacttcttcgcctacttccccactgccagctcgtacccggccatgcttgcggacatgctgtgcggggccattggctgcatcggcttctcctgggcggcaagcccagcatgcacagagctggagactgtgatgatggactggctcgggaagatgctggaactaccaaaggcatttttgaatgagaaagctggagaagggggaggagtgatccagggaagtgccagtgaagccaccctggtggccctgctggccgctcggaccaaagtgatccatcggctgcaggcagcgtccccagagctcacacaggccgctatcatggagaagctggtggcttactcatccgatcaggcacactcctcagtggaaagagctgggttaattggtggagtgaaattaaaagccatcccctcagatggcaacttcgccatgcgtgcgtctgccctgcaggaagccctggagagagacaaagcggctggcctgattcctttctttatggttgccaccctggggaccacaacatgctgctcctttgacaatctcttagaagtcggtcctatctgcaacaaggaagacatatggctgcacgttgatgcagcctacgcaggcagtgcattcatctgccctgagttccggcaccttctgaatggagtggagtttgcagattcattcaactttaatccccacaaatggctattggtgaattttgactgttctgccatgtgggtgaaaaagagaacagacttaacgggagcctttagactggaccccacttacctgaagcacagccatcaggattcagggcttatcactgactaccggcattggcagataccactgggcagaagatttcgctctttgaaaatgtggtttgtatttaggatgtatggagtcaaaggactgcaggcttatatccgcaagcatgtccagctgtcccatgagtttgagtcactggtgcgccaggatccccgctttgaaatctgtgtggaagtcattctggggcttgtctgctttcggctaaagggttccaacaaagtgaatgaagctcttctgcaaagaataaacagtgccaaaaaaatccacttggttccatgtcacctcagggacaagtttgtcctgcgctttgccatctgttctcgcacggtggaatctgcccatgtgcagcgggcctgggaacacatcaaagagctggcggccgacgtgctgcgagcagagagggagtaggagtgaagccagctgcaggaatcaaaaattgaagagagatatatctgaaaactggaataagaagcaaataaatatcatcctgccttcatggaactcagctgtctgtggcttcccatgtctttctccaaagttatccagagggttgtgattttgtctgcttagtatctcatcaacaaagaaatattatttgctaattaaaaagttaatcttcatggccatagcttttattcattagctgtgatttttgttgattaaaacattatagattttcatgttcttgcagtcatcagaagtggtaggaaagcctcactgatatattttccagggcaatcaatgttcacgcaacttgaaattatatctgtggtcttcaaattgtcttttgtcatgtggctaaatgcctaataaacaattcaagtgaa

SEQ ID NO: 1382 - protein, 474 aa, Homo sapiens; identical to SEQ ID NO: 1378

SEQ ID NO: 1383 - DNA, 45133 bp, Mus musculus
  misc_feature (1)...(45133): n = A,T,C or G
tttctggagcaacaaattgttaggctacacatcagaaggcctttgcctctcccctctgaagagatccagtgccactattgctagactagcttttcctgagaaaacagagatggagctcgaactgtggtcccgtagggtccaacacttgtctgaatgtacctgaggccccaggttccatccccagcaccagaaagaagaaagcaaacacaaagaagagatggagactatgaccagtgttctcagcttccctaatgctgcgaccctttatacagtgcctcatgttgtggtgagaccccaaccataaagttatttttgttgctacttcataactgtaatttctactgctatgaatcataatgtaaatatctgttttccgatggtcttaggcaacccctgtgaaagggtaactcctggttgagaacctctgactctacagcagctggcagtactgaattcaagcttcacaagctaccaagtcacatgtgtggctaaaatttcttccctgggaagacatagataacgccctcctgcttccctaaggtgccaacaacaagccaagattgcatgccaccaaagttcatactggatgccaacgagtttattaggtttaccaagagagcataggtgaggggttacttacaggaatgtgcatgtttcctatcccaaaagaccactctggagagtctttacccagcagccccccccccataatctagcccctctcagaggccatctgcaattatggcagagttgcatatagcaagtgatatgaagatactgaacactcaggtgaggatcccagaacctccccaacctttctttccatgaggggaggtcaacagaccaggaccccagcagggatggatgactttgcatgcgggcacggctggattcccaaggatcacagctgtttggcttgaaggagtcctacacaataatatgattgagatgtttatggtaaaaagaaaaaaaaaaaaggccaaacaaactcataaaggaatacatgaggtttcagcaacacatgactgtgattcctgcgtgtgcacacagactcttgtgtatggcattagtttctccagttcccttcactcgctagtgtaacccctcctctgagctggccctgaagccaaggactgtactagagctggggaacgttcatgccttgaacataagtagcgtctgggagtcagggggcaaggcagcctagaggggctggtaacatgttactttagtgtttccagtgatacaggaaaaattccatgcaaaggtcttcccttttgttttgccaattctttggattatacccttgttggtgaagttggcaaccccaggtaaagcttcttttacctgtctgtctgtgtcatccttgcgcaggggccatgctaatcttctctgtattgttccgattttagtatatgggctgccgaagcgagcacgacctgtctatctgtaattacttcaaccgccttggctctcctcttgtgtcagctgtgttgagaagcttggcaggaagcatctggagatggagaactgggtggtcctatgtgtatggtttgggaagtgcagcagatgccagggcttagcaaactctcagcttgctcaagactaatcccgtggattttcattcttgtgggcatcacacccctgtgtctgcgggtttggatcctgttccaaactcaggtgacacagccatcttccctctgtcctttaaaaccagagtagcagctgacatttggaggtacatgttttctaaggaaattggtgcgggctacggagataatggcgttctatttccccaacattcttcagtgttggtggccacaactatcaactaagcccctctctgagacaaatgttctttgctgaagagaacaacttgcttaaggtcacgcttgcattaccgagggcagccatatctaatggctagctgatgtaggattaaaaagggctcattcgctcatccagcttggaccaactctgagccatcccagtcccagagctctctgaaacatctgctcaggccccacggccacgatagcacagaaattcagtttctctctgcctatttcagcttcccttgggccaggaatctacctgcaaggctccatctatctgggtcagcagagctctggctgtgtttgcagagggtagacttgtctcatgccttttgccagtgatggtcataggagagtcatatgattccacaacagcaaaagacatgggaagaaatgataagaaaactatgtcgatagttttcctatgacataaaaaaaggtcgagaagaagctctgaaggacgagtctgaggtagctgtggaaagcaagcggtgtaggcagaaagcaaagctaagagaacagcaaagaagctgaactggagccactaaatgctaggccagggcctgccccacctgtgagcttcagtcctgtgggataaaatcccctagagagtacagggggaatttaccacacaaatacttaaagatggagttgcctctacagtttgtaacttgtgctgtagctccagccttggtttctggccctttgaaagcctgtccgcaccttcttcttgtgtttcctggggacccaaactctcctttcctggtttttgatgaccagccatatgtcttttgtaatttagctaaatcacacttccctattttttttctataaaattatggcatggagtctagagacccaaacttgcacaataatgtgcatactgagctagctgggagggatgccgactctgaaaacccactccctaggatgaacttaggcaagaagggaaggcaacagtgacggaggctttctgcacctagaggaataggagctcaagtttaaatgtttagctcaggcagaatataacctatgccctgcaacccatagcttaattaatctgtggcggcctgggtttggcactaaattgcctaaactgagaggtgggatgagtggtgagggtcacccctcccctgtccttccttttcccattctgaaggataatttacaaacagtgatatgtgttatcatgcacacagttagctaacttaaagggctgttatttttcatgggaaaagactaggagaagcctgtgtgtgaatgtggcgattgttgtcccatgcggtggggtcccatgcggtggggagaatgttatcctcggtttctttccacttaatcctgtccttattccagaggcaactagtgttctgatttctgtcagcatagagggactgtacttgctcttgaacttaatatgtgattcttgtgtttggcttttttcactgtgttgttctgtaacgtgaacatgtgcataatctttcttgctcgaagactgtctgagcgtccgatgctctctcctccccctgactactgtcatgtttgagggatcgctgccctgtccccctatgattgtttgctgtgggacaatcttgccatttgagtttcaagaggcatgggatcctgatgactgatactcggttcctctgggggtcgttattgtttttcccatccccatgatgctggtaccactggaataagggcagaaagacccgtgggtccaggacagaggttgagactgcctcccatttgacttgaagatactgtctgtattttaccctgtgaggatggtcccacagcagaggcaatggagccccaatgaggctcagtcgtaagggacatctctccttcctatgaactctttgagataggttattaccattaccctagaaacatcaattccacaaagtgggatctgagtttggaatcacgatgttttactagtagcagtcaagactcagacctctgcatctgagttggttcatacatatggtggttagacctcaatccataaatgtattgttcttctgctatgtaagacttgcagccagatgaactttctccaaaagggccaactagagttgccgatcagttggtatttttcctaaagcgttttctttcttcttaaccaggcagctttggccttgggtaaaggttagcagatttttgctaccccccttggaaatggatgctttgtaacagttgtgtttacaattgaaatggtttctagaccctgggagctttgcaagagatgatgccaaaatcaggcattaagctctctaataggcctgtgctccgataatcatattaacagtgctgcctcaggctccacactgcaattttaggcctctctccttgaacataatgtttcggctggatgataattatgagtatgattttgcatttcttcttactgagtgatctatttcccaaatacgatgttcttaatagggacagccagttgctcataccccttccaatggctgaccttgtgcaccaaggtcacaatatcgtgtgcagactagatttcacaaacctggggattctgagttgttaaaaactgtgcactatggagtcccccggggatcatggcatttgtttccagcatctgcacctggtgatggggctttctgttttcctctgctgcaagtcaccctgggagcaaatcatctgttttagagctggtgattctagccttcgactttcttgtccaccattcaagataacatctgcggtactaaggtttgtggtttctgaaaagtctctactttagaggcttattttcctcacttgccagtttcaaaggactcaaaatagatttctaagaattccactgtcaagattctacaggtacaatcaataattagttcttcactcaatacaattgtgtatagtgtcccacccccgaaacagagtaacaaactatggaaacactgctatccttttagaacagcatttctgaaccttcctgatgccataccctttaacacagttccttacgttctgatgacccccaagcataaagttattgttgttgctacttcgtaactgaaattttgctactactatgaattgtgattctgtgtaattgaaatatctgtgttttctgatggttttagtgatcctaagaccctgtcaaaaggttgttcaactcctatgagtcatgacccattgatctaaaacgacctaaattcacaacatatttgagtgtgggaattttggctatttatgccagctatgagtgtcccttagccatgctgggcccctttctatgcttgcaggtgagaaggcgagaggtacaagtaccaaccaggccacagggctaagaggcatgccactgaggtcttcattacacaaaggatcacatgagctgggtctgacacaaccaaggaagaaaaaggtagctctgagcgggtaggtttgttgggggtcctggcctgtgaggcaagggcagtcaagaggaaaggaggtacatgcagcccagggtgttggttctgtaggtatgctgtaggctagccagaggtactgaggcaaaatgcagagctcaaaaactagggagaggcagcccgacctacttgctcaggagtttccggtctgtagaggccaaactactaagtgggcactaggtacacagttcctgtgtgcaagatcgtctttggtttcctcaccaaatgtgatgcaagagccaactctgtgacactcagtatacaatgtgtcaatttactctgtgggccaagctgtaagtccccagaggggccagggattcacaaagtagcaataggccgaacaaatagggtctaaagaatgaaatttcggacctaaggtcttttcccagatccatgtcacagtgtggtcagacagacagaacaggcctgcctgtaagtgttttcttcaggctaagtaagcaacctgagtgcctgccttccgcactcccctctccaggaagcctcccaggctcccccaaccctggctaattgctccttttctgctctcagctctcctattgtaagcgcctaacaatttagcacttaatcagcccagctgcgcattcctctctaattgttttggatgtgtttgtctgtctctgaagcaaaattataatctcctctggggcagagactcagttttttaaaaggctatgagagagctgtgggtgtatccagaggcacattgggggataggaacaaggaaactactcacatttatacaaaatttcaacatttgaaaagtgcttgcttgtaatctgttctttaccatcggagacaggtgcattttaacagctccattttatagacagtgaaaataagatcaagaagttaacaaatgcctggaagaaggtgacagacattgtaggataagcttagcattcaaggttctgtgctataaaggacccacagaggcttatttggaggaggaggctcacagatgtcttaccctgatggatatcgtggaaaggaaaagtgatagggtatggtcctgtttgcagagattcaaaaagaaacaactgaggcagaattccactgtgcctcttgttcttttcatcttcattcctccaaagattgtttatcgctccagcatgttgggtcacaaagtgctctgcccttctggtgcctgactatccctcctgctaagtggctgagctcacatccttccacgtgtctctgggaaactgcagacttcagcaagcgaagtgaatgaaaggctgtctcatcagtccaagtgccagtctgtgcctgagactgtgcacccatcccaacagcagctgccactcacaatcaaacacctattttgcttctcctgcgggcctgggaggtgacactgctggctctcacccatgttctccaaggacccaggggctggatgaaccttctacctgatctcattactgtcctatgtctcctgcacacacccccttgagaagactgacatccagccatattcccttcccctttctggcgctccccatcttctgatctccagggcagcactcttagaaatttagctcctggctcaatgtcttcacaatgcattcctaattcctgcccacatcctagatggcttcagtcacaccaatggtccatgcattaaccttgacacttaatagctcagcgttggtattaacactcacttctaggtgttcacttctaccctactccatcactttctggcttactgtggccctaaagttcacctccgcacacccagatttgagacctgacctccttcccttattgagtgacttgatgtcttgtcctttctctctgatcacccggcactgtggaccaggttcttctttgctcttctgctctaacaactgggaattaatcctgggtcctctaaaagagcaacatgtgctcttaacagttgagccacctctccaggcctctggttattttttttttttttgacttttcacagtcaaatgagttgcctagactcagtgcctttctatcattcatatatatatatatatatatatatacacacatatatatataatgcctatcacatttctatcattcatatatgtgtgtgatagctcttgctcttatttgcgtgggatttttcttcaatttttaaaagttaaaatataattatacaatttctctcttccctgttcttactttttttcatctctcatttactccttaggccattctttgatccaccagtcatgacctgcaaacatcccaacatcattcaagccactagagcaagcacatcacacatgggtctctgccattttaagagctgttgcctcctgcctcccccactgtgtctgttccctctgctgactgacttttctccctgcctcactactggtcatcctgtccctctgtgagatagctcaccctgtccatgcccctcttgatttatctacccctaagttcccttatactatcttatggatttcattgccgcagggccaccagttactctagtactcaactgctcaaaagggcatctcacaggcgccacacacctgccctggccaagctggaatcttggcaggttccccaatgcagaaatggctatctgcctggttgaagctgtaccacttaggcactttccagaattcctcaccatctgagtggctaagtcttgtggtggtgtccattctctactgctgtatagaccgacaccccctagctgtgcccctgccctatccttcatatggcagagaacgacttacccacaatgcaaattttagaatataatttctacttcaaatgtttcattgaataaaatccaaactctgcttatttcgataccttccccttatagccagaagcagctggggtgtgtgtggttttttttatttttatttatttatttatttttgtttgtttgttttttgtcaacttgacacaaactagacttatctgggaagaggaaactcaactgagaaacgccttcatcagattgtccacaggtctgtaggtttgtttgttcatttgtttgttttttacatgtggtgtgagagggcccagcacaccccaagtagaataagaaagcaggctaagccagtaagctgggttcctccattgtctctgtgtcagctctttcctcagtttccctttatgaactgtcggccaaaccaaccctctcttcttcagctgcttttggtcatggtgttttaccacagcaatagaaaaactaagcacttttcctggactcctcaaaatggtcctaccttcttacagttcttttggtctatatcttaattgtaatgaaatagttttaatttatttaattattaagcacttctttggtcgtctgcgcctgggttggacagcacatttgttgaatgtattatctctgcctttcgatgatgaatccctcataacctaagagtaagcaggacagctaagtgggtgtggaatccaacacttgagttatttccccaaagtcacactggaagctggatggaacatttccagctgcactcaatggcaccaaggagaaaacgcctttaaaaaaaaaaaagacaaaaacaaaactacatggcctgggcagcttttggcagctctgaaagactcaagctttctttccctgttgcttgccagctgactttactcaaaacttcttgcctagcaatccttgaaagcatgtctgtggcttcggagagccatttaagggggaaatacaataacaaaatgcccaccaagaatccagctttgtctcgtcacaacgtttaaatatcaatacggcagtctgcagttaatcaagtacacagacctaacttctaatttgcttcttttattggctttctgaattataaatataatcgtgggaaaaaattcctcagagtcaagaaaagcatacaatttctcttcctttcttgttcagagtgacagtggttaacagtttatgtgaacatataaaaatccaagttgttgttgttgtttgggaacgtagtgacaaacataagaacagatcggtctgcagattgtcaatcttaacatttccagaaccactgactcagaattccttcttgtggatgaccgtacacacgtggctctgcgctcaacccaaacaactcgcacttacttctttctgcggctgtaagtaagacttcgtggtcttggtcgagctggctgaaattcaatctccagcgctcgaaagtcaatggcatccctttgactaactccatctgacagccttctgaaaaaaaaaaaaaaaaaaaaaaaaagcaaacaggtgtagagtgttaacttctcagtgtgattatctccagagggtcgaccgaaggccttagcaataagaatggaggggagaggaagcagcttccaagcgcgtcccaggttgtggggaccaggctctaggttcggtgttgagggcgtgccgactcggccggcccacccagctctacaaactagagcaacttctccatccggtctccccggctttttcctgggcctcaccttggcacgtagcgctctggggagcctggggaggcgctgggttgggggtgggggaccgttccgggtcccgcgtgatccatgcttgggtgtggttggtgctcagtccagcggcatcacgggggttcagcgttcagatgtcttgctaagcccaacttctgaagtcgccgagcgaactccgcacccagcgcctcccgcatcttgcattcttgacttcctgagacccgagtggaaccacgtggagacctcatcgtgtctttgatggcttcataacctgaaggtccgaagaggccagataggcaccaccctcaggccttgggcatctatctaggtggctgccgctactatgtacgctgagagcaaaggtcaggtgcacttgggtttccctcttctcacctcccctcgtggatcccgctcacaagccactcggagccgtctagacttagctacatgccagtgctggctggcaaattctcaccaagcgccacgccctggtagctgaagagtttacactagaccctggatctcagcagggtttgggactcaagtctcagctgtttttctgggggaggctacttcctggcggagcgggggagactgtaatctttggacaccgcgcgctccagtgaagccttaggttttctcagtgctacgaggggcggagagctcgggaagggcccgggggcgcagtcccagcgggacctgggcgccaactggcgggagggttcgagttcggcctttcccaaacttgggccacggggcgggagcgcggccttcccggcggtgacgcgcgcggtggcgcggcgtgtgattggagaatcgggcgggggcgggaccgaagggacgcggcagggggcggcggtgccaggagccggggccgagagtaaggctcagcggccgccgcggcaacaagtgctggagctgaggcgagccggagccgcccagaccccgccgggccgcccgtccgcgcattgcgcatggagcgagagcggcggcggtcgcggggctgagccgcaagagcggctgggacgtggatgcggccgcggtcttccgccccgccccgccgagctggaggtgtccctagacaaggtagggccgggtgggtgggcaccggccctgcatccccgccccgccgcgctagttccggccggtgtgggcgccccgcgctctcgccgctcttctgtggctcctgcgttgtctgcgcatacgttccatcgggttcccctcaccgctcccagtctcactttcctggcctccgcacatcatttccctggcctcctcacctcccggatatcctcaccggtctccgttctcctgtccggcttcctcacctcctggtccttctcccctcctttacagcctcctcaccttctccccagtctcccggcctccacctccttcctgaccttctcacctgctcgacctccgctcttcctgcacccacagggagagggcagcgacaccctgagccgcgctgtaccccgcgcacgaggtgcgggcctgggcggcgggggagcgtcgcgggcggtgttctgccccgcccgcgcactgcgctggtctagggtgccgcaggggcagatcaggtgtttgtgagccgctggctgccgcttttcacccccatccgctggcactgttatcttcgggtccccaaagactggtttctgtgaaacttcaggagaacctttcgcgttgacctctaaaaaatattccacgccgcccgcgttgaatgattaactagactcaggactgcctggggagctggccctgcgactggcaggtgggcgcacctgaggggctgggacccttctggggacgtaacacctagcacctgctcaaatgcactcgcctagggtcctctgagctcccgggtcttgtgtgggaaggaagctctgaagactcctctctagtgtcatagtgcgtgcgaggtcatcttgaaaagtaatgcacacttgggtaacctgggctggccccatgttcgctcctgccccaaatacagggtggctggccttcgctcccctgcccactgtggtctcccaacttgactgcttcaaacgattaaacctgttcttctgccccctccgctccccgccaagccgtagctttttccaggtttcgaagccaatgggtgaaaatgggcttcgtgttattacaggttcttccagggtacttctttgtgcctcggaaagtgatgggatggttaatgagagggccactggacctgagtggagctaggagggcgggaccggggcccagccgtagcgcacttctgtggggtttggaccgcgcacttgataggggaccggctcaggggcaggccggtcacttccctcctgttctagtccaacttctgtttcttttgaatagagattatgaaagctgatggaaccccggggagtttttacgccggtcctagagctctttatacggttaggttttaagaccaaagaagtgtgcgggagccctgtagaactcgcccgaataatttccggcctttgcagtgtgtacagatatgtttatcagcagatctgcttggaactcctttctcggcgtagaatactgctttccccactcaggactcagcctgccgttcttaatttagtgtttttgtgtaaatgtcggattctctgctaaacttaggagtccattctagaggcttgctctgccacgtgctgataaatgacaatgtttttttccttaagaggcttgtatcccctatttagtttcgggaatgggatacttggacagtaagattgtttttaaggacaaataagatgcttaagcgcttatagagatcataacgaagttcttggtggcctcagcttacctttgccaaaaaccagtcatctggtggaactgttcagatttgtcagatttgtccagtctgaaatcacccaagcttgaccgacagagatagtagatttttaagacctaagggagaggtagtctttgagagaaacataatttgtttatgaattgctttaccccaaacccattgcttttgaaggcctgagcacagagatggtttacggttttgaagatatacttgcttaaaaaaaaaatcgcatggtggttcacacacctttaatcccagtactcagagtcagaggctgaggattgccagagttcagaaggccagcctgggttacaaagaaaccttgtttcagaaaaccaaaaaacaattttaaaataatttggatttcccttgttctcacatagtacagttaggctaaaaagggaaaggggaaccgataatttactgttgactctgccctatactgttggttcaaatgtgtgtgcttggttttttaagggttatattaggaaacaagatccaaacattgttgcttaacctaaaaatgatgctggttggtctaaaaggctggtctaaaagctaatatttggtaatacgacctgttataacacacaaatagtggtacataaattaccaaaactcagaaattatcatagaggtcttttggtcttctgtaattgctctggggtcaaaaatcattatgatcagttgtctgacattttttagtgattacggattaaatcgtgaattgaatgaggctcgcttcatttgaaagctataagtattacctaacaactgaagtcgtccagtaaaggagatagtgcatcgctccagctcacctcaccttgccctccctagatgtagctctggctgtctcttttccctttctggacggagtgggcacttgctgaatatattcaaatggtaggatgaatgtattcctctctggagaggcaattactgtttgtataagaggtgtgcgcatgtgtgaggtgaggctttttgagaattgatgtaatgatttcatcattagccactgctggagaagtttgccagtctgaacagagcctgagtgggaagcatgaggcaccaactgtttgtggaggatttgttcctggggcagctactactggaaacattattcctactgagttttctattcctttcaactgtatgttgccccttctgtgagttttttgttgttgttggtggtggtggtggtggtgttgggtttttttttttaactcttttgctgcctgctttgtttgcttgatgtggcttaattactgtaacaaaattcaaactctttgagagccaacattgtatctgattacaatataatgcacatttttaacatttatgtaaggttaggtgtccacatttccttatgtaaatgtaagaaattatttgaaattattttctgtttgtctatagacattccctccagcagggcttaatttttttaaatttttttttatttggtagggaaattcccattagccaagcaattgatacttgccactttccattgttacatttaaaactaggtttgtgtagagccttcactctggtgtaataacaatgtatattgcttagtagctgttcatttctttccctttaagaaacaaacttattagtcatggtgatcagttctaggactatagcaaggctccctgagctgtgctaaggtaagatagttaggagcatgaacttggagtctgttagctaagcttttccttttagttgatgaggcacagtgtgaggttctgtttatgttacacagtcagaccctgagctgtttcactaggtttctgtgcttcttttctctctctctctctctctctctctctctctctctctctctctctctctctctcagatatataagtacactgtagctgtcttcagacacaccggaagagggcatcagatctcattacagatggttttgggccaccatgtggttgctgggatttgaactcaggacctctggaagagcagtcagtgctcttaaccaccgagtcatctcgccagcccatctctgtcccttttctaaaggtgctcaccatagattggttttctctatcctgcagttaattggaatctgctgtagcatatgtagtgttttataacccgtgagatttgaaagctggatttgcccctagctgtgtgatggtgggtaagttgcttggtctccctgaacctcagttttatcaatgtgagatgataggaaaattaaagtgaatgatacctgggctgctgagattctcagtgagtttgggggtacctatcatcaagcctgacgtggactttatgagtatggtggaaggagagaagcaattcccacttgttttcctctgacctctgcttttgtttcatgactggtgctcacaagcatgtgctcatacatgcacatttaataaaacaccagtacctgagatgctgatagctaaaggaattgtatttttggtttaaataatctacgtcattataaaaaagctaataagtcttgttttgaatcagtcttttcttgttgttgttttttgtcttttcttttttcgagacagggtttcgctgtatagctctggctgtcctggaactcactttgtagaccaggctggcctcaaactcagaaatccgtctgcctctgcctcccaagtgctgggattaaaggcgtgcgccaccacaccgatcattttgagacagtcttaaacaccctctccaccctggctccctggtactcaggatgtaaatcaggctgatcctcaaactcagacccacctgcctctgcctccctagtcctggtgcacctccccatgcctagcaaatgttggtcttgctctgtggcatttagttgaaataagctgtgtctttaaagttgatgacctcctattcgtttttcattgatttatctctgaggggccacacttggctatctcacccggagctgtttgggcacctggctggtatgagctagcttgtaacaggtgaggtgatagagttcccgaggagccgtgactaagcactcaggtgctcagacggcctttaccacttcatgttttgtgagtgaattattccaaaagtgagagcacattgcagttgctttaattgcatgcttcactctgactggttaaaccaccctcatgtgttaatggacatgtctcattcttggttttgttttgttttgttttgtctgagacagggtttctctgtgtagccctgactgtcctggaactcactctgtagaccggactggcctggaacccagaaatccgcctgcctctgcctcccgccaccactgcctagcacatgtctcattcttaactgcatcttggatgattgatacttcactcttttgctttgttttttattttctcctaaaaggatctttttatttacatttacttagaaacagtattcaagatatcttaaagggaaatgcctttggttgcacggcaagttaaggataacctcctgtcactgacttcatttgtccccttcgaagggctcacctctgcattttccagcacttctggaataaccaggaaaagcatattgttgctgcattaggtgacattgacacttgtggatctgccttagagggtgctagcaaatgatagatagcaagtctttgaaagcctaggcctgagactgtccacatagaagctggcacattgtttgagaagtgatggctgcttgtggcagctgtgtttgcaggcagattgctatggtctgggtcccctttgtcctattgggtctggagtgtttccacacacggttacagcatatgttgggagcagacaagaaaggcttcctgaggaagtggcattgagacttcacctcacaatgatgaatgaaaaatgcttcaaaaggagaaagcagttggagggccgaggacacagcaagaggctcaagcatgcaaggtcagaggaataccctctccacaccccagctttggagaacaggggaggtgaccaaccttagtgaccatgtagagacaggaggtagtagagagccattgaatgattttgcagttgttgaagaaatgagcatgaggtggagaggaggcacactgggaggctggtgtagtttgtgatctgcagactgcctgcttcctgttattctgcatatgtggtctcacaagctggagggatcctttaaaaatggaaatatctggaggtcacttctctgggctgactcctcctgtttctgttgaaatgtattgacagttctggggtctactagaatatctacctctgttcttctctccctcccattaccatcctgccctttggctcttgtgcctaccactccccttaggggtgctggtgctgccttgctgtccctggccatcagtgttagcttgttccccagcctctgtctgttttaggcatgttggtatttgtccgagtacctcattggttttagaaagggaaagttgagggtcccgggagtggtccagggttaaagtgtacgtttcatttgacagattctagaggtgggaaaaaaccgactctgtgagggggtggcatttggaaacataaaggcagacgtggggaagtgtgaacctcaggcagatctgactgggtagagtttggggtggtgtctaagagagacccagggaccagagtgtctgctaagggaaagcccagcagcagagttggcccagctctacctaagggactgccatttgtccccatcttgaggactctgcctaggatccaaagctgccagtcaggagaaagaggaggagagtggtgctgaaatcatggtaagctgtgttgggctgtaagtaagtagaatgcaagaactatgacagtctagctgggaagggggttgtttgggaaggtcagcgtagggctagcagcaccagcaaggagagcatgtctgtgaccaccagagagggcagaaattgaggccactgcttgaccctggccctaggggcctgtgtctgctgttactggagtgggactctagggcagtagccttggggtgggtagcatggccaaccaggccagtagagattttattgatggtggtttttgactctggggctgatgacgagcatcttggtaactatggcaactggttaagggcagtatttcctgcccttcttgggagggaaaaacaaccaaataaaaccttagggttggctggtgagtataactttcatcccagctctgagcaacagaggcaagaagatctctgagttttagtccagcctggtctgcttgagactgtcttcaggctctctgagaccacattcacacatgggttgaacgcatgctccaagtctgttctgtgaaggtcctgacattttaggaagattctgtgacccgtgaactccacacttaagagttcatgttgaggattttaagaaattgctctttggaatgcactacatgtgtgtgtgtgtgtgtgtgtgagagagagagagagagagagagagagagacagacagacagacagaccgacagacgtctgtcttgtccatccctggcttttaagtgcctgtgcccttaaatgaatcctttaggtctgctttaggtctggccttagattgtcaagggaagcccagtgacatttaaaaatcgaattatttgagttatttgtctaatacaaaaaaagatcaaagtgagtttataaacagatgcttccctcttaatcttggagctctgtagtggaaaattcaaccaaagatgggaaatatttagaaaaaacagaaaaaaaaaaaccccaaacaatagaaaatgatacaataaaagtaacacaagttaaagatacaatgtgactctagcccttcactgtgctagtgtggcaggctctgtagcacaagctgagtgcccagccatgtttcagaggcatctttctgaggccttgataggtaccagttgtaccttgtttgctttgcttgtttaaatgagaggcaaccattttactattctttgccacataaggaattacctctcttcaaatgaacttaaaatatctcctatttttaactaaaaatatactcctatttttaaccgagtgttttcttttgagtttttgttctcaaggttctgttgggtcttctgttaaaaaggaaaaaaaaaaaaactctttataatggaaattttcaaatccggtaatgtgttgaagcctcgggcaatcctgttcttgccccaccctacccatatcctgtctgctgcaggctctaagccgaggggagagggaagtgtcctgggtagggtgaggcagataaatcccttcagccctagagggtggattgctgcagccctagttcctataatagtagtacatgctgggatttagtactgaggtgatgggaattacttattcaaagagactgggtttccagtcagttcctcagtgtgcccatatattgaatgaatactaatttttcttggtgagtggccagagaaagatacattactattttgaaggtaaatgtgttttaaatctatgtgcaaatattttaaaattgtagccaagacagtccgcagatactgttcagtaaattgaagtctaaacaacatccaagagggtagagaggaattggaagtgaggcctgagggaaagggtggcttgtttgtgtcaccccagagccagatgtcctaggaatagtctgggaggagatggatggatggactcttaccatagggcagaggcgactggatgcatgggaagagtgatacttggttcttattggtggggtgctaggggggcatccatcttttagggctcttgaggtgtggcatgtagtctgcctctctctgggctcagagccagtctcagctttcctggagccattctgtttggcaaacagacctgggaggagaggtacattgaggggactagatcttctcttcttttagaggggtgggctgctctgtgtggggcactaagaatcaggaggtgattgtacagttcccacagagagcagggactgagcctggcccttcatggatggggtagaactaagaagcaagagacccgtcaaaggcattgacagtagcacttctggatggaggggggtcaagtccctgagagtgctcgatgggatgactgtcttccctccatgcctctactccatactgcttcttgctgcctcctgcttctctcagaagtcagaacctcagccaagtttctggccttaggggccagtttctccctaaagtgagggaggagacttggtaaccattttcctggcttatgcattctgtgggcccttgattagacctacagctggaaggagcacaatgaggatgtaggagtgccatttgttatttacaattttctacctaaagaaaatctgggctaaaattaacacaccaagtaatgagttccgttatctttgtctgttttgccttgctaagtgtggagcccaagttctggatattctaggcatgtgctctgctactgcattgcaccaccaggctctgctgtggtttccgtgcccagggctttgtttgacccacactgaccttggatctactgtgtagtgaagaacttctgttcttccagtttctactcctaatgcgaccataagcatgtgtggtgctaaggatcaaatccagggcttctggcagcctaggcaagcactcatctagctgggtcacattcccagttctcacgcctgtttgtagaagagtcaggtagctgtcctttaagagactgtaatacagtaagtctaggagttgtggagtctcaggctgtggtctcttatttcccttggtgtcttcttcacagtaatcaaggacgtgttctcttttgggaaaatttgttactggaagcctctgtcctaacagcggagaagttgaaacttcccaaagcaatttattaggttacttaaaataaacacggtgtttgagatactctcgaactttatttcatagagcataggaattaccaaatatagttagttagaattgagaaagacagagtttgcccatagagtatgtgctgagaatagcttaggtttgtgttgtttgtgtgtttgctttaaggcggtcttgttgggtagtccagatgtcttcatacatacttgtgattctcctgactccccaagtgatgggattataggactatgacaccaggtctaactttacataggtgatttaaaatttttatttttaaattttttactttgtgtgtgtgcgtgccacatatgtgtgtgcccattgaggccagaaggcctggagctgaaggtacatacaatgtagctaagcctctcatgagatgctgggaactgaacttgggttcttagaagaacagccagtgttcttaaccactgaaccatctctctatcccttaattgaaattttttagaagatttacttttaagtaagtgtgtgtgtgtgtgtgtgtgtgtgtgtgtgtgtacgtacatacatacacatttgctcctaggggttaaagaggacatcagagcccttggagcacactatggtcatgatcattctaatagttacttaaagtttgtcttctaactgttttaactggcttttactgtatgaatctatagaaatgggtacccagcccccagcctacctttacaccaagattaccaagccaagatcagtggcctgcttatttccagaagcaattacaccctttatataatgggattctgtttctagtccagtactgtaatctatgtttgtgcatttttattaatttttaattgccttcttcctccctttccccatcccttgggcctgtgtttgtttatagacctacttagttgtgactgtttcctgagagtgttctcaggtagctccactgtcttgaggatggtactgggtaatgttgtcctagtattagcaagtggggtattaaggagaaaaggtttttgacaaaactcaccgtaaaagaactggcaagtagccagccaaggactagaggagaaatggtggctcatgtatgaatctatccaaggatgattgtcgcaagcactgttagagacttgatcagaaagcggaagcttccctaaaagctgggcgtggttggctgcacctgcttgctacctcagcacacttgggaggtaagtcatgaggaccaggacctcagggttgcccttgaggaaattgcccctgtgtaggaaattcacgacccctggttgaagacccagcctgaaaaaacggcagaaaagtcttccctttctgtccccctgcttcctcctctgcccctggagccctgtgagtttcttgtcctcagctttgttgtctgtggagtgtcagactgattagaaataagagttctgttgtcctgtcacacatgtcgttagagagtgataagtcagataaatgtgcaggagatgccaaaggcagaagtaataaagctgccccaaagtgggtgaggggaacaagaggttcaacttcatggagctttttcgtttactttgttactgaactagaattaatagactgtggaaaaagaccttgtcaccaatgataattctccctgaaggttgacagtgacatgttggttctccctgtgggtgacctcagcatagtgaggcccttgcctctggggactttggttttcctctgtaaataaggaaatctatatggttgcctggattagaaatctgtttccttctgcagttgggctgcaatcccgtgggaaggcatgtgtgtgttgttgagtgaacagttgagtgcagttgtacctggtgctctacccgattgccttttctgtctctgataggttggttgcagggcaggggagcctgggttgtggtactgttcccttctgtcaggttctgctactggagggagtggaaggctaaaagttctaacaggattgcatgaacatgtttgtggcggggctagtttgagcctttgccaatctttcattctgtagtgggaataagtaactaatcaagagtaactcgtgagtcataaaacacccaggggattccagccatggcctgaatggtgcttgttaccagaccagcattgcttcagtacctcgttgaccatttgctatgggtcatttctttctcaatttgatttttttttttttttttgcttttgttttataaaaatctcagtccttggtttttctgagaattgttttatgccccttcaagtgtcaacaaatgctgtgatttaaagactgctcttcattagaggtgctctgtcctctttgatgttgatggtggtacacagcacaggagcacaggctctaggtctggttcaaaggtcaaagctcaatcctactgggattagctctccacagcttaattgctttatacttgggagctggttgtgaacggtaaatgacatgagaatatctggacagagtgctgggcaaaggacagagtaggaaactcgggaaagaagcccatgagaagatgataaatgagaaaaccaagacatgttcttttctggtggcgtgaagaagagtgtccgagggaggtcagaggatgaccttgtgtttctgggtatgcagtggcagaggccagtctgacctctctctggtgggtgaggtcacagtacttccatgctaaatgactttgaaagcatgtgtcttctttgccattttactaaaatattcagatggttggaaaagttaggtggcacactgtcacgttttccgttagaggggtcgacaggagagaaacagtcctgtgtagtcggagataagcagagcctggtggaggcaaaccatctgtgctttccagaagacatgcctcagtgaaccccaaagccaactgcatttttttaaaaaaaagaaagtaataattatctttatctgtttattttgtatacactttcagctaatgctacaggggaaaatgttagaaaccattcctatggtagagctaggcagagatagtaatgcatcaaatgctttaagcaggggcaaagacaatgaaacattgtaactgtacctgcatgccaactgcatttatactcaccatagactgtttcttgtttgtatgtgatgcagcctatctgttttcacttttaagcagaggtgtgaaagaaaacatgtaatctgtctggcagcccagcccagcaccagcagtcagtttctaactaggagaacccctgcatccaccagccccatgcactcccgtggtggtggctccagagccatctgtctgctttgccttcccaccccagttcttgtgcaccctgccactcgccatacttccagaattagccctgctatacaaccccctcaggtcctgtcttggcccctgctgtcagttaaagctgtgccattaattgcctctgcttatttcactgggggctcttctttggtgacctctccccttaactccaggttaaagggacaatagtatggttagaggtgcctttgggttgatggcacagagactgtcagcttgcactggctcattggttaccacttctgctgcagatgcacctgctgttgcctgacctctgaaaatggatctgggccgttagctatttctcttcactctctgtaggttgaaggtttctgttctgctggtaggataaagaggttttctttcttgggctcttgtctatgaattgtaaacgggtggggttgcttttctcgagctccttgacgccaggcacagcccttctccccccccagtgagaaagccatctaagcagctgtgccctgagctgcactggtctggtccctgtagtaacttagaattctcctgaagagggaaggcctgtcagttcctggctccaacaatattgtgatgttttctgagatttccgctcaggatggacactgatcactatttctgaagctcaggtccccgaactccagagagtctatgctccctgttcccttcagtaataataggttgaggccgacttacggaatataaatacttatatgtaattcaccagcccacagtcaccagcgtaagtgactttcccattttttttttcaggaaaaggttatatgtatttattggtctagcttctactttatcttcactgctttcagtgactttgtcagatgcctatgtgtaggcctcgctgacaggatatgagggtgagctcgtgttccatgggggccctgagcttcagctccaggagtcctgtgggaagatgtcctgtgaggatacatacaagaggcgcttgacttgggtagcttcatgtgcaggggactgatcaatgtgggagttgggcgttgtagtgagcagcaaaaaagaagccaaagagaaaattctgggttttcccccatgcccaggaccagagaaaaccgtgtctgttagacattctgaaactgttcagtttcaagagttacaagtgttaatctctgtgtccttcttttggaggttcagtgggtggatgaaaatgtcttagtcagtgaagaacaaaactggagaaatgtgctgtatttagtatttggtgccagaagcaggagccccagaggagagctgttgaatgatgtggtgttgaagacaagaagctggtctgcagattgttatcaggctattttacactgaagaacaggctttgagaggtcaaataaatagtagttgagctgattatcggatggaagatgttggaagatgtcagactggttttcagcctgaacagtgggtttaagctattttatttgctagccctgggtggttttttttttttttttaaagtttttttttttttttttttttttttttttttttgtggttttgttttgttttgtttttgagacaaagtttctctgtgaagccctggccatctccatagatcaggctggccttgagctcagagatctgcctgcctttgcctctcaagggctgggatcaaaggtgtgtgtcacccctacctggcacttgtcctattttaaaattacataacctttccactgaggactgtaccattgtttccagctctattaaagacagggcaagtcgacctttgttgcttatttttctcttctctttctgaatggtctgcatgtatttacttgaaggataaatacagaggtagatttctctttttcattttgtttgtggtgccaaagatggaattcagggcctcttgcatgctgggcaggtgctctgccatgagataaactctagcctagctctgtgattaattttatttaaatgataaatttcatttgagaaaaagaaccataatgggttgtagaggaggaaaaggtgaagatcagagcatgtccttccagacactttgatctatacttctgcctgtcaggacatgtggctgaatagaatatttagaaatactttttcctatttaatttttatcatagaggggggaaaactagtaactagtaactaggaacccagttccttagactccgcctgtagttcttttgtggcttgcagacagaagaccctggcagacaggctttcctaacccggtgccatgggcactcctggggttctcctgcctcactggcaatacctagccaggcctcttgtactaattagggcagaagtctaggaatggcccaggccttctggtcctgctgatcacctcctgataacttgtcatctgccattttgttggaagctgttctctccacaggagcacttagctgcacactgtgtctgcttctgtttgtttgagcaggacccaggaaaggctagcaaggatcaggccacagattggatcttgggaggtaaaggtgttagggaagccaggctcccagagcagcagggcccaagaatgtacagtgaccagtcttgtggtaaagcatcgggcttgggcttgcttctctctcctactctctgtgagattggttggatttgaacagcagtgagccaggctccattctcctgtgtacagtcataagcctgacttctagccttaccctagcttgactggcagtaaaccaggatgcattctcttttgtacggtcataagcctgacttctagcctcaccctagcttgactgggttggtcacttttagtttattactttcttttactcctaatgtgtgttggcaagatttctgttgctgtgacaaaatgtctgtgctagacttaaataaaagtagaaacatttatttggcccatgattttgaccatggtcactttgtcacattgcatttgggcttgtggtggcccagtacttcatggtgggagcatacagctgagggaaccagtcacctcatgaccggaagtgaattgaagaaaggaatagattgggccccattttactaacttccttccactaggacatgtctcctgcaggtcccactactacttggtagtggcaaggcagaggaccaggcctttggaggacattgaaggtccaaggctcctagcaccttggtactgggggagatgcagggcatcttagtacagactttaggtgtgacttggatgtgttgctggcgctgtccctggttagctattggggtggggtggtcatggctcagtgagaacaggttgtcctgaatttgcttaagtgtttgcatatctttcagaacatgaaggaacctcttagcagcatgcacttcggtagcttccagtgtcttgtctatgaaacgctgcaattgcccagtgttttggaaccttaaaggaaagagtctggctggcctgggtagctgcagtccttcctttgctcttgattacagttaaactgtcagggtgtggtggtgtgatgatctcctgtgcgttggtaggctgtaggctaggattacacagctgctggttagtgcaacaggaaattggtgacttttgacaaccatgttttgtgtggggggaaaaagaaacttaagaaatgaagtcaagaagaaactggctggctatctgaaggacacagaaagattctggcctcgtgatgtggttccagggcagtctgccccagctgaaacttccctcatttatgacatgtcagcataagatacattttgcctgagtaataaatgttactaatctaacctgcctcttgcatctaattctaatttatgatacttttgtgagttgaaatgtatacatataaaaatttaataattattttaaataaaataatcactggaaataagactagtgctccttcgtctctttcctcatggtcgcatcctcttgcatagagtcccagctcagccattcggcagctgcgtgatcttgggccggtccagtcacttcctgtgctcagtgtatactcggccaacaaacatttagaagaacatttagaatggcttggaaggattgccaggcccaggtgccaacagacatactcatgctttacttctcgctctgagagcctttctaaaaagtgacattgcgcttggagctaggcatgggatgtgcacagagcctcaggaggctgtggaggttgggggagtgggagccacgcttcggggatccacaaagtctccagatacgaatggcagtggggcccagcctctgttacagttcgtgttaccaggaaccaatagtaatagtaagtgtacttcctgcgagtactcacatagcttaagcacagcgattatgtttagtaacccctttcttgcctcagcatcgcctttccagatattttagctgcaaaataaaaagggagtttttttttttgttgttgttgttgttgttgttgaagtaacttcagttttgtagaagtctgaaaagtatctgtccttagttgagtggtggcacatacctttaatcccagcactcagaggcagtgtatctctgggttcaaggccagcctggtctacagaaagagttccaactacacagagaagtgtgtgtgtgtgtgtgtgtgtgtgtgtgcgcgcgtgtgtatgtgtatgtatatgtgtgtgtgtgtgtgcatgtgtgtgtgtgtgtgtatgtgtgtgtgtgnnnnnnnnnnnnnnnnnnnnnnnnnnnnnnnnnnnnnnnnnnnnnnnnnnnnnnnnnnnnnnnnnnnnnnnnnnnnnnnnnnnnnnnnnnnnnnnnnnnnnnnnnnnnnnnnnnnnnnnnnnnnnnnnnnnnnnnnnnnnnnnnnnnnnnnnnnnnnnnnnnnnnnnnnnnnnnnnnnnnnnnnnnnnnnnnnnnnnnnnnnnnnnnnnnnnnnnnnnnnnnnnnnnnnnnnnnnnnnnnnnnnnnnnnnnnnnnnnnnnnnnnnnnnnnnnnnnnnnnnnnnnnnnnnnnnnnnnnnnnnnnnnnncttttctctctcatttccttttctgtgaaggctctaggccacaagatgtgtgtgctagactccatccaaccttttcattcttgagccagctcctaaaatttcaccaggtacctgagtcagaatgaccagcagggatggacacttttcagacacatccccacccaccccacctcactcatcttggatctcctgcttctgggtgctgggattcatcatgtgtgctgccaccaccaccacacagctaaggacagacacttttcaggatccagttcactcctgacttttaggtaatactctgtctccacccctgagttttactcatgaagtggcatcctgggcacttggctgggggttgaggtaagtcacagtctaggaagatactcagtagactggacctcttaagcaagtgcatttgggaggacacttcctcagagagcttcatgtccattcacatgtcccaaggattaatgggactagggaggtggccagtggtgaagcacattggttgttcatccagaagacccatttagctagcaacaactttttttaaaaaaagatttatttatttattatattgtaagtacactgtagctgttttcagacactccagaagagggcatcagatttcgttacggatggttgtgagccaccacgtggttgctaggattgaactcaggacctttggaagagtagttggtgctttgaaccactgtgccatcttgccagcccctagcaacaacaatcttaattgctgttccagaggatcttacagcttcccctggcttccacaatatgtgcacatacatgtgggcaaacactcctatgtagttaattagctagatgatttttaaaaaggattggtagacttaggagaaatgtcacatggctcaaactggattccaataatccctggccccacagttctggtgtgtaattaattggtttacctgcagtcattttcttactgtttgcactgcaccttaggagacttagcgctaggatttcacagcctgctatgctaaagaagtgtgtgtgcgcttctgttctgttctgttctgttctgtaaactgttatcatttatttactggcctctcagttctcttactaaattgaaaagtctatgtgtagccttgagcttttgcctgtcatcacagtggcagtgttttttttttttttttcctgaacaccctttccagacgtttgcctcatggtcgttttctgtgtttttccttgtttcatcttgtggaaatgggagaaagagctcacaaccaaaagactagtagttctgagggaagtgcactcgcacactcgtgtgtgtgtgtgtgtgtgtgtgcgcgcgcgtgcatattgacacgtggctgctacagcacacatgtagaggatgagaccaactactaatgcaagcttcatcttctaacttgtttgatatggggtctctttggtgttgttccagcaccctgcttcctgttggagcacagggattgcaggcatgctgtgcagctttgtgtggcttttagatgttcacactaaggtcctctgcttgaatagcaagtgcttcgccctcagccccttaaaggcctcattttagcagtagaactgctaagttaaagagatccgtttggggagggcctagagaaatgattcagtgagtaagaacatttgccgaggaccaggtagttccccacacccacagggcagctcataaccatctgtaactccagctccagaggaatcttatgccattctctggcctccctgggcccagtcatgcacttgacacacatgaatacatgcaggtaaacactcatatacataaaatacaaacaaacgttctaaagaagaatgggaaccacttacttttgaaaagtgtcttttggaaggactgagttggatatggtggcccattcctgtaatctcagaccttgggatgtagaggcagaaagatgggaaattaaaaggttatgtttggttacatagtaagttcaaaggcaacctgagttttatgtatgaccttatttcaaacagacaaacaaacaacatacaaacaaaaaatggtcaaactgttaaagtatctatgatttttttttccctaagtgaaatgattaattcttcagccaccatcagatactggttagattttcaaagatttacttaaaagttcatctgagaaggacgtgaacagttagatattattcaggctgtgtgaccaggcatgctttaaaactattaaagagtaagacctgttctatgttttttttttgttttttgcttttttttttttttcttttcttgaggtataaagcagctttcctccctgcttgttcagaggttggggaagtgagggacagaaggctgcttctttgactgtccctttcctgagtgcagtggcttaaaaaatgaaaccaaggaagcacccaggaggcatctggtgtgtttgtagcaagaccctgtgtcctaaaaataaagtacccccaaacaaactctttaacttattgactggctcttggtatctatggaggtttgggttctaggatccccacagataacaaaatttgtggatgttcaagccttgtgaaatggtgcatttgtaaataatctaccacattctcctgggggcacattttgtttgttgtttggaagagtgttttgtggctcaggctggctttgaacttggtaggtagccaaggttgactttgaactctcagtctccttccttattctctaagtattgggaatcaggatgtatcccagtgctgtaggctcctgtgtgctctggtaatccctcctttgcttaaaacgtgggctacaatgtagataccaggagttgttacatggttgcagataccaggagttgttacatggttgcttaaggaagacgggcaaagccagaactctgcaatgtatggtacaggaagatttatttccttttatatttttatttttaattactatgtgtgggggtgagtgtttttatctgtgtgtgtatgtaacatgtgggtgccaagtgtctgagaaggcctgaagaggacactagaacccccagaactgtaattatgagtgagtgtgagctgacatgtaagtgctaggaattaaacctgggtcctctgcaagaacagcaagggtgcttaactactgggctgtctctccagcctagtctttcatgtatttacacaatctgtgtatctatagttatggagggcttaactgtaagctatctatagtaggctctttacccactactagatataagagacacaagtagcctgacattctttgactgaagtgttcatagtagaagtttcacagcaaatcccttttcacttcgggattctctgttggaagccaatgaacttaaaacattccaccaattttcattttatttacattggtagagtaggaaataattcggggttgggtctgcatttttaaatgacagacattaagagcgaattacatgacactgtacttagtgtaacatgtaatttatagtgatattatgtgcatgtgtacatattagatcacagaattaaaaatgtgctattatgaattgtaagtgacttagtttgcaaagctctgatttgtatgtatgtacctttttaagcaaagtagttgaacaattacaaggttatttacttagtgatatttgcttctgccctccaagtgtctaaaatacattaactattacatagtgattgtaatgggccaggcaggatttcaaaagcctgtgtgtaaaaattgcatattttgtacaaccaaccccctttgtagatggaaaagttgaagatttagtttgaaacagagctgatgagtcaggagtccttattttagaacatttattcttaggaagacttttttaaaaatacagaatgggtctcactgtgtagccttggctggcctggaactgggcagttcatctgcctctgcctcttgagtgctggaagtaaaggtatgtgtccatgctaagcctaaagtgtctgtgggcatcagagtcacagttcactaacgtacttccctgccttttcccaggtatgagagatgagtgtggggcgtcgaagagtcaagttgctgggcatcctgatgatggcaaatgtcttcatttatttgattgtggaagtctccaaaaacagtagccaagacaaaaatggaaagggaggagtaataatcccgaaagagaagttctggaagccacccagcactccccgggcatactggaacagggaacaggagaagctgaacaggtggtacaatcccatcttgaacagggtggccaatcagacaggggagctagccacatctccaaacacaagtcacctgagctattgtgaaccagactcgacggtcatgacagctgtgacagattttaataatctgccggacagatttaaagactttctcttgtatttgagatgccggaattactcgctgcttatagatcaaccgaagaaatgtgcaaagaagcccttcttactattggcgataaagtccctcattccacattttgccagaaggcaagcaattcgggagtcttggggccgagaaaccaacgtagggaaccagacagtagtgagggtcttcctgttgggcaagacacccccagaggacaaccaccctgacctttcggacatgcttaagtttgagagtgacaagcaccaggacatcctcatgtggaactatagagacacattcttcaacctgtccctgaaggaagtgctgtttcttaggtgggtgagcacttcctgtccagatgcagagtttgtcttcaagggcgatgatgacgtgtttgtgaacacccatcacatccttaattacttgaatagcttatccaagagcaaagccaaagacttgttcataggtgacgtgatccacaatgctgggcctcaccgggataagaaactgaagtactacatcccagaagtcttctacaccggcgtctacccaccgtatgccgggggtggtggattcctgtactccggcccccttgccttgaggctgtacagtgcgactagccgggtccatctctaccctattgatgatgtttatacgggaatgtgccttcagaaactgggccttgttccagagaagcacaaaggcttcaggacatttgatattgaagagaaaaataagaaaaatatttgttcctatatagacctaatgttagtacatagcagaaaacctcaagagatgattgatatctggtctcagttgcaaagtcctaatttaaaatgctgaaatagacatgagctgcatttcacagaaaggcctagcctgactagttcccatggtgtgctctcacaataggtgagttctgtgtgaggctattagccttcatgagcaggtagcccctgggctcccaagccctcagtccttcccttgccttgtgaagagggaaggctgaagacagctcagcatggcagggtgagtggttatgacccttcctctggctgccggtcctcagtttctaatttgttttctttctcctccacaattatgtatgtatgtgtgtatatatgtgtgtgtgtacatacatacatatatatatatgtaggacacaacctggtggctttgtgaaatggaattctatgtattttcataagattttgaaagttgtctagaaagtagactgatgtcaatctcccgtcacccagcagtattgtccttgttactagaaaccgttacttcctttatgcaaggaaagccacgcagtgcgtgtagttcatcttgtcagggcttatggccatgaggacagaggggattttctttttacttgtgtttggtttcctgggtggcatcatggtagttaacctatttttagtatttgaagatcatgagtgtgattccctaatggccaactggagactgagtagcccgacagccatgggtctgtgagtgttcagagactgggaagcattcgccacttctgagctttggacgtgattagtcagttaaaaccccaagattctattcttgccatattatcacgtattccttagataaaattctgggtagtgacacttccctgtctcagtgtagaagtgcctgtgcttttatttattgttcagatcaaacaccaaaacattttcttaaaaaatattttgtgtaatattttatttgtatacagtgtttgtgaaatatttaactagagcatgatattttattttttctcatttttaattctttgagaatttcatacaatgtgttttgattgtattcacctccccatctcctcccagatccagcatgatgttttaaatgttaagctgtaacatgttagataaagttaactcttatttttgaattttaaaatttggatgggggggtatgaactgctagagaaaataaagttctgccaaaatattgcatatactagtatcttgtaacatgctttcttgaaatatttttgtgctttagagggttctcacctgtgctacaggggactgggaaaaagtggaaataaagtgattgtattttttaatcatcacgtataataagtgatactctttctgttcttgtttccctgtgtttcatgacattctccctgggctatctttcccagaaaccattacagtcatcattatattaacagtctgtgtccgtgggttagccatcactgcatctgtagtcttaaaagcacttcccacctatgtgtgtcttcctgagagctgtgccatctggttttttttgtttctgtttttgatttgagggggtctctatggggtcctggctgtcctggggctcagtatgttgaccaatctggcctggaattcctagagctgctcctccctctacctccattgtgatgatggaattgaagacatgcattccagctataaagcacctggacccccacatcccaagcgtctgcaagaaggacccaggcatttccaaccacgggttgcacttctttctcgacctgtcaactaatatacaccttcatgcccttcctccaaggcctccctgagatcgaccaaaccattttactgacttgacccagaccaagaaaccctggtgtgcagcacccatgtctgctgcctgtctttatgaaaggtatacaaagtagaaactcctattctgtccttggattgcattgtttgagaacatgatctaaggtggctaggagtgtgtgaaggcagctgcctgctgggactggggatctgctcagaaccccggaggaggtgctgagtgcatatggtttgtgtctgaagcccaagggagctgtctttttctaagactgctttagagatggtatactttcttacaaagtttgtacactagctctaaaacaaacaggcttcagggtaacactgccactctcactacacatctaccacagaagaaaaatgttggttgaaccatgacaggtttttttaatttgatattactttgtggcttaaggtgactctaaagtgttaccccacccccaactcgctgcttcagtttctcagatgctgaggttaccaggttgtggcgccatgcctaactgtggccatttttcttttccctttttttgccttttgaaaatgcattccaggacctggggtgtagatcatttagtagaaagcttgcccgtcatgcacagagacctggaaccaaaccccaggacaacataaacttggatggggtgtggtgacacgggcctgtgtcccggcactctccagaggtggaggcagggctattagaacatcaaggatatccttggctacataggaagttgcatgctagtccagggtacacgagaacctgccctggtcacttcccgtccacaaaaaatccccagtgatgttttgttttctggttgcttgtgctacgggagtctgttgtttatgaactcagttgaaaatgaattagccctgttagtatttcatagttatttcaaattgtgttgctgttattttcttgagaggggatattaagtgatcttggtatgttatatgaagaacacagttgtgtaaaaattcataacgtcttaagtttttgttctgtatcgtgtgtatgtggacacacatgggccatgacaccagaagacaaagttatggagtcctctcctttcacctttatgtggcttccagagtctggctcagtttcacccactgagtgaccctgttggcccctcaggaaatgttttatattaaaggatgtgcaccccaagttcagcttccaagcgtgaaggctgcagctgggtggatccctttgagtcttttgggtgtttttgtttttgtttttcatgctgtggtttctctgtgtagccctggctgtcctatacagaactcactctgtgaaccaggctggcctggaactcagagatctgcctgcctctgcctcctgagtgctgggatttaaaggtgtgtgccaccacgcccggtgaggatatcttcccttactgtctttgactaagcaggatgggagccccacagctttgatctcaaacgttggcactgctttctctgctctgcaacttgtgcttccttcccaccctacagattgaacttaaacaggaaggcagctgagctttaacacggcccagccagggtgtgtgtgccattgtgtgtgtgcaagtgtgtatgtgtgtggttctgggatctgcctgcacaccaggagcttctctgggaaggccactctgtgccttccgcccaacgttctcccttccaccagtgcactgagagaactcccaactcttagagaaactggtggtaccatctccatttaggcccaagctgggtgtcctgggggtgtttttactgtgaagggaagcaaatcttccatttattttcctcagctggaacgctctcgtgttgtcttgttgtcctgacctctgcagtgggttacagcattgactaccccacctagaaacctctgcatggtgatgtaccatccatcatctggaatctttgttctcctgttgactccctaatcccggccttatccttagatacctcctgtctcctttctcctcggggttgtatctggacacacgacatgtaacaatttctagaaaatcatttttaaaaatattgtgcatttcctttgggtcagactcattgtttagtcttctgtcctgagaggccgttgggtcgttaagccaacaggaaaccttcatatgtgccctccacccccctgcctagagtcgctgatcttactcttcccagaactccttggtgatagataactctgcaggatgtctgggttcttcctgaaatgcagaaggactgagaggtcccacgtgtctatcgtgagttttccagtatcgtggagtccagtggtggcctctgaccctttctccgtcctagtcagcgggtctctttccaatgctctgtagcaaaggagcacttggtatagaaatggaagggtccattttctgattaaaaataatttgcctacgcggtggtgcacgcctttaatcccagcactggggaggcagaggcaggcagatttctgagtttgaggccagcctggtctacaaagtgagctccaggacagccagggctaaacagagaaaccgtgtctcggaaaaacaacaacaacaacaaaaacaataatttgcctgttctcttcctcctcttccctcctcttcctttcttttccttccttccttcctccctccctccctttttctttcttttttgcaggtctaccacagaacagtgttcttacctggtaggcagggaatggggtgaataccttagctctgcatagctcgggactcaggctattgtcccctcagatcaaggcaataacttgttctctaagttcagtgtccatgactgtgggattagtctgtattcttttttgacctattggtcagggtcagcattctctgtcctctacagtggaagagctgtgccccttctgactgtcttacagagatgccccagagctgacccacctttgactgtcttgcagagatggccacctgcttggatgttaccctgttggtgccaactgaattgcccaggaaggaccagcagcagagctctgtccctgtcttctcctctgtgcagctgtgtcacagactgctgtagctggggatggccctgagaagacgagctcattcctgggctcattcacagccactcaagtccgttcaacagctccttgctgggacgggtggaagtggctaggctcagaccccagagaaaaccccaggtcttgcctcccttttgtttagtgaccctctgtagctctccctctctctcatccaagggctccaggcagctggggtcaaaataccttcttccgcattgcaaaacatggccaggactgagatgggaatgaacatgtctgcactttgctggatggagagagaagggaagctgaaaccgctgaaaccgtcgagctgtgctggcagaggggaagctgtgcgaaacctcctacctgctcagagacccggcactgggcaagctacaagtcagtcctgcatcccaagctgctgctaaggcctgcactcagactctctggtggcaggatctgttctcctgtctggtgagatggaggagcccaggcacacagaaataaggaccgtaatcaaatgtgggcacacatgagccgctcgcatagcaacagcctcacggtcttgtttttgtcttgtgggaaatgagaaatgaacagtaggcagcggaaggtacattatagggcttaaactcggtgggaatgtctgtatttatcccactgcaaaagcttcaagtgagtcactatggaaggaatgaagggggtggggtgctagtgcactgtctagaaggctaggaagcttacagagacctgctggacccaagaataagacaaacaagatgcaaagcagccccctgggagcccactgcttctcagttgtctctccagctgggagggccatgccgtgctagaaggcagacaagtcatacctccagaagtgggagaaggtcttatgtaagtggggtcccaccctgcagtcaaatacaaactcagctacaggggtgatcccgaggacaaagcaactgaaagccgacaaggtcactgtgctggcacttgctgtgaggccagcctcagctaccaagcaagactttgtttcaacaaaacaataaaaaccactccctgtggcatgtgttcagtaatgtatcagaaaatgtaaaagtatgttttatttcaccccagggcacctcttcattgccgtagaccagcccaatgagctgaatatcctaagtgacttattgggtgacttcatttggaaaaccttaaaagtaatttaaaatgtaaactttcctcttattttttgttatgtgtatgcgtgtgtctctataggttcccacaggccagaagatagcatcagcctttaagctgaagttacaaggtgctaagagccaaactggttctctgcaagaaatgctctttaaaatatattagtaatgtttatttatgttattacttatgtgtgtgagtgttttgggttcatgtatgattgcacaccatgtgcatgcttgcagtctacaaaggtcagaagaaggtgtcagatcctacgggactggggttaatagacatttgcaagctactgtgcatccacagagattaaatctaggtcttctgcaagaacaacacattttcttaaccttgaagttagtttttcagcctaagcctcaagtgctcctaactgcagagtcatctattcagcccgtatatttttaaaaaatacttatgcgtgcatgcatgcacacacgcgtgcacacacgcacatgcacatgcacacacacatgcacacgcacccacacatgcacacacatacacacatacttgtacacgcatgcacacatacacgcacacacatacacacacatgcacaccccccccacacacacacgcacacacacacatacacacatacatgtacatacacgcacacatacatacacacacacacacacatatacacgtacacgcgcgcacacacacacgcacacccttgcctgaacatatggatgctcaccacatgctgtaggagcccaagtaggtcagaagaagtgccagctcccctggaactggagttgcagttgtgagccaacatgaagatgcttggaactgaactcagcttctctgctacagcactaagtgctctgaactgccaaactgtctctccagctgcccttaaaattttttttttttatttttgacacaaaaacagtacagaacatctgtgtgcttctctccagctttctttaactgtgtgctaattatcaaggcagaccagccagcaacaggaaatcaacattgctatagctgcattgcttaccggggacttggttggcctctggcaaaccctcaggtccgtctgttgttgcttaggcaccttatttatggccccacatgacatttaattttgttttctccttggtctcccatctgcttctcagtcttgtctttccatgtcttcatgactgatgtttttggtcagtattggttattcatagcatgttcttcagtgagagcttgtgttagagtggcttgggtgttgtgtagtgtacaagaataccacagagccatgccagtgcgtgacatcaggttcgtgagattactgatagtactcgctgggtttcgccacagtaagaaactttgtaattaagacagtaagaaactttgtaattaagacacacgtcacgaggggtgtttgtacatttgaaatgtacagataaacaaaggcattagtgtatgcagtgtccagagcctggcatgtgacaactgctcagcagtgattagcttgcttctacatcagtgtggcctctgtgggcatctgctgctctgctgtttcacactcgctgcccattgtcctgtgctcaaatgggcccactccaataatcactggctatccgttcccaatatctgtggatattaaggataaatgccttaaggggtcagaaaggctgggcatggtgtcatatgccacaacactcaggaggcaaaggctggaagattgctgccaggttaagaaccgccaggcaagactatatatagcaagatcccacttcagaaaacaaccaagcaaaccaagacaggtgaactcaatgtgggggcataggaggcaagtagcaggtggtcctctgctctgtgtgtctaagctagcagtgtcttgcctcatagggagggtgtggtgctggaccacatcccttttgctggaggtctggacaataccctgctggacaggatagagagagaacccatatagctgagtgcttgaggcaggagtaagtcccaactggctaggacagagttgctgcaagagtaatctttaggaggagggccaggttgggtggagagagccccaaaacctgtgggaagctgccccttccagagcaaggcaaccttggcctgctctcagagtagccttcagagctgagtccctctctgctgtctcagccagcgggcaggcaagcacagcaattatgactgctcctcaggaggccccttctgtaccagcatacaactttatttacaggatggctgttcttggcagctttcttctcccagacactcttcctactttggagcgtttggctctatttttacccagagatgggatgattctcatgtttgcaaatagctgccatggagaggattgtgtggctgctgctgtggccaccaggtagccatcctacatccttcgcttggagacagatgcgcctaggatgtgggatgggggtgggggttgggtctgggaggaatgacaagtgcccctgtgtgacttgcccacggtcttcaacatgaaagctacttttttgcttgattaaatgggggtaatagagttactggcatctttctggggaccttaaggaagcttatgaagctgagaatcagagctgtgcatctctggagcagtaagtaaggcatgggagagcctttgagctttcgatctgtattgtcctgggcttcctgccgtgtgagcttccttttcccttttttggcttaagctagctggaagtggatggttttgatcataattgagaccatgagagtccagttgctttcctaagtttgaggttgaatccagctgcaggtgctccaagatgtccacagtgaggacagcttgtgacctactcctggttcctggaaagggcacagatatactggtcttgaatcaaagaacacaagtggcaaaaaataggaagccatggggatgcccttcctttttcttcagatgagtgccgggcaggtctggagactcctggatgaggagatccaatttctcactgggttttagactcatcctccgcacgacattggattgcagtatgaggcaagcaggagagttctacagccatggagggttctgcctgatttcagaggagagcctgtgagcatgcagcaggttggaattcctgtggggatcccctgaggggacgaggtgggaagctgtgagagtaaagaaagttctagatgccaggattgtgggacacctgccaagaaaaaccacacagatcaagctgtgccagccccagagagggtacaaatgatgaggctggaaggcttggttttgcccatgttctctgaagtcggaatcggatacaggacaccattctttatcccgagcttttgtcccctccggcaagaacacactcaggacaaccagaatcttctgcggcaaagcttttattgcttacttctcaggagggaagaccccgaaccgggaaaatggcgctgcttatatagcccgcagcgtgacgtttcagcacctgatgtggcgtgacagctcctgattcgttgctcgcccatcaccccattactactccgcgagatgggcagtgactaggcgtgagttcactcatgcacatgcgcataaggcttgtttactagttaggcgcagtggaagccagcgccatcttataatggcgattgctcacggcacagctctccacaattcttgaccccgtctggtttgctttgctttgctctggtattaggaatgtttactctgtatatcttggaagcatgctaagtgacctttgacttctacagttcagttaagggtttaccttgagtcccagaggacgcttcgattttggacttttggacaatgctgggactttaaactctgaagagtgggtgcattttccctgtgaaacaatacagggtggctgttatatgtcgtagagtgcttgtgcttgcttgtcacgctgacggggtggcctcaagatgctctattaccaaattaattgggttgagaagggcctttggtggctaataaagcagatatacaattgattacatgtgggccgtggtaatggggtgggggaggggcagtgggggaagagctgattatggtggcaccattttggagtttgggaccacagataaaatgacaaggaaaatgtagaaaaccagctagtggggttgaagagatggctcagaggttaagagtacttattattcaattcctagcacacacacatggcagctcacaactgtgtataattctagcaccaggagatctgatgccacctcctggtctctgtgggcatctacacacttatgtacacaaactcatgcagcccacatgcatacatataagtaaaaaataaatcttagaaagaaaagaaggaagagggagggagggagggagggagggagagagagagagagagagagagagagacactgaattacccataaagcattccccctcagagagagagagagagagagagagagagactgaattacccataaagcattccccctctgggtcctactacattgtcccttatttctgtgatgtattttgtcagaacaataaaaaaaaaacagggaaagttatatcttagtaaatttgtattagaataacatttaattgaccctaaatcaataaaatgtccatgggccccaattccaattcttgagataagggtatcacactgaataaattatactgctcctctttttttttttttttttttgagacagggtttctctgtatagccctggctgtcctggaactcactctgtagaccaggctggcctcgaactcagaaatctgcctgtctctgcctcccgagtgctgggattaaaggcgtgagccaccacgcccggctactgctcctcttatatcagttgctctgaaggtcactgggcatcagaaatgtgcttttactatgtctcccagaatgggatgaacttcccctgaccttcctagtgctatgtggggcagtggaccatgccatcagacagaaaacttggcaaagttgagcagattcggaaatcccagtactctcatgtctgagtacagtaggcatttccatctactcccgatcagggtcctgtcctggatcacaggaccacgacactccatggagaggactgtgacaatcagtcacacaggggcaacacccgaagcccctccacacgcagatgaggcatctctaacatctcaaatcaagccaggagaaagcttctgcttttataccccaaatcacccccaaatgcatataagaccctatctatccacaaggactaaagtgcacgag

SEQ ID NO: 1384 - DNA, 2760 bp, Mus musculus
ctcatcgtgtctttgatggcttcataacctgaaggtccgaagaggccagataggcaccaccctcaggccttgggcatctatctaggtggctgccgctactatgtacgctgagagcaaagcggccgccgcggcaacaagtgctggagctgaggcgagccggagccgcccagaccccgccgggccgcccgtccgcgcattgcgcatggagcgagagcggcggcggtcgcggggctgagccgcaagagcggctgggacgtggatgcggccgcggtcttccgccccgccccgccgagctggaggtgtccctagacaaggtatgagagatgagtgtggggcgtcgaagagtcaagttgctgggcatcctgatgatggcaaatgtcttcatttatttgattgtggaagtctccaaaaacagtagccaagacaaaaatggaaagggaggagtaataatcccgaaagagaagttctggaagccacccagcactccccgggcatactggaacagggaacaggagaagctgaacaggtggtacaatcccatcttgaacagggtggccaatcagacaggggagctagccacatctccaaacacaagtcacctgagctattgtgaaccagactcgacggtcatgacagctgtgacagattttaataatctgccggacagatttaaagactttctcttgtatttgagatgccggaattactcgctgcttatagatcaaccgaagaaatgtgcaaagaagcccttcttactattggcgataaagtccctcattccacattttgccagaaggcaagcaattcgggagtcttggggccgagaaaccaacgtagggaaccagacagtagtgagggtcttcctgttgggcaagacacccccagaggacaaccaccctgacctttcggacatgcttaagtttgagagtgacaagcaccaggacatcctcatgtggaactatagagacacattcttcaacctgtccctgaaggaagtgctgtttcttaggtgggtgagcacttcctgtccagatgcagagtttgtcttcaagggcgatgatgacgtgtttgtgaacacccatcacatccttaattacttgaatagcttatccaagagcaaagccaaagacttgttcataggtgacgtgatccacaatgctgggcctcaccgggataagaaactgaagtactacatcccagaagtcttctacaccggcgtctacccaccgtatgccgggggtggtggattcctgtactccggcccccttgccttgaggctgtacagtgcgactagccgggtccatctctaccctattgatgatgtttatacgggaatgtgccttcagaaactgggccttgttccagagaagcacaaaggcttcaggacatttgatattgaagagaaaaataagaaaaatatttgttcctatatagacctaatgttagtacatagcagaaaacctcaagagatgattgatatctggtctcagttgcaaagtcctaatttaaaatgctgaaatagacatgagctgcatttcacagaaaggcctagcctgactagttcccatggtgtgctctcacaataggtgagttctgtgtgaggctattagccttcatgagcaggtagcccctgggctcccaagccctcagtccttcccttgccttgtgaagagggaaggctgaagacagctcagcatggcagggtgagtggttatgacccttcctctggctgccggtcctcagtttctaatttgttttctttctcctccacaattatgtatgtatgtgtgtatatatgtgtgtgtgtacatacatacatatatatatatgtaggacacaacctggtggctttgtgaaatggaattctatgtattttcataagattttgaaagttgtctagaaagtagactgatgtcaatctcccgtcacccagcagtattgtccttgttactagaaaccgttacttcctttatgcaaggaaagccacgcagtgcgtgtagttcatcttgtcagggcttatggccatgaggacagaggggattttctttttacttgtgtttggtttcctgggtggcatcatggtagttaacctatttttagtatttgaagatcatgagtgtgattccctaatggccaactggagactgagtagcccgacagccatgggtctgtgagtgttcagagactgggaagcattcgccacttctgagctttggacgtgattagtcagttaaaaccccaagattctattcttgccatattatcacgtattccttagataaaattctgggtagtgacacttccctgtctcagtgtagaagtgcctgtgcttttatttattgttcagatcaaacaccaaaacattttcttaaaaaatattttgtgtaatattttatttgtatacagtgtttgtgaaatatttaactagagcatgatattttattttttctcatttttaattctttgagaatttcatacaatgtgttttgattgtattcacctccccatctcctcccagatccagcatgatgttttaaatgttaagctgtaacatgttagataaagttaactcttatttttgaattttaaaatttggatgggggggtatgaactgctagagaaaataaagttctgccaaaatattgcatatactagtatcttgtaacatgctttcttgaaatatttttgtgctttagagggttctcacctgtgctacaggggactgggaaaaagtggaaataaagtgattgtattttttaa

SEQ ID NO: 1385 - protein, 393 aa, Mus musculus
MSVGRRRVKLLGILMMANVFIYLIVEVSKNSSQDKNGKGGVIIPKEKFWKPPSTPRAYWNREQEKLNRWYNPILNRVANQTGELATSPNTSHLSYCEPDSTVMTAVTDFNNLPDRFKDFLLYLRCRNYSLLIDQPKKCAKKPFLLLAIKSLIPHFARRQAIRESWGRETNVGNQTVVRVFLLGKTPPEDNHPDLSDMLKFESDKHQDILMWNYRDTFFNLSLKEVLFLRWVSTSCPDAEFVFKGDDDVFVNTHHILNYLNSLSKSKAKDLFIGDVIHNAGPHRDKKLKYYIPEVFYTGVYPPYAGGGGFKGPLALRKATSRVHLYPIDDVYTGMCLQKLGLVPEKHKGFRTFDIEEKNKKNICSYIDLMLVHSRKPQEMIDIWSQLQSPNLKC
